United States Patent Application Publication US 2008/0114160 A1 - sequence listing, part 27

SEQ ID NO: 7858 - DNA, 7417 bp, Oryza sativa
gtgtcttgtgggtacagtggtacacctctggctagagtaaaactattcgaatagccgtgcccgcggttatgggcgagttgagcaatgtttttcgtgattagtctcacacctctcacaataattatggatgttatacctggtaataatttgtttagctcctggtttggagattagatctgtacagccgggtatggttgttcaggatggttgggcctgtgcagcatgggtgtgctgttcagtgttgattaaaatttctgattaattacttcactgttttatttctcttaaatgttttgctaaatgctgcttttgcaaatgagcttgtattatgccatcctttggaatccttgtgcacttgcatatttgctgtgtggcttgttgagtatgtcatatgctcattcttgcaataatcatcaaacctcagttgaagataaaggatccagaaggagaagacgtttggcttataccccagttgagctgcctgtgggagtggagctgaagccatcgctagaccgttaattccgctgctgttttcttttcattgtaagtatgtaacgttattattaagatggatttgtatattaaattgtcagtttgtgtacctcggctgattcctggacgaggattttatgcacaaattagttcggaaattactagtgaatttccgggcgtgacagacggggtggatctcggccacacgaacccgacggcggcgacggcgcggcttggcggcgaccctaacggcggctagcggcggccggagcagcggaaaagtcggcggcaaggggttgcacggcgcgggagcgatgggaggctcgagagagtgcggtgaaatggggaaaaagtgagaggggacgacggcgatgcttaaatagggggagagggaaccggacgtggccgggagaggcgggaatcgccggccgacgtgggggagtgggggaggagagagaggcgggattcgaaaatcgaatcccggccatctcgggcgcgggcgcgagcggtataggcagaggagtgggcgcggcatacacggcgcacgcgcgggcatggtcgacgtggcccggaggagccgtagacgagggcccgtcgacggttgcgggctcgccggcgcgagcgagatcggtgggaggtggggaaaggacccgacaggtgggccccacctgtcggcgaccccgagatagcaggcggcgggccggcctgactgggcctcggcctgcggccggcccagcaagtaggagggggaggaaggagggaatgggccgacggcccattcgaaaaaaagttggcaatagagaggactaagataatgcaaaaggtaaaaggattttccctggaattaaaatattgcttactcttttttaattggttaaaattatttctagagctctgaaaattccactaaaaatcctgttagtgaatttcgacatgtagaactcaagaaaaattccacatgccaattccgattattatttgcattgatttaaaagggtttactcttgctttgcaccggcatctttatagggtcatttataaattaaaattttggcttggggggaaaacttcggggtgtgacagtaatcgactgtagacgtagggaagttaccctgaccacaccttggggatcggatatgacagcgaccgtggatcaagatcctagactaaccgaacgtgccagaggcatatttaccaagctacccctaaagggaatgcccgtagtgaagcgatttcctgatgtgttcccagaagatttacctggaatgccaccagatcgtgacatagagttcattattgacctgatacccggaactgctcccatatccaagagaccatatcggatgccagtcaatgagttggaagaacttaaaaagcaaatcagagagttgcaagaaaagggatttgtacgtcccagttcgtcaccttggggagccccagtgttattcgttaagaagaaagatggtagcatgagaatgtgtgtggactaccgctcactgaacgaagtaactttcaaaaacaagtacccactaccacggactgatgatctcttcgatcaacttgaaggagctaaggtgttctctaagattgaccttcgatcaggataccaccaattgaaaattaggaccggggatatacctaagaccgcgttctcaacgtgttatggattgtatgagtttgcagtgatatcgtttggattaaccaacgccccggcatactttatgaatctcatgaataaggtgttcatggattacttggacaaatttgtggtagtattcatcgatgatattttaatctactccaaggatgaggaagagcatgcggaacacttgcgattggtactcgagaaacttcggaagcataaattatatgcaaagtttagtaaatgtgagttctggttagaagaagtcgcttttctaggccatgtaatctcagccggtggagtagcagtggatcctgctaaagttgaggccattacggaatggaaggcacccaaatctgtgactaagattcggagttttctaggtttggccggatactaccggaggttcattgaggggttctctaagatagcccgacctataacacaactactcaagaaagaaaagaagtttgtatggtcagaacagtgtcaagaaagctttgagcagctcaaagaaaagctgacctcggcacctattctgtttcttcccgacaacaggaaagactttcttatatattgtgatgcatcgaggcaaggactaggaggagtactgatgcaggacggaaaagttgtggcctatgcgtcgtgacaattgtgaccacatgaggaaaactaccctactcatgacctagaactcgcagctgtggttcatgcgctaaagatttggagacattatctgatttgaaatcattgtgatatctacactgaccacaagagtctgaagtatattttcacccagtcagatctcaacttgaggcaaaggcgatggttggaattaatcaaggactatgatctagaggttcactatcaccccggcaaggccaacgttgtggccgacgctttgagtcggaagagccattgcaatcatctgaggacggaagggatggctcctgagcttaaggaggaaatggcccaactaaacctacatatagtacctcgtggacagataaacaccttggacattcaacctcttctgagaacccaaatagaaaaagcccagaaggacaacgaggaaatccgagaggtgaaggaacgcctagccgcaggatttgcaaaggaattttcaaccgacgaaaaagatgttctatggtataaaaagaggatctatgtacccgaacagggtggactgagaggattaatcttaaaggaagctcacgaatcggcatattcattgcaccccggaagtaccaagatgtaccaggatctgaaggaaggatactggtggcccaatatgaagagagatgtggccgaatacgtagcgctctgtgacgtatgccagaggtgaaggctgagcaccagagaccggcaggtctgttgcaaccccttaggattaccgaatggaaatgggatgagataggtatggatttcatagtcggggttgcccaagaccgcaacagggtacgattccatctgggtgattgtggatcgactcaccaagacggcaagattcatccccgtcaagacaaactatagcagtgctaaactcaccgagttgtacatgaccaggatagtgtgtcttcatggtgtgcctaagaggattatatccgatcgaggcacatagtttacctcgcatttctgggaaaaagtacatgaagtcctaggaagttatcttgcttttagcacagcttatcatccacagacagatggccagacggagagaacaaaccaggtcttggaggacatgctgagagcttgtgcattggattttagcaaagactgggagagatgtttgccctacgccgaattctcctacaacaacagctttcaagcaagcctaaagatgtcacccaatgaggcattgtttggtcgacgatgttgaaccccactgatgtggtccgagacagatgaacaggcagtatttggacctgacattatcaaagaagccgaagaaaaggttcgcctgattcgagaccatctaaaagtggcacaatcacgatagaagagttacgccgacacccgaagaagaaacctggaatttaaggaaggagattacatttatctaaaggtttctccgatgaggggaacgaaaaggtttaaggtcaaaggaaaactagcaccaagatatgtgggaccattccaaatcatcgctagacgaggagaagttgcatatcagttacagctaccgaaaaacatcgccgatgtgcacccagtcttccacgtgtctcagttaaagaagtgcttgcgagtgccggaagaacaagctacattggaagaaattcgtattagcaatgatctcatgtatccagaacacccagtccggatattggatgaagctgaaaagaggactagaaccaaagtgtggcgtatgtacaaggtatctcatgtcgccgtcgcgtcgtcgcctcgcgccccgcgccccttcccagccgtgcgcccgtcccatcttccctgctgcgcgcgccttacgccccgagccggcgcgccgtcatcccaccggcccgcgcgcccacgcaccccatcaccggccgtcccgtcgccacgcgtgttccatcgccgcctcgagcctgcgccgctgtcgtcgtcgccattccatcgccgcgcgccgagccccacgccgcgccgcgccgttccatcaccgcgcgccgagccctgcgcccgcccaagccccgcgccgacatcacgttgccggccgtcgcgtccccgccgtcgtgtcgccgccccgcgccggcgtcgcgtcaggcccgccaccccgtcccctatatttcttccccctctcccctataaatactccacaccccctctccatttgccccactccatctccctctttctccgatcttccctctccaccgagccactaccttcgtgccgccgcgctgccgccatcgcgccgctgcaccgccgcctttgtgccaccgcgccgtgcgccgtcgtcgcgccggcctcgcaccgtcgccttcgtggcgccgcgccgtgcgccgccgttgcgccgtcatcaccgccgtcgccgtcgtcggtaagccgccgcctcctctccttgctcggtcgtcgtcgccagagagctgagagagagagaggagggagaagaagccgggagggagagaaagagagaaaagaagaaagaaagaaaaaggagagaaagaaagaaaagaaagaagggaaaagaaaagaaagaaaagaggagagaaaaagaaaagaaaagaataaataaatagaaattagagagagattagggaagttagaaaatttaaaataattggaatttaattatagatcaattatagtcgtagaattgcaaaaatttaatataattatagattattttggtaatctctataggtgatcaattcacggtaggtactcggatttaattaataggaattttagacgtatattatatttaatcgtttagtcatagactaaattaaatcgtataatattataagataatttttggattccgtctgatatttagctcgcgatagaaatttctaacctattatatggatataatactcgggtacattaaattaaaaacttatgataacaaaatatttatccccgcaaaaatagtttaggatgtataaattgaaattaggtttgccctagttcgcgaatagtaaagttaatataaaagaatcgactttcgcattcgacttccatttggatttatttggatttttatttgaattctaaccgaattcaaatcaatttttgcacgtaactatagagcccaagggagttgcggatccaagtgaaggccaagacccgcaagactttgagcaaggcaagtcatcactattccttgaacatgttgatcccaattgcgaaattattttgtttacaaataaactacatgcaatgatgaacatcctacttgtgattatgccatgccttgattcttgtttaccccttatggcttcgtaaccatgtttacgtatgagtccctagttaattatgacaattgcttagaaatgctattctagaatcatgcatactcatatttatcaaatgctatatgcttgggcaattacctttgggaaggtaattgagatgcggcatgtggggacaggagcgccatattgccatgatgttgatgacatgatttgtgaaaggagaaataaaattaaacaactgttttcgactgaggcggacggaagatttgggtgttgtccggaaaaggctagtgccgtccttggcaagttaaggactgagccatgaagttaagcatgaaacgacccccgtacaaccgcacttctcgtatgggtatagacctagcggagtagatagctgagcggaggtaatatccatgcatagtggtttcttgatgtgtgaggcaggggctctacggtggggcaaccattggtagaaccgcgaggcgggtgtctacagtggtgtcgccatcggtaggactgccatgtgagaatctaaacataattataacttaatgcatgcatgagtcttcccttcccgggtgcgccagaactcctctcactgctagaaaccgtgtacgcctagagtgcatgaggatgtaaagttcatggagcgggtactgccaaggcgaggttatcgaaaagctttgccgtgacgcgtctcatgtgttgggacgaggctcatgtgttgggcagtcgcggagtgcaagtaaagtgtacatccactgcagtgtgagtaaaccaaatctattcgaatagccgtgctcacggttattgagcaccgggacatgtattacacttggctagactctaaattcttaacttgtgtgggatgggatattgcatgatgatttctatactgatgaaaccacttcctgagaggcgggaatgtggacgtcctcagaaaaccatgatgactcacaatggatggtggacagaaccgtcattgtttaatatgaacactggtactaaaatttgatcagtttgtgataggtcttaggtttgtgaaaagaattataaaacttgctttgcgcaaaagaaccatagccatcctttgaatacccctatcatgtgcattgttgctgtggtggcttgttgagtacggttgctactcacccttgcaatatacaaacttaatcagaggtcggagatgaagctttggaggatccctacacttactaccaggagggtgatgaagacgatggcactcgctaggtcttagttacggtcgttgcctgtggcaatggcgtgccgctgccttaactccgctgccttatctacttctgtttttggaatgtattctagaccgctcggtccgatgattaaagactatgcctgcgggctttggatg

SEQ ID NO: 7859 - DNA, 1474 bp, Oryza sativa
atatatatatatatatatatatatatatatatatatatatatatatatatatatatatatatatattagtctttcagtcttgctgtttgaggttctgtcccatcaatatacttaggagtatttgctgcttgggacttgcagctgacaaaatattagcattttaatgttgttcctgcactcaacaggcacctccatgcaatcaaatactgcaaggagtttctatggctccccgaagtaatgtgctttatgtttgtctgtatatcttcaaaggtgacagtgctgacagcttcttggcaatgaagttctgcacaacggatgcgattatccgacgcgccatgttcaactttggaagaggaacatgcatccagttacaagatgatgaactacttgtagaagattttagttaagagtagtatgcaaactgatgatcggcaacatttctcgttgtatggaactgaccgaaagcaatctttttgtaagaaaccgattggcaacaataacatactgggagttgaaatctgatcctcaaattcatgtttgtaagtttgccactctcttgcaaaatgcaaaacgcagctacgtgctgccaaggttcttacaaagccccatctctaacattgatctagtatagacaagagccccatttgcatcgctcaaaattcaggcgaacttcacaggaatttggcacaaacaatttcgaaattcgtactccgatgttaattccgtgggttaaaccgtttttatcgcagtgatacaccgtcgaactgaatgcaacggtcgcacaaaaatttacatattcaccctcgtaacaagtcaaaattacgaaacacaccctccattctccgctccttccgttccattccatctccggtctgagccgccgccgccgccttcttcccctctcactcccacctcactaaaaccctagcccaaaccccacctcctctcccgccatggctgccgcggcggccacctcccgcctcctccgccgccacccgcctcccctccccctcctcctccgctcctccatctcctcctcccgccctctcctccagcagcccgagctctcccccgccgccgcggccgatgcggcccccgccaccgatgccgcgccgctcccgccgaagccgagcacggggagccccttctacggcgagaactggcggaaccccgccgcggcggccaacccgtcctcatcctccctcctccccgcggtcgtcggcggcggcgcgcacgcccgcgcggcggcgtactcggcgtccccgggcgcggcggagctgaaggagacgttcgcggagtggatggcggagcagcggtgggaggagatgaagcagctgttcgagttctgggtgaggtcgctcgacccggcgtccgggaagcccaaccgccccgacgtcgacctcttcaaccactacctccgcgcgcagctcatgtccggggcgctcccgatcgagatgctggatctcgccgagca

SEQ ID NO: 7860 - DNA, 11283 bp, Oryza sativa
  unsure (1)..(11283): unsure at all n locations
tatagggcgaattcgagctcggtacccccttctacatatatttcttatttaggtctattttccagtttcgccacagcttctccatagtcttcaacgcatattccttggctttatcgtcgtctgtcccctctggatattcaaacttgctttgcagtgacgtccaacagctgttctttctactctctagaactttcttccaatccttccatgtgatctccacaacattccttaccaccgccccacattggttgctatacttcgaatatgagtcttccggtgacaagggttcccctgtctcactcatccgtgtcagcacacttacttccttcaatagcattttcttccctcgctcgcccctccatttcttgggtttgcttgaagctgttgtgcgcacgacagctgtagcttcagcttcaggttcggttgcggcttgggatttccttttggagcgacgtggagcattcttctatgtttgcaattcacgtggtttcaattaaaatccatagttcgtggttaatatgattggaactaaacatatattatatgctacgtaccaccggttcagggggaacatagtcagagtcaacttcattgtcactaccgccctttctcttctttgcaggagaaggatgggggtcactcggtgagtgatacgatctactacctggttcacttgagctcgacgaagattcctccgcgactacttgcgtgcaaatttcttcctcgatgacggcctgagtttccttgcccttgtcacccgtgggttgctcttgggtgggtttgtccattgatatcctttgaaggtgaatatatgagattggtaacgacaactatattacgatggttgaactaaattatcatcgtacatctcatggttgaaccaaacatctcacaatgtttaattatcaaaaaacatctcaccatttcaaactacctaattaagttccttaattatcaaagaatgacagatttcgaagtgcatggaaaattttggtgtctaggttggttccgtgcatggactaccctgaccaatccaaaaaaattccccatgcacttcgtattctgtgatggcttgataacctaggaactacattaaatctacggccaatctatcaattcatccatttgaactaaattttaaaccctaaacctaattaagttccttaattatcaaagaatatcttcactggtgtcagcttaagagggccgccagagaagatatcctatcttccctggcggccatcttaagttgatcgctagcgaagatgtgtttccgctggcggcccttgaccccccgactccaagattttctatgctggcggtttttccacatagccgccatgaaaaatattttccaaacgccatgaaaaatcgattttctagtagtggtataagcccgattaatagattttatatgtcgcttaaatattagagaactactatatgcaataaaagaactctaaatctctaccatttgactcaattagttgaaggttaaagaaaattaatattaaatgacactgtgccccatatttgtgtttgagaatgtttgtaagaaaaaatttgtagatatatcttttcctatataatattggcttgaaaatctatctagcatgaatacaaatgggtgcctgagggccacaaatattcatgactaactgaatcgaagcaaaccttcaaatagtagtatttcgcattttatttgaattattccgtagaatccgagactatctgtctattatatactaaaagtccatgaaacttcctagaaacgctctcaagccgccatgtggcgttttacaaacgctcctaagggcagtcccaacccataacactaacatagacactacccttccaatgcaaacaccactattccatacttcaatttaatgctacttatctcacatgatgtcttggatgttgtgtagaaccatgtctgatgcaagacatgatttccttctcttttctcatttattcacttgccacatcattttttatcctaggtggcagcttatttaatactatggacaccatcctagtcattgggttgggaatgccctaagtcgcctattagatcgatctcttcccttcccctgccgtacatgcatgccactgtacgtatgtacgtatatgtgatgcgtattccatatgccctccccttttctcctattttctaacaactcaatacaaaatagtttaaattttaaatagctaaataagcatgattctcaatttatatacaacattaaattcatttgtgctatttttatttgtaattaaataaatacatcaagatcggtattgcatatattttgcgaaggtaaaggaaaaactgaaatacgtttggacatagaccctagcgtcgcagtcattaaacaatataaaaaaatgacaacaactatatcatcttaactcattctatatataaatatgcacattaaattaaatatcatgtaggacccaaaccatcaccctgcacatcttaaaaattaagaaatcactactacgaaaatatctttcatggtggccattttaggttttcgctggcggtttttgcaaccgccacaaagcaaacgccaatgaagatcaaaatctaccctagcggttatcggccgtgagcgaaaattgattttcgctggcggttgtgttataccggccgccaattcaaattattcccaaatccactcctcgattcacaaattcacataaatttacatcaacaatttacaataaaaacagtcaaaatttttcattcacaatcaacacaaatccacacaaatcataagatattttccattcacaagccacataaatccacagaaatccgagcaccaccgcccgcggcccggtggcgtccgtcgtgacgaggtcgaggccgatagtcacgctccaccgcccgaggccccagggccgtgctccccgcgccgcagccagggcggatccgtcgttcccctgtccgtcctccccggtggcagcttcctcccctcagacagatctgggagaggggagaggatgggatgggagggcgcggcgccccagtagagctagctgcggctgctctccctcttgtggacactcctgacatggaatccgaggtaggacagcgagtcggtgaaggacagcacgcacaggatggtcgtggtcgccatcgtcgtcacttccttcgtgttcgtcgtcgccgcagcttccttcgtgatcgccgtcatcaccgtcgccagttgacgtcgtcaccatgcacatccatgccacgcccctcccgccgtcgtggtcgccatcgtcagcgccgcgcccctccggccacgcccctcccaggtggaggaggctgggggcgcagccgcgcagggaaggaggagggtctcggtgggggaggaggaggagagggaggtgggtgganannnangnnnntngnnggnnaggagatngagaagagaggggacagtgggtggttgaagggaatatattagtgcgcgtgattttaaatgacgttgatttttttttagcgggctttgttttttcgctggcggaactgtttagtaaccgccagtaaaaatgttggttttcgctggcggacatttaagaagtacgcctaaaaaaatagagtattttttatagcggacgtcttaacgtggttgccaggaaaaataggttttcgctgacggtcctatacccccacccctcttgatgtttttgctggcggttttagcatatatccgccagtgaaaattatagtgcgacgccatgaaaaattgttttcctagtagtgaatatcgttgaaattctataagaaaaaaaaagcaaaacatcctaatatcattttacacttaaatcggcaggcgtattattttcacccattagatatatcattctactcccataagccgctacttgtcacatgttaaaaattaatagaaattacatgtattctaaactaagagtccataaaactttctagaaatgctctcaagccgccatgtggtgctctacaaacgctcctaagtcatcatgtggcgctttaataaattggaaaaaaatcctaaaaattttaagaaaaaagaaaaacatctcaccattggttttagtggacccattatttttaaccattagatcaattttaaaggaatatatactcaatccaacctatgggcctattagatcgatctcacagaatatgtagccttcccttcccctgccgtacatgcatgccaccgtacgtatgtacgtatatatgtgatacatattccatatgccctccccttttctcctattttctgacaactcattacaaaatagtttaaattttaaatagctaaataaccatgattgtcaatttatatacaacattaaattcatttgtgctatttttatttgtaattaaataaatacatcaagatcggtattgcatatattttgcgaaggtaaagaaaaaactgaaatacatttggacatagaccctagcgtcgcagtcattaaacaatataaaaaaattgacaacaactatatcatcttaactcattctatatataaatatgcacattaaattaaatatcatgtaggacgcaaaccatcacccttcacatcttaaaaaattaagaaatatcgttgaaattctataagaaaagaaaaagcaaaacatcctactatcattttacacttaaatcggcaggcgtattatttttagccattagatatatcattctactactcccataagccgctacgtatcacatcttaaaaattaataaaaatcacataaattctaaaagaatgaagcatccgacctcgataaaatcattatttcagccattagatctatatttaaagaaaaactttaaaaaacaaagtgccatcccattccccctccccctcgattaacaaagcgccatctttatattctgaaattataaatatatagtaaatgaataaatatatcgttggagtatataaccatactaacaaaaacagggagtagggaaattgtcattaattaactcaagttgcacgcattagatttttaacttatgtggtatgaaaactattctacatggaccaatgggagtgctagaaaggtccattaggacacttccaaggttacatgtggccggtgatggagacaaccattaataaaaattcatactgaaaagcataattttatagcagagagtacatgtctaatatcatatcacgaaaagacaaccttgcatgagaaataacatacaaaatataacttaaatgattatctcaactctccattgtactatgttaggagtaactttgtctaatgtggtcaatattgtggatggcagtaacatccttaactctcctaagatttatttcgaggcctaacaaattagaaaacaagccatagcacaatggggccatagtaagaatgcacggggtttgtgcgagtcaggaatcccgacaatggaattgcctaagcatcaactctattttatactaacaaagaattacattggactctagcaaatgagataaaagtccgggcatggccggcgttgtattaataaaattgccaaagtatcaactcgatctattttgtattaataaagaattgcatagcaactaactccactgttgaaaaataagtttgtcgtaaattcaagattccacaattttggcgaattttaatttagattttatgtgttttaaggatcgttacaaacaaaatcataaccatatttcagagcaatcccaaatagatttttgagagaagtatcataggtttaaaatatgataaaaaatccaagtaaaaatcagccaaatttatacattcataaatctatctatctattatatactaaaagtccattaaacttcctacaaacgctctcaaaccgtcacatagaactacaaacgcttctaagctgccacatgacactctaataaattagatttatttttcttaaaatatgatggtcccattattttataccataaaaaaataaaaaattgaaaggcccacattcctctccttccgacctgtacgtgtagtacgcacgacatgctaccatacgtacgtacgtagatgtattggcccctccttcctttctgtttctatctctcttatttttcttattttgatgacccttctattcctatctctcctattttgatgatgtggtagattgaaaacatattgatgtgttcgctggaggaagttgggaacctatcactggtggagaaaccatctttcgtcggtcggccgatttccacaatagtcccggatgcaataaaaaccggggctaaagatgatctttagtcccggttcaaaagggtaacgggcatatttgatctttagtcccggtttgtgttaccaaccgggactaaagatcatccttagttccggttcgaatgctgtcaggacctgttaggcccccccgggatctttagccccggttggtgctaccaaccgggactaaagtcccacccctatatatatgtcttcttcctcctccagctgcccgagcaagcttcaaaatttcttcaaaaaagaggggaggtcatgccaaaatttctattgaatttattttggtgattacatacaaatcggaggtgcctaaaaggtttgcaacttcatcctccaatgtttttttttgtcatactacatttgcacctatgttttgcacacttttttttctccaaaatttagttgtaagttgatgagagagaaaatgtgtgtggggaagaaagaatatatagaaatttagttcatttgctaaacaaggttttataaaatagttgagaaggaaaactctagtgaaagttaatattaaataatagaaaacaaactaaaataaaaattaaaagaagtaaaacacattaaaattagtttaaaactttacaaatagtttttaagaattatttggtgtaatattttatgatttttgtatgaataaagatatcttataattattgtatgactgtcattattgtaagaataattatttgtgtgcggtttttttgactcatgtagatggatcggcaatggatgtacgctgaccggcggtccaaagagtttattgacggcgtgcactattttttgagagtggccgaagctaacaggcaaaggggttttatttgttgtccatgcaataagtgtaagaatcagaaggagtattctgcatccaggactattcatttccacttgtttgagtcggggttcatgccaagctataattgttggacatcccacggagagcaaggtgttgaaatggaagaagatgaagtggaagacgacaatattccggactttgctcagtatgttggatttgaaggaaatcaaacgggcgaggaggaaatagctgctgatggtaacgacgttgcggatgatcttggtcagatgttgcaggacgccagggaagactgcgaaagtgaaaaggaggcccataaattggacaagatgttggaggaccagagaacttcgttgtacccaggttgcgagcaggggcacaaaaagttggataccactctggagttgttgcaatggaaggccaaaaatggggttagtgacaaggcatttggcgatttattgaaactcgtcaagaacattcttccggggggaaacaaattgcccgagacaacgtacgaggctaagaagatagtctgcccgttaggactggaggttcataacattcacgcatgtccgaacgattgtatcctatatcgcggtgaggagtatgagaacctagaagcatgccctgtttgcaaagcactacgatacaagattagacgggacgatccaggagaagttgacgggcagctaacaaagaagagaattcctgctaaggtgatgtggtatttccctataataccacggctaaggtgtttgttcaggaacaaggggaatgctagaatgttgcgatggcacgctgaagagcgtcaacaggacgggatgctgagacaccccgccgatggttcgcagtggcgaaacatcgacagaaaatttaaagaatttggaaaggacgcacgaaacatacggtttggtttgagtacggatggcatgaatccttttggagagatgagcagcggccatagcacttggcccattacgatgtgtatctacaacctccccccctggctatgcatgaagaggaagtacataatgatgccgattattattcaaggccccaagcaacctggtaacgacatcgacgtgtacctaagaccactggtagaagatcttaaacagttgtgaaagaaggaaggtgtccccgtgtgggacgaggacaaacaggaggagtttaacctacgagcgctgctgttcgtaaccatcaacgattggcctgcacttagcaacctatccggacagtccaacaaggggtacaaggcttgcactcactgtatggatgaaacagaaagtacgtatcttaagcactgtaggaaggttgtatacatgggtcatcgtcgattccttgcagcaaaccacccggtacggaagaaaggcaagcacttcgaacataaggccgaccaccgtacgaagcctaaacatcgcagcgggaaaacagtgtttgctatggttaaagatcttaaagtagtgttcggaaaggggcctggaagccagcatatagagagcgaagatgatcacgcggcgatgtggaaaaagaactctatattttgggagttaccatattgggaattcttggacgtacgccacgcaatcgacgtgatgcacctcactaagaacctttgcgtaaaccttcttggcttcctaggtgtatacggaagcacgtaatgatctgaagcatatggaacaacgcggcgaccttcacccggaaccaaaggagaaaggaagccattacttgagtccagccagctacactcttagcaaggcagagaaggaaagtatgtttgaatgcttggagagcataaaggtaccgtctggatactccacgaatatcaagcgaataataagcacgaaggagaagaagttcacaaacctaaagtctcatgactgtcacgtgttgatgacacaactgctaccagttgtaataaggggtatccttccagacaatgtccgggcaacaataacaaagctatgtgcattcatgaacgcaatttcgcagaaggtcatcgatccggatagattagaagcccttcagaatgaagtggtgcaatgtctcgtcagttttgagttgatatttccaccttcatttttcaatataatgacgcatctgctttgtcaccttgtgaaagagatccgtattctcgggcctatgtacctacacaacatgtttcctttcgagaggtacatgggcgttctgaagaagtatgttcgtaaccgtgctcgtccagaggcaagcatcgccaagggttatggaacagaggaggtcatcgaattttgcgtagaatttatcgaagaccttcgcccaatcggggtacctgaatcacgccatgaagggagactacggggaaagggaactctcggaaggaaagcaataatgacggtagacaacaatttattccgtaaagcccatttcactgttctgcaacactcttcattggtagctccttacatcgaggagcacttggctctagttcgcgccaggaacatcggtaagtccgatgcatggattacacggcatcacattgatactttccccgcgtggctacgacaacatctcatgggtaacgagtcgatcaaccaataacttgccttcctggcgaggggaccgtctgggtcgatcgcgacattccagggatatgagatcaatgggtacacattctacacgagagcccaagacatgaagagcacgaaccaaaacagcgctgttcgtgtcgatgccatgggacacgatggaacaactgccacgtattacggtgccatcgaggacatatgggaacttgactatggtcctctcaaggttcctctgttccggtgccaatgggttaggttgactggtggaggcgtaatgattgatgacagtgggatgacaactgttgaccttaacaaggttggatactcggacgaaccttttgtccttgccaatgatgtaacgcaagtctttttcgtgaaggacatgtctagcaaaggaaagaagggcagagggcctgatgagcctaagcgtcaagtggttctcccaggcaaaagaaaaatcgtcggagttgaggacaagactgacgaggattacgatcagttggatgggcaaccccctttcacggtgacgattgaccctagcatcctcctatcaaatgaagacaccccttactcacgcagcgatcacaaggagggaacaatagtgaggagaaagtacgtgcggtcaaccgtcaccgccgatgtaatgccgtaattattgtgtacacgatgtaaactattttcgatgtattgattatccatataaatcaattgatgtatggcatatgttaattacgcacgattattagaggtttcaacaagtttaaatcatgtatatgttagttatatgtgatacttacaatttttaaaagttttaaatcacacaggtggcaatttcatatgtatgttaattagagtttttaacatttaatttactagcattcatatgctaattataattgactagaggatttttaaaagttttaaatcacgcaagtggcaatttcatatgttaattagagtttttaacatttaatttactatcattcatatgctaattataattgactggagaatttttaaaagtattaaatttaatatatttttaaaactatcattcatatattagagtttttcacaatttaatttactatctttcatatgctacttatatatgactattcgaatttttaaaaggtttaaatcatgcatgtggcatttacatatgttaattagagtttttagcatttaatttaatataattcctacgctaagtacatatgatgattacaatttttattaattttaaatcatgcagtatgtacattaatatcttaattagagtttttaccaatataataatatcattcatatatatgctaagaatatatatatattggaatttttattaattataagtcatatatttgcttattacgatttatccacttaatttattacagacaaaaataatttttcgaagtaattgtcatcaatctttgtactttaaataatgttaatgcattaacttctattttataaacacatatgtaagcgaaaatcatatgcaatgctataatcttcagtcccggttcttaaccctaaccgggtttaaaaagaatttcgaaatagcgggaaaagatatttactcccggttgttgaaaacaaccgggactaaaaatcttttctttact

SEQ ID NO: 7861 - DNA, 12535 bp, Oryza sativa
tcgagctcggtaccctatatatatatatatacatgtatatatatatatatatatatatatatatatatatatatatatatatatgttacttcgcatttatcctaatacattttttttatcttgcagaaaagacgtgttgtcggagtcgtccgtcaagcctgagtggaagagctagccctaaaaggaattggagcaggcaagtgacgtaataatataaatgattgttatatttgtaatgcaattaattaagattattagacctgtaattagacttatcatataagattgtgtagtgttctaatattatttgagttttaatataagattattttattgcaaattagacttagtatgacattattgactacggaattggtgcgactcctaggaattgactattgtagtcttaattagacttagcatatacgcacgaaacacttagcatacattactattttagtcttagcatgtaatattatttgagttttaatataatattactttatttgtaattagacttggtatgtaattattgactacggaattggtgcgacaagtagcaattgactattgtagtcttaattagacttagcatatacgcacgaaacacttagcatatacatgactattttagtattagcatgtaatattatttgagttttaatataagattattttatttgtaattagacttagtatataattatttactagctagggttgtataatatacgtcacctagacttagcttatatcacgatttgtaattagacttagcacgtaaggttgtgtagggttctaatgtacgacatttacacttagcatacatgacttagattgttaaaacataaatgtctcgtgacttagcagatgtttcttgtatcaacagatggctgaccgcgatgaggaacagatattgtacgatacaatcgcggagggatgcagccagtactggaatgaagaagaggggaacgaggatccaaaccagtacttgaacgaggaagggaacgtggagagggatgcggaggggaaccagcaggggcacgtggaaagggatgtggaggggaaccaggaggaggaggctagtggtagtcaaccctccgttggacagaagagggcacgcgggcaacgaggtgcagcgaagaagcttgagggtcggcacatcataacggaagtggaagaagatggacgtcctagtgccccggccgaagccgccaagaactatgtacgtcacagcggttgggttgtgcgggataacgtgcctgtcagtacggtgtactggcgaagaacaagggcacgcggagatcatgagagctttgtcccagattcggagaaagagatgctgtggaccacaatgctcgagacattcacccttcctgcgggtacagaggacaaagtgaaaaggtggactctaaagaaaatggcagaacaatttcagagcttcaagggagatctgtaccagaagtatatactgaaggggcagacaccgaacttcgacacattcccaaagctaagggatcactgggacgagttcgttgcatataagacaggtgaacaagggaaggcgatgatggaaagaaacaaagaaaatgccgccaagaagaagtaccatcaccacttggggtcaggaggctatagtgtcgcgatgccgaagtgggagcagatggaggctagcttgattgagatgggtatcgaaccggcaacagccaattggccggaacgatcgaagttctggtactatgctcacggtggaacgctcaacccagctgatggctcactggtcttcggctatcagatacaagaggctgcgcgacgactaacagatgcagtggaagcctcctctcagggcacgttccgaccagacagagatagggacgagctgacactcgccctgcagactccagagcatccaggacgaactcgagggaaaggggtgattccttggaagattggtttcaaggaggacatccacacgtacaggagtcggatgaggagcaagagagataccgaggcgaagattgcagacctagagttccgggtatcgagctacgaactcaacatgcaagaggagatggcaagggaggtcgatgaacgcatggccgcacatcggtcccatgatccccagccgaccattcctcctgcaatggtgagcccatcaggaaaccgtagcagctgcgcctcaacggggcaggtaggatcacagagcatggacgccatgcaaacacaagacgaatcgacctgtcccgtgatgacatcactcagcggacaccatgtgagctgcatattcctttgaagaacttatcaataaaggtaagatttagccattccgctagttgctgcttatatatgttgattactaataaataatctctcacaacatgaaggtggcgtcgggcatggccatcccaacggacccttcaggtacttaccactgcaggccgattccagcaggatactccaaggtcgaagttgagttggtcgaaggcgcgtacgaggacctcgagctggattaccctggaggagacggtgagacgcatctacgagacacatgccatgccattattctatggcgcaggcggtacatcatcctccctgggcgacaagcggcgtctcgtgcaccatctcctccggctccaccatctcctcctcaggatcctgcaccgtctcctcctcatgctccgccagcaccgtctccaccttaggctccagcatcgactcctcaggatcctgcaccgactcctcctcgtgctcctacacctactcccccgcaagctcctcttccggcaccttcaaagtcaagggcccccccagctccaccgcttgcccacacaagggcaacaaagaaggcgaaagttgacgccgccaagatcaaggacccggggtacgattgcacgcaagaggagcttgacgcttacgttgcatcagaagtcaagagacaattcaagcctcgaagtccagaaaagaagattcctatagaccccagtgtcaggaacttcttcaggggtatgtctgcatctgtcaaggaggccatcaagctatcggactatgagcgaacgctgaagaaagcatcttctggaaagtccaaaccagtccctcagcttggagagcaaccaaaccaggagatcgagccgttggtgaccggtaaagaaatgacgatagaacaatttattactgacaccggtctaactacggatcaattgctaggagtcgcaccaatcgaaaaggcggaagtgaaatacatgtacgaactcggtaaaccgcttgtcaagcctgagctgctgcagtccctacccacacaaatgtacaagttccatcagctgtacatggagatgagcgccaccggtagagagatgatcggagcgaggatcagagacacggacttcttgcaaggagatgacattctctggatcaatttcaggggaatctacgaactataccagctggacgccctcgacgtctctattatgagttgctggattttgtaagtatatcgttcagttagatttcttactatacgtctcctttaattaattaggtccttgtatataagtagaccatagaaaataatatactcccttttatcgttgtagaatggagattcaaagggcccgacggcggagggttttcgatactggattcatcgaccctcggaaagtaaacgtcgcaatgctcgaccaatatccacaagaaacagaggacaatctcgtccatctcctgaaggcgcagcattacaagacgttcatactgttgccatacaacacagagttagtttaattttactgtcttcctacataccaaatttcattcccgtacgaacttgctaagtgtttcatatgtaatgcatcccacgcacattgcagattccactgggtgcttttactcatcgacctggaggcctgcaccgtcaacgtatatgactcaatggataaaaaagagtctacgtttgacaaggttttcgaacttatagacaggtaccgtcataagttcctttgttaattaagaaaatcttgttatgttaattgctactacgaatcatagctttaaactccatgtaggacttggtatcggttccgtcatttggtccgcggcaaatagagagaaagacttaggcggaagttcaaatttccagtgagtacacatgctctacatttatatttctccgattcaaatacatacaagtgtatattaattagatctctcgttgtttgtcatttatttgtagtgcgcaaagcaaaagcagggaactaacttgtgcggctattacgtgtgcgagtattgccactgccttgcagaccaaatcatcaccacaagagagctcgatgtacgtacaaataaattcaaaatttcattacgtagcgatttcttgtttaattactaatcaatttcatacattcatatagtttattcgcatgagggataacctgaccacacacaaggaatttatcgcggcggttcaagaacaactcatgggattcatcaacgaagaaatccttgatcccaagggtgaattctactacgacggaaacacaattcaccggtccttagcttctgagctagcagcgagtactactacgtcgaaatcgtagctagctaggacatataatggattgtaattaatacatgactacatatgtttctatatgcatgtgtacacattttctataatgtaaatatattttgttcatatatatatctatatacatatgcatttgcataacatatatatgtataaatacatatatatatgtatgcatatatatgtattgaaacatatatatgcatggtttatatatatatatatatatatatatatatatatatatatatataaaccatgcagcaagaggggcatgcaaaaaaaaaaggtcagctctatctttagtcccggttatttcacccgggactaaagatagcgatctttagtcccggattggtactcccggtttggaaaccgggactaaaggggggttacgaaccgggactacaaagggtttctccaccagtgtatctcagctacggaaaacggagcggtccattagcgcgtgactaattaagtatcagatttttttttcaaaaatggactaatttgatttttttaaaaaacttcccatatataattttttttttacaaaaaacaccccgtttagcagtttgaaaagcgtgctcgcagaaaccgagggagaagggttgccaaaatggggtgccaaacacacccataagactatacaaactaagggcccctttgaatcgtaatcgtaggaatgaaaaaacggaggaataggaaaacataagattctgacaggaatgtaagtataaaatagagaattgcaaaacacaggaaaaatacaggaatgatcgtttgattggaccccaggaaaaacacaggaattagatgagacactactagaaaaataatttgttgccatgaaaaaaatcgtagcatcaatgctaaaattgtggcaatagatacatgttgccacaatcttaaaatcgttgttagccgtggtaataaatagcgtggtaacaggttattgcaacgatttttatttagttgtaataaaatttgatattgccataaaatggatgtggcaaaaaatatatattgcaacacttcacatggttgtaataaataactattgccaccactctatgtgtggcattagttatacgtaccaaattaaatgtctcaatattaatttatcatcctaactatcttcttttgatatcttgtcatgttcaggattcgaacccaagatctctcccttacgcgcgctctccatgaccaactcacctacgcatcagttttgtttaaaaatgcatacaattccatttgagactgcctaacttagatttgaatcatgaatttgagtatttaaaagatttcaaataaaaaatttaagttgtagatctcatcgagagctataaatttcatataaaatttatcctaatccgtgtccatatgaaaagaataagtcaaattatgagatgataaattttttattgcaacgaactaaatgtgtggcgatagaacatgtttttttgcaatagtaatgttttttttggcgatagctcatttcctattgcaacaaaaatactgaataaaacaacgattgtaaatcgttgcaacaaaatatagttatttgccacagaaaaaatatcattgtgatagtataatatattgccatgaattatttttcgttgtaataaattggtggcgatagctcaaccctcttgtagtgagagagatagactcaaagaattcttaccaagaggttggacctcttgctaagctttctccaaaacctatatgcaataagccattccatatgaattttggaggatttggaaaacttcaatcctttgaattaaagggctacataggaaaaattcctataggattcaatcctatgaaattctttcataatttctttgattcaaatgggctctaaaatcatataactatttttttatgcacttctcgtacgtttgttgcataattcaagacccaaatcaactatatttaacaagtaactttggactagctattggacactcgagacacaatttttagggaaatcatagagtttaaaacacttgattgatagcacctagcttatattagaacatcatgaaacacagagaattaattaataagacttaaatattaagtagtagaaaaaatatatcattttggttcacgaagattatatttatgtttaaatatatataactctaaacggtaaatccgttaattggatctatctcaatctatccgtagcctcatctcccatataatttatctgttaataaacaatgatagtctatatcaatcttactgcttaaagataaaagattattggatttattttttttagaaaaatgacacataaggtgtaacactatcactatgtatcatatagtaaaatttgaactgaaaataagatttgtataaaataacatagaaaatagaaaaatctccatagagtgtaaattgaaccaatctatctatcactacaaacgttctcaagccaccacgtggcattctacaaacactctaaactcgccatgtgtcatgtcctaaaaatcagaaataatcttataaattctgaacaaaatgaaacctatcagcatcagttttaagttccattatttatataagttagaaaaataaatcgcatgcacctcctcgcctactcatatgcacataccactacctgtcccctccctatttttagctattaaacaataaatatataatcaataatttatatgttagaaaaccataatatttaagatgcacgtttgatttttttctctagttataattaaaccaagaatttaagatccgtatgcttatattttcttatatacaaagtatgccattcgcccatattcgacctacatgctttgtatattatacaaataaaattgaaataccttaaacaaattggctgcatatattacgtcattatacacgagtctgcaaacaagctaaattaaataaatagtataactacaaaactatttttgtagggtgaacacccctgcccttttacatgttactggaattgccgtaaaagaattatgaaataatccaacaacacaggttgcatcatcatatgttgtttttgcaaacttgcatagctaaattaggtagacattatctaagtaaatagaactaactaaaatatgaatagcaaatccaatgcccatagttagagaaaacaaagtccaattatttcgtgaattttcttaaatgtgctgaaataatgcaagccagctaaatgatctttcgtgtatttgctctaaactatgttaccatcaaattaacattgtgtgtggttgtggctttctacaccttcctggtaattctgtttattttctttgtgcatagaccattcaaaaggtaaatcaactatatgagcattaataatctatgaatatacacttgaagcattaactttggagtccatttagattttaatgtgagaaaatcgtacggtaggggaaaaaggaacaatgagtttagctaggtcttactttttcactaaccccaaaaactaatgaaaataaaaaccaccttgattttaatatacaattaatttgttgaacatgttctaaacaaactaagtctactattttttatatagtgataaagattatagataattggttatactgataaattaaatattatatagtatatgacttagaggaattatcaaagtgatgttgacgaagaatatttatcgaggaaacgtacttccgaaagatggtagaggctatctggttaatatgatccgttctcaacgcagcccacaatacatgccagcgcgcgtgcttgggctaccttcctagttttttaccaaaacgaagaaagctattttccaacaaaaaaaagaatacagaagtacgcaaaaagtcaacgtagcaaagggatacctatgaaaatagttttttaagtagttcaattgcacattacacaccccagcgtatagagaggacatatagatcgatatgtaagttccctgcttcaaaattattatgaaacaactcattctttggtgaactagtagatttttactgtcagtcgaccatgataaaacaactccatcgatacgccaaagatcgtaataatttcaaacaaaattgaaaatatgttccagaaattatatgtacagtaacatcaccaaagggaatatataacctgtattttaatttcttgccatgattgcactgttgttgacagtacgttccatcatcccacatgcatgtagccttgttcctcgtctactcagttgtttatttttattctgaattaaaataaattgaaaagttgttagtaccatcgatgaagccccggccaggagctgtcgaacctgaaaatcatgatcaatatggtggggctgaccgtcttggcggacgattccgtcgaatggtcgctcctcacgacgctgtcgcggttgcgtatcgtgctgcccaatccgccattaattccaatcagcatcagctaggctgctacgtacatacgtggttagcacatcccgatccgttgatataacttgagataggataggatacgtacagatataggtggactctctatacacgttaggttcacttaaaaatgccaatgataacacatagattacaatgtacggtcaagattttataatccatagatttagatttttctagttaacatgcgagctaaaaaaatgtccagttagtatgggtatacatagatggttggaacaccaggatttgatttgtgttcatagataaaggtatatgtatataggtagtattgattggatctgttgattcaatcaattttaattttagggttaaatattcttaatgacatacatttttatccagactacccattgttgacattctaatttttcagcaagtttataatcttctaaaagtttcaaatttcactaatggtaatgataaaatgtactacaccaatgttaatgcaaaatgaattgtccatggcagtttcaacagtttcttaggatgttagcttgaggagttgattttgtttactgaaatagagtagtttaaaccttaaatcagtgattttagtccagccattcactttatttgaagatatagtcattgatacagctggagtaaacattaaattactacctcggctgccttaatatgctgtggctgtgaagcagaacatatgcatgttctttggagtagtatatgacaagaattggggaaagaaacttattagtttttctttactactactctcacataggcataacaaaatagtgatattagctgttgttttaacgcaaacttccaaagcaggccgctttactaaatgttattactttgtgataccattactttcaagtttcaactatatatttatatatttattatatactccctccatctcaaaatataaaaagttttagggttagacacggttattaataaagtacgtagaagtgagtggtggagggttgtgattggatgagtagtggaggtatgtgggaaaagtgaatggtggagggttatgattggttaggaagagaatgttggtagagaagctgttatattttgggataaatcctaagagctaaaagttattatattttgagacgggtgagtatttattattcgaatgtgaaatgaaccgtacagaataacagtggggctcttaccgctgtggaaaatgcccacggcatgattgatatgggagggtatagctgatcgcatccattcagataacatatttgtttgcggattcagtcaaggtatggaaaactaagttttccagagctgtgggaagttgtaccatcaattaagtattgaacatattgtcttgcatgtgctctcacgttagtaattgtttactctatgccaagatgctacgtggtgagtcacataggtgtttggataggacttaaaacttttaaaactttttagtccctatcacaacggatgtttggacactaattagacgtattaaacgtagactaatgacaaaacctattccataaccctgaactaattcgcgagacgaatctattgagcctgattaatccatgattagcctatgtgatgctatagtaaacattctctaattatggattaattaggcttaaaaaaattttctcgcgaattagttctcatttatgtaattagttttcgatgtagtctatgtttaatactttaaatcattatccaaacatccgatgtgacatggacaaaagttttatccctagatccaaacaccaccaagactttacaataatcaaggaaggtatgcaactctgtcgatcccttttattcatctagtttagtttattgttcatatggtgtaaccgtgcaaccttaagagttggaactacgttactattcgaaaaacaacgaaccaccaaataaaattaacccaggataaatttattaggattgaaatgtattattatcttatatgaactaatttaccaagaatatttttatatggaatctgcacatcttatgtagtcagcttaatgtctttatctgaaaaaaaaagctgaaatgaattctgaagattttcaatgaatatattttaggcaaaatcgtatgaaattaagcaaagtttgaaactggcagcacatatcgagggtatcaaagttagcgagatgatgagggcatgtttttcaatcctgtatcaccttggtgcttgcaaatattcaactgtatttaccttttcttttctttcagtgaacttgataacatcaagagcagtaaactcaattactgatttatttatttattttgcatgtataacatctaaaaaaaagattggaaactactctgaatgaagcaaggtatgaaaagcacatgcagtcagccttatttggttaatgaaaaataaaataaaattaagggaaagctatcattacagacggtttggcttacatgaaagtacatgaatttgaacctaaatcgtattctatcatggaatttgacttgctgtttgtgctcatataaagctaaattagttggaagtgtaggatcgaatcataataactaagccaaccagagagggggtgaatggttggtagagaactcttttttctgcccctgcaaagctaattatttgtaattattttggttcataacttgtatatgtatcaatggtttaggcaatgaacacaacaaggcagagcggattacagagggaacggttggcttgagagttaatcatgtgaagtatgacggtggtaagaatgggcatcaaagaatgacaagatatagtgtgactgtttaggaaatatagtagtgatagtctttacgaccccttctttttagcaagaaacataattacaatgaaggatcacatcaaaacaagtcacctcctatattaattcttttctaccttcaacaaatgattttactcattcatcatgtgacacatccaacgatcgaaaattatctgatgacgtcgatcaaacggctccccacctccctcccgattcgatccagatcacatcgcttcgcctcaccccagcaaaatcaccgcgccctccctcctcctctttctatctttcacgcgctcctgcccatccgcctcgccttccactgccctccatctcaccgcactcctcagctcgcttcttcgtcaatccgccttgcatttcgccaccctctatctcgccgccgccaccccccatccacccgccggcccctcctcctatcgcatcggtctgcgcctccgggacagttaccggccagttcgctattgccggagtcaccatcccgcacccgccgcatcctccctcccgcacctccctctctcccacacccgtcgccaccgatccagctctctactggtagtagaaaataatctagaccgttgatctcaattcattaaaaggttgagatttatttctattaccacctcacttaatggtagtagaattgtggaaaaaatatctgtgcagggtataatcattctttacactcgctaactgctctctctctctctcgttcattccttagtccccgaaatccc

SEQ ID NO: 7862 - DNA, 11374 bp, Oryza sativa
tgtcgcccaccgccgtcatgggcaccattgcccgccgcgacatccgctgtcctccacgcggtagccaaccacgaccgccgctgaacctcgctcctcctcgctccccgccgcacctaccaccgccgtcccctccccacttgccgcctgcttcctgccaaagtgagagaagaggaagaggggaaggaagaggagaaagaagaagggagaggctgacctatgggtttcggtgtcataaagtcaaagtagagatggtaaaaggagaggctcttggagtgaacaattagtttgactagccaaatcagatggagagttggttatatgggtgtttggaaagttcaatttagagaggctgttagagatgctctaattcatccacttttcctgcttgacagccaccccttttagtattgctgaaatattgtttcgacacattactgaatgtaccgtcttgtcactagctatgcatcgggccaggcatgaccgcataaattcagaggtcgagggatggttttgtggtgggtcggagaagaaaattaacaggctacctgatctgatcctgatcctcgtctctagtgctccaaagtaatcgccactgtacgttgatacgatggagcacacaggccgccggccacgaggagaacgatccatatacccaacctctgaggagtcggtgttcctttctccgacccacagcaacgttatgtgtattgcactgcacgatccacaaagagagtagattttgattcctcaatgggatgtcctctcgttgtttatatgtcgctcaaatggttataaaaagatttgaaaaaaattggaaatttgtattaacatgtgatatatcactctacaaacatacaatttcaaatccaacttctacatctctcaacgaaaaaacaaatttgactgtgaatatatgttaattagttgtagtttaatttgttttgctttttttcgtagcgagatgtagtagttaattttgaacttgttgttataaaaccagccccgaaatcggtagctaaacgcggaagaaacgccatatgagatctaaacatgacgacaacaccgagacacgatatttggtagttcagccgtagcctacatctccggggcactaattactagcgctctttcccgattcagcatattacaacatatcagagttacaacgactcacagccggtcgctgtcggcatccgctccctctcgctatgctaagtctccatacgattacagtaggcatgcccctctatttaagatagattctaagatagagttcgattcttagtctaatcctaatacctattacaactctaagtcctaaactataacgaactacgtaaatatattcgacacaagctcataaccatttgagtgacatataaacaacgaggggacatcccctcgaggtatcaaaatagtttacagatccacgaatgtatatgcagttgtaaaatataaccagctagctagcgtagtgtgcatgactaagctacgttcttcactcaactttcccaacctctactctcgcgtgtattgtgaacaaaaaaaatctttctttcaaaattcatactaatccactttttttaaaaaaataactaatacttaattaatcatgtgctaatgaatcgcttcgtcttgcatgcgcaaggggttagttcccaccaccaacttcatagcttttacaacattaccttgttcaatagtgctccctccgtcccattttaagtgtatctgttctgtcttacttgaaaattttatgaaaaaaataaaaataataagtcatgcataaagtgatattcatattttatcatttaataacaataaaaatactaattataagaaaaattaaacaagacggatgatcaaacgttggacatagaaacccataactgcatttaaaatgggacgggggaagaataagatgtcgagaaaaaaactaaatgatggagcatgcagacaagtggatgaccgataaataacataagagcgagctgaggaggtgaaaaataacataagaaaggaggacagcggccggaccataaaagagtaggtggtggtaattgacgggatatccagaaacttaaaaacagaattcccaataacaattaggttcaatttttgaaatttcaaagacgataaagaggaggggcggtgggcaaaggcgtagtgtcaactgccatagtgtcctggcagttgataggattttgaaaaagtaagaaaaaaaaagaacccaacgatgattaggtctaatttttaaaatctaataaaaagggaaggggatagcgggcgagtcttaaagcagtaagttgacaacgttttataagactttaaaaattcataaaaacgaagccgagcgagtaagtggaggagcgttaaatgagtgagtcagtgagaggtatgtttggatggtagaatttgcatggatagaagatgacggtccattttcttacagacgagaatttcctcggctttgtcggaacactgccaccgctagtggtggcagcatcagacacctccttgacgaccttaactttcagagatgacgccacctgatggtccgcgagcggtccgatgatatcagtcaaaggaagggcttacgctcaatcaagtcataaagtgatttcgaaaggagaatgcgggatgttcatcaaatatacttacattgatggcttcatcacgttccgccgcccccttttcacaaaggggcatagggatgtcactcgccgtggtcgggccactgatcatcacttggccgacgcggcgctccacggtttcgccgctcaaacctgttaatcgagaaccaaccttcgataagtcaagaggaatgcgagcacaagtatgtcaagataaatgcgagaaagataccccgaggagaaacccgggtcgcgtcctctggcctggaatagttataagctggatgggcccgagcctgaagcggctggatccgcctaccaacgaagtctgcaacgacttcatatcccgacaaaccccgtactcggagatcgtcgatgatgtcgataaacgattgaagagagggggtcaaggggggctttgcggtccaagacggaatcttgtccggttgatcttcaggaaccacgaagacagggttcgagttcttgatctcaagataaaaccacctattcctccacttgctgcgagaagaagggcactggaagggaacgtaacgcaacttcaggccatcccgaagtcggaacccgacgcaaccagataccctgttggattccatccaacgcagttcatagtaaaagcgaaaaagatcaaggaaaggctctaccccgatgtaggcctcgcaaagatgcacaaagatgctaaggaaggcgatggaattggggttcaaatggagaagagaaagaccatagaaattcaaaaccaggagaagaaattcagaaggtggagggagaaaaccgcagagaacataatcttcgatcgcaaccatgcgacccaagatgggctgaggattagtacctcctgcttccctctccatggttccacggccaggaagagcgccatcctcctggagtttcttcaacgttgcactggtggaagctgatttgccgaggtccattgctgatcgaaggtcgccggaaaacgagcctaggttgatgaactagggtttcttgcggcggcagagaaggcaaagagtgcatggaggtggtgtgtgtttaacaggtttggctgacttcaaaatagactcccaaaattcctttaaataggcgcactaccgacggtgcgaattccagggaacagagagatgcccgccggaaatttctggtcccgttacgcgcgacggttttttggacttcagtttaaaattcgctcgtgaccgttgggcttcaaatggcgtgctcgactatggtctatctccgcggtcctcgcaccgggaaggacaacagtctcgacacccgaagtcgcaaatggttacacgagttcattttaagcagaagtcgggggctactatcagggttacgggttaggcataccctttacccttcgatatacgttacatatcgatatggcatacccacgcgcatgtagatatttcctgtatattctaaggaaacctttcacagaatctacagatgggaagaatcctactcgggcagaaccaggtcgttggcgtatcgtatagggtctgatacctccgagttctatgaggaaatctccacatctgcgatataaaaggggccccccggggagggtttagacatcgaatctcagagccaacacaacctccacagcctacgaagccggagcttacgaggagccaagtcatcgagagctagtcgaatcaactcgactacaatctcgccggatccgacaagttcccttgttctctttgtaacctgtgttttctaccatataattccacatcaactggactagggctattacctatcaaggggtctgaaccagtataattcttgtcttttgtttgcttgatgtcgtactacgtagatccttgtatcaacgtaccccaataccctctatatccggtctacgggtatcacccgtcgacaaatctatgatccgatcacaccgttgtattcgttgtaattaaatctttacaacaagatatcgcatgattatattttgataaaagaaaaacatatgtttcaatctgttaatacttattgtttcacatgtgacagcgacatgttacaatgtgtatcttcaccatgtttcataaaatatttaaatgtttcaattgctgttttttttgtttcaccatatataacttaatatttcacttgttggtcaacgctctcccccgcactgtcgtgcgcccgcgttgctcccgtgccgcgttgcttgcctgtcctgcatgtgttgcttgcgttgctgcttgcatactccctctccctctccctctccctctccctcctattacatgtgcctaattttttcctcaaattttaaatatttttctccaaaattatatatctgatctaagtttcaattataccattagatttttgcacaaatacttaattatgttgaaatatttttaaatagacgctacaaatcatacgttcaatatttttttcaaatatcaaatgctgtttctcgtctgtatgcaggaacgcgttggaggagtgaggttgtcgcgtgcatgcatgcaggagtatagctggttgccaaggtggcctgaggaaccattactctctctctcttaatcaaactttaaacaaaattctattctaaaatatatatccaatctataatttataacaagatctcacatgaatatattttgataaaaatatatatgcgttctagaaaaaaacaaacttatgttgaactatttaaaaataattctttcatcacttgtggagatgtttcaacgcacttcacaaattgttccaaagaggtacaacaaataaaaagtattgactgcaacaataatcattattacatgaaacattaagtcccgactagtgaaacattttttatatttagattgaaacatcgaattataattattgttgaaacataaaaaatgtatttgctgaaacattgctaatgcattaatgaaacatcaataaatgcttgttgaaacatttcagtaacaatgtgtgtaacatttagaaagtaaaataaaaaatcatcggaatgtagtcatgtgatatcttgttataaagatttaattgtaacgaatccaatgatataattagtttgaaattcagataaatagtttaagagaaaaaatcatttaaattttgaaacatgtttgcatgcatgctccgttggctcgtcatacacctaactaactgtctcaccatgcacctacacggttgttcttttagattgagacgctcgattttttatttctggccggacggccgatggtaagcatttccgcaagaacacgagccattggaatctcatttctctctgccatgccaattcatgtgtgtgtaaaattgattgataggagtttgacagcaagaacgcaagaaccattttttttctaatgaattcgtgaaatttgcttatatttttttaacacgagaggaaaattactcgtttgcacgtattgagtttgggagataaatagagatatatgtggtggtgcgggccggtattcttaccatctccaagtttgaggtgatcataagagcttatccaccctactactcctaactaaacataaatctagataagcaaattccaccaaacaaaaaactagaccaccatatctatacctaatagaaaaataggtaaatcttccataaaatttttcgtccattggtatctggcttcgattactatttcctcgatgatccgtgcaatacaaaatccggacgcatgacgctaacgcctaacaacgagattttttgaggtccctcatctacaaaactagaaatcttagcccctaaactcattcaaaccgttcaccggaggtcccttggcagtatatgtaggtggtttcgctgatgtggcatcctagtcagcaaaaaaaaattaaaaaaggcccacatgtcagctgcagtttttttccttctcttttctctcctcctcttctctttcctctcctctctctttgctggcggcgggtggcgatgggcgagcccgcggccggagtaggcggaggggcggcgtcagcgcgcggctagagcaagcggagcggcagtgtctccgagcgagcacggctgcggcggcggccgcgttcggctgcccctagcgagtggcggccacgccggaggccgtggacgtgccgcggctggtgctccacttcgatagcgctgggtcatggagtagcagagctcgagcacgggggcaatgccgcagagctcggggattacgtcgtagctgaacccgaacccgagatccacgcacccttcagctcctccaggtcgtcgtcgactcgtcggtcaggctccgtgcgtgccgccgccgctgccatcgctcccgctccttgccgtacacgcgccgccgccaaagacgacgacgccgcagggctcctccttggcgaccaccaccagcttcgtccaccgtggccacgccgcctccgagcgcggcggagggcaagcggcggctccgggcgtgggcggcacgcggccggagcaggcagagcggcggcatctccgagcgcgggcagagcagagcggcgggggacgcggaaggcatggcgggcgagcggcggcatggcgtcgcctatttccccctctcccgccggcctcatctcccccactccgcccggcctcctctccccctctcccccaccaccaccatcaccatcacttccagggagccgaggcctggagcgaggcgcgccgctctcgccgccaacgacgacacggctggcgaagtaggccggcggagctcgcccaccaccgccacgctcctccttcggccacctctatgctcgcccgccgtccgctctgcccgcagcccgccgcgcttgccttccgctcgcccgccgccgtccaacgcctctccgcctgccgccgcgccgcccgccaccgttctgcccacaggccacgctcggctgccgcgcggacccgccaccgcgcttggccgccgcccattcctcctccgcttccttccttcgtgctcacccgccggccgcgctcgcctgccgcctcccaccgccacacggacccgccgcccgtgcaacgccactctgcctgccgctgcgccacctgcctccgttctgcccacaagccgcgctcggctgccgcgcgaacccgccgccgcgctcggccgccgcccattcctcctccccgtgccattcctcctcctactcctccgcttccttcctccgtgctcgcctgccaccgctcggctgccacgcgaacctgccacccacgcatcgccgctccaccggcctcactcactctgaagaagaagagaaagagaagagagaaaagagagaggagaagaaaagaaaagaaaaggaagatgtgcaactgacatgtgggccccatgtactttttaaatgttttttctgctgactaggacgccacgtcagcgaaaccatccacatatactgctaagggacctccggtgaacggtttgaatgagtttagaggcgaacatttctggttttgtggttgagggacctcaaaaaatctcgttattaagttgagggacctccggtgaacttattccccccgcaaataaaagagaaaagagagagagaaaaaaggaataagttcatctgaggtctcttaacttgtcaacgaatccgattttcgtccctcaaccaaaaaaaccagacataacgggtccctcaactatcaaaaccgatgcagataaggtctctcagcggttttgagggtggtttttgctgacgtggcacctacgtggctaatttgacacggtcttcatctgacgtggcgcttacgtggcaatccattcagaaaaataataaaacccgtgggacccacatatcagtttcacgcacaaaataataataaaaaaggtgggacccacgtgggccccacttgtcatcctcaccctccctccctccctctgtctatcctctctctatccctttcctctctccggccgatggagcggggcgagtggcagccggcagagcaggcgacgggtggggcggagcggctagccggcggagcaccacgttgtccatggccctcagctccggtggcacgttgggctcgtcctcgaacacttccaaccccgcgccggcgacccttccctccgccagcgcacgcaccagctccgcctcgtcgatgttggcgccgcgcaccacgttcacgaccacgcccacagcgtgtccagcacgccccagtccatgatgtgatgtgtctccgccgtcagcgcgcacgccacgacgagcacgttggagctcgcggcgaggtcggtggtggtcgaaaaagaaatcaacaaaagaaagacatccccagaaaagaaaaggcatcatcatttgatgaacaacataggggaaaaaggtagattaataaacgcatgaatgaactaaaatcttgaaaccacgcggagcaaaaatgaaaaccgaatgagttcctaaatccccgaccagcccttatctttgaagaaacagaaggcagattggggaagaatgttaccaccaaaagaaaaaaagatacaatctctgaaattcataaaggttgaactggtgatgacgagatagtcctcaaaagaaacctgcaaaaagacgatctcgcagcaaagtaagagagcagcaatacaatcatatgaaaccatagagaacatcaaaggccatgtctacccaagaacaggagaagggagaaggaatcacaaccaaagctgatgcatgtcatcagaaatttcacctcttttcctttgcatttgcagctgcaacccgatggagatccagctgctccctatagcagaagcgggcgacgacgcggtgctcccccagcgcgtcaagcacgcccccagtccagatgtgccgtgtctccgccgtcagcacgcacgccacgacgagcacgtcgaacagggccgacagcggtggagtagaccccgccggcgttgacgacctgtacgccgcgacacacgcactcgcggaggtcgatgtggttgatccccgcgctgatggtgatgatgcagcggagcgacgggacggcgtcgaggagctcggcgccgacgcggatgggcccgccgccgaagacgaggacgacgcgaggtgggtcggcgtcggcggccaccgtgttgagtaatgcgtggatgggaagcgtcggcgccgaggagaggggagagagaggatagagagggagtgaggatgacatatggggccacgtgggtcccaccattttttttattattttgtgtgtggaactgacatgtgggtcccatgggttttattattttttcagctcaaattgccatgtaagcaccacgtcagtgccacgtcagataaaaaccgagtcaaattagccacgtaggtgtcacgtcagctaaaaccgccctcaaaaccgtcgagggacctcatctgcaccggttttgatagttgagggacccgttgtgtctgattttccggttgagggactaaaatcggattcgctgacaagttaagagacctcagatgaacttattccagagagaaaaagagagaaagctagctagcagcccaaccaaagcagcagcaagccggcccagcaaaaagcaactacagcctagcagctagcccacagagcagaggagcagcagcccagcacaatactgcatgacactgtagcaaccaagcacgaacaataccacctcgcttttccagcttgagcaacacagcttaaataggaggcttgttgaggactattaatgctgcatagagtttggacttacacaaacaaggatcgaagaaaaaataacacatttttaaagttataataaaaacaatcacatgccttttttttaattgaatcgtgtttacataacctaaccacatcatcagtttttttttctttccattcattgcacgatttccttctgatttttgtagagtgaaatgattttacgattggagtgtagtgaacttgatatgatagctagccaaaaaacatttcttctactatggctcttctttgctagtgaattttttttatcaatatcaagtaccggaaaaaataaccattcattgcaactgaatctaataataatacatgacaaaagtaaatgtttattatggtttcaaattttagtttgtaatacataattttattttaaggtggtattaatagtttttttataatcatccatgtcagtggatctagagcaacaaataattatgttatgtgagtgtctttcctctttttttaagaaaaaggacacccatgtgagtgtctttctggcactggaaatatttgatttgcctataaggacttcacttaacctggtaatcttacgcttccacacattcactactacttttttttatacttcatctagtgcaacgtaccaacatttttactagtatatgggtgatcatattccatctcacttgaccatcatccaaacacgaattttttttatttataattttttttattaaaagttttacaaaaataatttttcattttgaaaattaacggaaatagtcgcctaccgccctcccagagggcgatttttaaaaatcgccctcccagagggcggcgaaaatgacgtggcagacggccgttcgctctcgggcgacggccgtcaacgaaatttgcaggcggcccccttgccgccctccgcgagggcgattttctactgtgcggggggccgcctgcaaatgggcggcgagggggggcatggaattttgcaggcggcccccttgccgccctccgctagggcgattttgcactgtgcggggggccgcctgcaaatgggcggcgagggggcatggaatttttcatgcggccccctt

SEQ ID NO: 7863 - DNA, 33407 bp, Oryza sativa
gctcattgagcggtgagtcttttgtttttgttgtggctttgtggaatgggagatcgccattccctgattcattgttgtcataatgtgcatgtacaactcacccatggaacctcgtaggtcgtttgcagcaaattttaaggcctgaattgcgtctttagtgacacgactagtttactagatatgcacgcctttcattcttctgatgcttagtgggtaacatagatacgatgtaacgttttgttttataaaggccatggatccattgcacttacggtttctctgatgtaacatatctcagatgctttatcaacattgcatacataatttataatatgtagttagtgcataaaactaaaagatgccttacagattgtgtataacattcaggaacttaagttttttttcttgcagctgtaagaacgttattattgtcaatgaattgtgcagaatattgtcaaatgatatacgatagcattttcatgtattatgctctaagtgcttgcattttgtttttgtctatatgttgcctatactgtggtcactactgctacagatttcacattgaaaatgattttatctgttgaaatcaggatgttgcaaacaggaactcaaccagatgacgaatcctacaatttggttgtaaatcttctgattaaactgaaccgggtggactctactttgaaatatttggatttgatgcttaaatcaggctacacaatatcttcctctgtttttgttgagtatgtccgggcatgtgtaagatctggtagattggatacattggcatcagtcatagagaagtgcaaggtacttattattcttttagactgacaagtctgtttactgtttatatactgttagttaggactcctaatttccaatgctggaaattctcaattgttataagtttgtgggctaccaatgggccttcaacattcttcattttcgaatatatgtttcaatcttctcggtgtatgtactaacggtgcacttattttgtttcaggctacagatcagaacaaagtcttgtgtccaccatggtcctggtgtgttgaaatagcagaagctgcttttgaagctaacaacagcaagctgggtctttttgctttggaatatcttgcaagatggattgctcgttctgagcgtgttattcctcctcttcatctttcagttgatgaaggtttagtactctcagctctaagtgctgctgccagaacttgtagcactgatctcctgaatgctgcttggtcaatattacgtaagtccttgcaccagaaaagggcaccgacgccagaggcatatcttgccaagatttatgctcattcatccattggtcatcttcagcgggcttttggtaccctacgtgaatttgaaaatacctatgggaactttgaggatattgattcagagctcttctcaccgttcacttcattgcgaccactcgttgttgcttgctgtaaggatgggtacaccacactggactcggtatgttctctttacgctatgcataatacatcaaggcgcaaaattcttatttggagatcatgtttaaaatcatccatgatgagctaatgatgaaaactctgtatgtgtagttccattggtgttatgaatttatacattatgccttctgtggcactgaattattctttcttgacgtttacctagttattcacttatttctcttttcaacataaaattggtgctttctttcttcactgttgatgttttatttagttatcatttccaccagagtatttgaggcacatttttttctctcaatgacaataattcctcatggctatggtagccttttgtattttggttcctctctgcaagcataccatgtatttcttcaacattcttatttctttgtggcccagtttcatattgacagttcaaagaattattgacacagtcctttttcagtgctattaggaattcgtcatagcattgtccccgccaatttgtcttgacattatgggaggaatgttttattgcctgttatgcatttctttcaccaaatatgatggaatatcctaacactgtaggctcctgcctgcaggtctatgtgcaattggagaatttaagttctgcagattcgccatacaaatctgttgctgctcttaactgtgttatattggggtgtgcaaacatttgggatcttgagcgagcatatgaaacttttgaggcaataaaagaaaagtttggacttacacctgacatacattcttacaatgcgcttttgcatgcatttggaaagcggaaaaaggtattattattacctaatggatttgatactttcacaacatttatcacctttttgccacttaccaacaatccattcaacctatgatgcccatgtgtattatacagactgaagaagcttgcaacgtctttcagcatctagtaagccttggtgttaagccaaatgcaacaacttatggccttcttgttgacactcatcttgtaaatcgggacgcaaaagctgctcttgctgtaattgctgagatggtatggtcaatttacttttgcacatttcctgtctatctatagtttctcaatgtgatgtctggttcaggttgatgcgggctttactccttcaaaggagacacttaagaaggtccgaagacgctgctcccgtgaatcagattttgatagtgacgagaaagtgcaatccctggctaagcagtttaactaccgaatgggtggtgaaaaccgcagggagatgctctttaacattgaatacagcgctgagttcacaagtactcctagtccaaggtactgggctaaccttttctgaatccaacattttctttatttttcatcgcataccagcaatggctctttttttttttttttgctttatctaatgcatttgctgactgatttgcttgatggttttgttttgcaagttgattttgatgatgccggtgcgctctagtagacgtaacgtgtaccctcgctcactttgctggtacctgaagggcacggaagctgtagtctgtaaattatacttctttgtaccaacttccctaattatttcaagcatctcaagctatcatttttgttggcagaaccctcaacaggatttatgttaggatttcagaataagggtcctaatagatttttttttttgcctgctcaaagcaccatgttttacaatcaatggatgtttgctcaacttatctctcagttccagccttttttacggctctcgtgttatttattcctatactgcatgccatgtcaattatgtatactcttgatgtttgtttttttggaattgctatagttacttcaaacgaattagtactagcacattgcattggagagcaatattgtttactgaaggtaataatagaccgctcatcgtgtaaatgcatcatgatttactgaagataatattgtttacttaaaaagaaggctccgtgcaaaataacgtgcaaaataagagacgcagttcgtaagttgtagatcatgattggcttgtgcaatgctccattaatttccttgagaacgttgttcagcttagtttcattaaatccaatatgaaacccaaataataccatacaacccaaattcataatttgaactcataagaaatccgcattgtagtaccttgccgctatgctatacatcacacaagacgtcatgcagcttctgaccatcgacaatagcaccagatcgaatagagtacaggagagactcaagcagcagacgatagcattacggacacaagaagccaagcaggagacgatagcattgcggacactagacacaagaagctttacccggttaccccgcctgggcatcagtcttcgtcgaaagatgaagatagtaggtttcccatgtgatctaaaggaggatccgtccttgacctcatcggcacccactgtttctcctcgaaagtgacgatgggtttgttgatgttcttctcggcatcagccctcagagaggtagctatctcttccacattcacgatattgctgtgacaagcacgaatcgagacttccttcagactcggaaggaactctatgccagtgatctcttggatggaggcttcttcgaacagagacagctctagccttgctagctttggtagtgccccttcttcaaatcttgcctcccaatcttcagacatgtcgagatgaatgacaagcagtctaagagatgggaattcccctgctgaagcagaaaattctgttcctatgtatgcattgtgatgcaacctgaggtatagcaggctaggtaaacttcctagtaccttcaggtcttcctcggcgcttagttcggttgcgcgaagggttaattctgtgatgttggaaagcaaaggaaaccaacatggtagttgtgttaactgacctcgaaggttcatacttttcgtaaatattggtggactggataatgaattgacaatgttgaagttcatcgcgccatcaggtcgccaaagtaataacgagcgaaggctgccgctgagcttctcaagagcagagatcaaggatgcccaggtgctgtcgtcatcaacaaacatcagtactccaagtttcctcaaccgggatagcttcgacaactcgctgatataatgtgatgtagaggtcgtgatttctacctgtgcaagtgttgtaagtgaatccatttttcgaagttcgttagggatatgtaaaccccagaactcagaaataggccaccgcccagtgtggttataggatcttcttcctccaagtaagtttgctaaatgtggaagattggttatgccaggaggcaaatgctttatggctgtgtcccttatatccagagtctccaacttcttcaggtttcctatttgtgcagggagttccgtaatatgtgttcttctcagattaaggtattccaattgaaacagcctgcacaagtctttgagatctctatttctcaggaattcgtagccttctaagtccaatattctcattaatttcatccaaccaaactgcaatgtttctccatcggcaaatatgctcaaggaccggacatggcataatatttctcttgtggcaatatatttcacacctctgctatgaacagttagccgccttatcttctcttgcggaaacaaagtgttctgttctcctactagagtgataaaattatcttcaattgactttgacacaatgatctccaacatcacatcatgaactcggaatgttttaaccttccctgtaaagctagtggtcactggctgaataatgctccggttaatgaattcatcaaagtagctttctgccacctcaaaaacactcagtccacgtttgccagtcacaaagcgttctgctacccatcgcctgagtatagttttccttctgatattatggtcctcagggtaaatgcttaaatataagaagcaagtcttcaagtggtaaggaagatcattatagctaagctcaagtattttcttcaatctatcaagtgatggattggtttcaatctctgaaccaagagagctataaatcttctcccaaagatctttactgtgcacaggcttgctagccaagaggcctgctatactgactatggataaaggtgtgccaccacattttcccagaatcttagctgaaatatcttctaagtgctcaggacaaattgagctgccaaatattcttttgaagaataagtctctggattcacaatcagtgagaggtttgatttcgtaagctcggtcgtactcatggaaacaacaggtgtgtgctacagctctgattcgtgtagtaaccactattctgctaccattatttgagtccggcaaagaaaaccgaataccttcccatgcagtcatgctccagatatcatcaagaacaatcagatatctcttattttccaattgctgcctgaggatgctcgcaagttgtaccacattccatgcttccatgcccttgagtaggccttccatgggacctttgccagctccagttgatggagaactcggttgattaactggttgagtgatttggagaagaatatctctcatcagaaccttgacatcaaaactctgggacacagttacaaaagcttgacattgaaaaggtccatttcttccagatagactttgatatgttgtcatagcaagtgttgtcttgcccaaaccaccaaaaccaaatatagacaccacccgtaattgttgcacatgtgcctccaataaccagtgcacaagatttccctgacgtggttcaatgccaacaagctgccttctctctggaaagagtgcagtaatgcgagtatcaacatttaaaagattagcttggctatcatatgcagccatgctattcccagcagttccagagatgagatgattggcactatacctgcatgcaagaacaactaagtaagtttgctgggtgatgaaatcgtactacagaagtagaaaagagattaaaaaaaactgtatatgctcagaaactgtactttatagtaatactacggagaaattgctaaaagaagaggtttctttttgatgacatgggtcattcatgggcaaattgcacaaccgtggcaacaaccaaacctctaagactaaaatacaactgcagattggtgcataaagcttgctcatacatgcaaaaggactggaggcgtagattaaatgccctagtgatttacagttgttgccttgttggaacacttggaaggagtggaacaggcaaacttttcaagaccagagccttcagtcacaggacatcgtctataagagcttttctagctagtttgtacgttttttgcttttgtgttgctcctccttaaagttatattttatcctcctctaatgcaataggcagagcacctgccttttcattcaagaaaaagaagacgacatgggtcatttcaagagtagatacttgaacccatgatctccaccttcacaaccatgtgctctactaggctatatgggtctccccaaacgtttttggcttatcggtgcaacatatttttcaacatataatttgtggaaagaattcaagttcataagcaaatctatttacagaagggacaactatagataaacaagagaaactttgctgccttttgtaccagattgttggtgtcctgctagcacctaaagctatcaaaaagcaaaacggcaatagtccagaatttgaaccatcattcgggaaaaagggacagaaatagcacagaagttaccttgaatttcgggcactgatattcatagtacgcctttttagttcttggatttgtttggcaatctgatgcctcactctggtggtctgcaatatgtgggtggccttgcggaaaaacactacagggccgctgccaccggcactactgctgtcaccaagttgatgtttgaactcatcaatacaatcctcgatatcatatgcaatctcacgcacatgcttcttccaaatcttaacttgcttgccgcattcatctctcccagaaaggtcctgaagaaaggctgtcatgctctccagttcatccttcaagtgttgcagttcaccccgaatacctcccagaagctgggcttcttggaggacgattgtgccgagctttcccaagagagtgtggatcgcaccttccgcggcactaacaacagcatgttccatctatctaggatagaagatgaacaaagaaccagaaacaagctctaccgcacttctgacctcaaatgaaagctgggagagaaaatacaagcttagagtcagcaaaatgggattcaccttttgaatcctttccacagtccaaagtcaataaaactgtagcctacgtcacttgagtagaaaatggagactgtttccagctttcttttgaaaaggagattgtttatagcctactcaaagataacctgatcagttgacttttgagttttatattgttcaggatggaagctttcttgacgaagttaacttagtttacttatgagtgtattattttactgttttcacttttcaatataatttgcacacaaattattattgggagacagtgctgtagtcatgtttgaccaaaaacctcagagtagtgctaatgaatcaagctcaaacttgcaaatctaaaatcttcaagcaacatagcatgaatacatctaaaggaaccctcagattatcataccatgcatgacactgcacaatggtaatctatccagcttcttgaatcattatcaaaagttcaaaaacgaaggcaagaatggactatttgctatacttcactaaaaaagaactattccctccgtttcatattataagacgtttaacttttttgttagtcaaaattctttaggtttgaccaagtttataaaaaaaatagcaacatccacaacaccaaactaatttcactaaatttaacattgaatatattttgttacaatgtttgctttgtattgaaaatattactatattttgctataaactcggtcaaacttgaaaatgtttgactaagaaaaaagtcaaacgacttataatatgaaatggagggagtatctgctattcctcccacaaagtcctcactatatgagcaggtcatctatacaattaccttgtggtaaaaaaaagaccaagctcctgagatgattatgatcaagtattatcttaaacctctgttagaagtccattcatcgctcttctcctcctatcccttgtggccatcctctcaccataagtcagaaagatgtccccaagatcaacatgccccacatccttcaacctccttccaacttcctcaaacatcgacaccccatcctcatttgaaaagtagtacaagaacttgttatagtcgaaccttggcacatccactccaccccacatagtcctctccacaaacttagttgcctccaatgtcctcccggccttcaccaacccaccaacaaagatgctctcaaagttcaccaatggatccctccccttccttcccctcttccccaagtgcccctgaagcagcataatgtatgtgtgcatgttcggctcgcaccccgtggcaaccatctctctgaaaacctccgtcgcttctcgagctcgcttgatcctgatcaatcccttcatcaacccatggtacagtgcaatgtccttctccttaacaccatgaaaaaccctgtatccttccctcaccctcctcctcaccagcagcccatacaccaaatcccccatcacctctccgtccacctccacacctctcttgaacatttcggcgaacaccatgtacgcgccccacatcctcccttccttgcacagccacgacaccactgcccggtagcacccgcctctgccaccgtctgaaactcccctcctccgcattccgtcgaacaccttcatggcgtccgcgacgcggttattcttgaacagcgtcaccacgatctcctcgtacgcggcggcgcccgggtcgagcccgcgcctctccatcccgttccacaccctgcacgcgtcagagagcatccccgcgcggcagtatccgacgaccagaagctcgcagcacctcccggtccgcgacacgccgtaccggtgctcggcctgcttgatcaccttctcggcgacgtcgggcagcttgcagacggagcaaacgacgtcggtgatgaagttgagcgtgcggggcctgtcggcgtccgggaagagggcgagcagggaggagaccttgccgacctcgcgggccggggcgaggccacggatggcggcgcggagggcggcaagggagcggagcgcaggcgggaaggagagcagggtggagtggagcaggtcgacgttgcgggacttggcgaggacgtcgaggaagcgcgcggcggtggccggggagtgcgcgaagccgtgggcggcggtgaggtggtcgaggaggcggcgcacggggcgccaggagagcgggaaccgcgcggaggcctggaggaagagctcgcggaggtcgtcggccgcggcggaggggagcggcagcgcggagaggcgccgccgcagcgcgtcctccggggcgtgctggtgctggtagagcaccgtgcagaggcggagcagcagcgacgggtcggtggggcgccccggcgcgggggcgggggcgggagcggcggcagcttccgcggcggtggagaggaggaggcggcggcggcggcgggagagtgggaggaggaggaggaagcggggcagcggcggcaacggcatggatcaatggaggtggccgccgtcacgccgattcgcggtggcgaggtggatggcgcgacaagattgagaaggggaagcaggccgcaacagaagcgtagggaatttgggctttgtgggccgtgaggtcgtcttgatcttcgcggtgtatgagaaataagatcactttgactccctcaactgaccaccgaatctaaatcgtatctctcaaccgcaataccagaaatcttgactccccaaatttacaaaaccggtgcaattcgactccctgggcggttttaggaggcggttttgctgacgtggcgccacgtggcgcctacgtggcaatattgaccgagtcttcgttccacgtggcgatgacgtggcacctacatggcggtagaattaaaaaatatgcgtgcgacccattagtcattcacaccaaaaaagtgggcccactgacatgtggggcccacatgtcagtccttcttcctcctccctctctcccttctctctctccccttcttcccttcgaccagtggcgcctctctctttctctcaccctcttcccttcgggcggcgacgggtggtggaagcgagcggcaggcggcgagagcgagcgacggcggcacgcaagtgaggcccggagcggcgacggcaggatgggcgagcgagcggcggcgggaggaggctgagcgggagctctggccgcgttctcaccctgcttcacgatggcgttgaaggcaacgctgcccttggcgtcgacggtgagcgcgaggatctccgggaaggccccaccgtcgccgaagtcctccagccgccgcggcacgaacccgccacgcttcccgtacagtggcacgggcttggcagggcccgaaggcttcggccagcagcagccgacgctggtgcagtggcgacggcggggcggacgatgctggggcagtggcggttggcggtggccgacgcgggagaagccgagacgatggctcctcctaccgcgagcgcgaggcgggtgggagggcggccggtggcggtcgatgttaggggcggcggtggccggcgatggccgacgcgggagaaggggacacgacggctcctcctaccgcgggtgcgaggtgggagaatgagggagggcggccggcggcgatggccgatgctagggtggcgatggcggccgacgctggggcggcggcggctccggcttcgatttcctccgctctctcctccgccgcatccttccatcctccccacccgcctccctccatccctccgtctgcctcctcacctccgtccgccttcccgcgcgggagagaaagagagagaagggagagagagaggaggaagaaggaaggaggactgacatgtgggccccacatgtcagtgggcccacatttctttttgtgtgaatgactaatgggtcccacgcatattttttagttctaccgccacgtaggtgccacgtcatcgccacgtggaacgaagactcggtcaatattgccacgtaggcgccatgtggcaccacgtcagcaaaaccgcctcccaaaaccgcccagggagtcaaattgcaccggttttgtaagtttggggagtcaagatttctggtattgcggttgagggatacgatttagattcggtggtcaattgagggagtcaaggtgatcttattccggtgtatgacgacgtcgtggtttgggaaaaagtctactttacatccctcatcgttctaaactgcaaaaaattacagatttttccccggtttccgttaacatgcttttcaaactattaaacggtatgttatgtgtgaaaactttctacatagaagttgctataaaaaatcaaataaatccatttttcaagtttttaataattaaaactcaaataatcatatgctaatgacttgtcttattttacgtgcgcacttaatcttcatccttccatcatattcgaacggggctagctccctgaaccgcaatatcagaaatcttgatctcctaacttgtaaaactaggttaaattaagtcttatggtactatatatatatatatatggctagtttttgttgacgtggagagttgattgtagtcaacatagctgagtaggcttgagcccccacatgtaaggctcctatcttcttcctctaacatctttctcgcccctcttctccatctctaatttctccacatctcccttctctttctcctggcataggccgtaaaaggatttgaaatttgttttctcttatcccatttgtcatttgccagtaacctttcacttcttctgattatatatattgacgtttgaaattagattcagttaaatatttatttaaaaataataataaacatatattactccataaatatgcaagcataattatgacaaattgcataattgcataataaaaaacaaaaatcaaacatggctgtgatcacacatatgctattttgttacaatttatggagatcgaatttgtgtatgaagttatatatctcatatcaatatatcttattatttttaaaaaatatatatatatattaatagttatttaataacatgtaagaacaacgggatatcccctcgaattattagaatccatgtccgccgtatacataagacaaatatcatattcgccaacacacctttctttgtgggacaaacaattaagctatgatagatgtttagggaagtacttagatgcaaactatactcatccaaataaacatacataagtaggtccggtacaccgatctatcaaagaaacaaagcagtacaatatacaccaccatacgtacatatatatccatatatacaacgcgctaaacaaatgctgaaacatcatactccctccgtcccataatccggttctaggttggtttttcatgggacggagggagtactcctctagcggaaactaatactacaaatcatcaatgagaaagatactgtatatagcaagcacatcatggatcatgccatcatcgatacatatgtatatataccagtctatagaactgtacacacatatatacgtacgtagaatcataacgtatttatcttatagatatataacgtatttggcaatgcgatgagtataaaaaaaatatagattggctaggtggagtgtgctctgcaagccaaagaaatgtggggggctaggaatccaggacttagagactcaaaataagtgtatgcttagtaaatggatctttaagttaattaatgaatagggagtgtggcagaatttgttgaggaaaaaatacttggtaaggaaatccatttttcaggtccaaaaacaaccgggggattctcatttttgggctagccttatggcagcaaaagaacccttccagacacttggccacttcacagtgaataatgggaaacaagtaagattctgggaggaccgatggttgggaaaccaaccccttcatttggaatttccaaccttgtatagcttggttagaaataaaaacttagtagtggccgatgtgttaggaagggtccctttgaatgtctcttttagaagagcaattgtagggaaaaacttggaagattggcttgaaattgtttcaaaggtggtgagtatcaatttgaatgataagcaagaccaattcttttgcaagagcaataaaaaaaagggttgttttatgttaactccatgtataaaacccttatgcttaatggtgtaatacctgggaaatctttaatttggaagctaaggattcctttaaaaattaaaattttcctttggtatattgaaaagggggtgattctaacaaaagataatcttgctaaaagaagatggaagggtagcttgctttgtagcttttgtaactctaatgagtcaattcaacctctcttctttgattgcataatggctagatacatttggaatgcgatctatcttacttttggagtcaagcaaccccgtaatagttcacacttgtttgaaaattggttaagaggttttgaacctaagcttaaaagacaaacttgggtgggtatagcagcgatttgttgggctttgtggctcaatataaatgaattatagtctttaatggctacaaccacgtatttttcttacaggtaattttcaaagtaactcagttgtcaaggctttggtctttgcttcttaaggaagacgaaggcattgaagtaatcgcgaagtgcaagcttttagagaagtgtatgatggagctgatcttctctacttttgggtggaactttagaagaatgatggaagcttagcttttagttcctcttgcttgttatccatctttaaaacttatttatgttttacccatgtaacgggagagtcttatagtcttgtgtactcgtgtttgttacttttaggctgtgtacatcctcacaaggtgtagaggccaggttttttataatccattgtctaaaaaaaaaatactgtgtgtgtatgtacgatcatggctgcttggtctccggctccgggtcgtgaacctcgtgctccggcggcagctccgccgtgggcaatggcggcagctcaggcttcggtggcagcccgtgctttgggaaccccggcacggccgggtagtgcggcagctccggcacgacggggtgcggcagcatctccggcacgacggggtgcggcggcagctcaggcttgggcaacggtggcagctccggcacggcggggtgcggcggcagctccggcacgacggggcgaggaagctcagggagcggcggcggcagctcgggctttggaagctccggcagctcggggtgcggcggcagctcgggcacggcggggaagtgcggcgccttctcctcgaggtgcctcgccgtgctgcccatggcgccgcacgagagcagcagcgccgccatgagcaacagagccgacgacgacgacgacgacgacgacatggcgttcctgctaagcttctgatgatctgatctagctaagctaagctagttcttcttcctcgcagccagggatcgatgactagaacacaagggaaacctggtacttatagcatgaacagtgaagtgcagatgatatcatatcatatctaaccaggggtccgttgccattttcaaccttaccgaattttggtaaagttacccaaaaaaaatggctacatttagtttgctgtcaaattttggtaactatataagaaatcctaccaaaattttagcaagtcgccaaaattttggtaactacaccaaaattttgataataccaaaattaggtaaggttgaaaatggcatcaaagtgaacatgccccagatcttgatgcgtacgtgttgtttggtacatggcaggtgaactgctgctgcatcacacatctctgatccttctggtttcctgaatgcgtgttcgaactctcctgatctctatctgttccttcgtgttatggttcagttagttgggaattccgaggattgttcagagagagatcagtgatcacctaatcgctagctgcctagctgcgtatatgcaccggcaaacaggtgtgcaaacagcagagtcattgcgggcaacacgtgtttcaccgcgagatgtttatgaattatgctgctgtttggccacctgaaaatgcctgaactctgaaccatcccggtccatggtgacgaactgcttgacttgctggttacaaatctagttgaaaacgaccattgttgtacaatccgtacacggcaacttgcttaatgttgcaggttgccgtgttgatataggccgattttcaaacggcttacgttagaagacctatagaatatacacggcactgtgagtacatgactaacgtgggtattcagttgacaatcaggtgcagtgcaggtaagcagcagctatgtgcagagtaggtagcacatcttaatttcttaattaattaatttttctccatattttagataaatataggttcctcgatgtacttgctcaataactataaatgttttgataaaattagaacaaatttgccttgtttgttatgccttaataaatgatgattgctaggggacggcattccgcccattcgacatgatactttacgaaggtgatgtcatccgcacctccgctttatcctcgcaagtctacgactccgtcccaccccacgccacgtgctcatggctcacaccttgagcagaaccattggtcgacggaggagcatggtgaggcgaatgcatcggcgccaatgcctaggatgctaggaggtgtcgacacacatggcaacgctagccacagcaacactagggaaggaaagaccagagccaaggagaggcgttgaatggagaaaagacattagtgggaaacggttcgccagccagccaagcagcgatggcgagtgtcctactgatcaggcaccaatggttataagatggtatcggtgcccgaggtaccatgcctgatatctgtgcataccagccatgataccacgagtatcagacttggcacctatcggtatcaagcgagaattacacgctgcacagtgtacctacacacaatattgacgagcagcacgatggattggcaaacagcacaagctgccaatcgaagctctagatctagcaccttcgtcagcctttccctccatcaccatcggtaccagccttgaaggaagactcacaccagacaccgtcctccctgatggcttgtatggagaaggaggccatgaagccagcgtcgtccatcgcctcatcgccaacatgcactcagaatggatctagcaatgagaatggcctaggcctccagatctagtgacagaaagaggaaatggtggtcggcgagaggggggagcagcgatgtgctatttttgccagcacgagcaaggaggaagagaagagggcagagggaggatgtgaggaggagggtggcggcggacgtatgggtgtgtggctcacaaagatcaacgagtggatgggaagcacttagggtggatggagagcattaattaagtatctcgtccctaactccctagatgggataccatatcgtagtttttctgttaataaatagatgcactaggagcactaccattttttcaggaagaataataggcatcttgttatcctgattcactctgattctggtatatatatttacaaaattcaatagactaggatatattattcataaaatccgacggatgtagattatttgactttttatgtggattatctgatagatttgcctttttgatataggatatggtattgataaaattcgacggatgtagattatacgacgttttatgagtattattgcttcgggataatccaacaaaggctgattctatcatgtagggagccaaatagtttgatgcacatcgtctcttgctctttttcaaatggaaaagcttgttagagcataatccaacttatcaactatgggccaccgagatcacattaggcctgcgctccaatagaagtcacaactttatgttttggacctacacaatccaaaaagactaaactggtaggtgtgaatctttctcaccttttaagttatgtttctccaccatcaattttcgatgtaggactaaatctaacagttgtcccatacggggctagtagtacctaggctagacggtcagtgtggcataatctattcttgcacacaaagacctgctgtaactggcattcttaataatttttttaagactagaaaacaagtatatattgtaaagcacataataatgcataccacaaataagcaatattataggaagatagctattttattgatttatgaagcatgtatgatacaagtgtagatcgtgtgtgcacacacataaatcagcacatacgataacacaataactcatccaagaacaaagaaagctgccacaaaacaaaacacaacaacaacgtacatcatctcacacactcacacagctagctagatcatcactgaaaatatcttaggcaaacatcgatcaaagcttacacatgaacatacacacatacagcaacacgtagtaatttcaggatacgatacgaccggccgatcgatcgatctctggatcgatcatggcttctcgggataatggctctcaggcttgggcggctgttcatgctctggcacggtgggatgcggcacctcgggcttcggcaactccggcaccacagggtgtggcacctcaggctttggcaactccggcacgacggggtgtggtggctcttcgtgtttcggcaactccggcacagcagggtgaggcacctcgggcttcggcagctccggcacgacggggtgcggtggctcttcgtgtttcggcaactccggcacgacggggtgtggtggctcttcgtgtttcggcaactccggcacggcagggtgaggcacctcgggctttggcagctccggcacgacggggtgcggtggctcttcgtgcttgggcagctccggcacggcggggtgcggcggcggcagttcaggcttcggaagctccggcacggcggggtgtgggtgtggcggtggttcttcgtgctttggcagctccggcacgacggggtgcggcggcagctcaggcttgggaagctccggcacggcggggtgcgccgccgggtactccacctccaggcgtcgtgcagcgttgcccatggtgctgcacgagagcagcagcgccacgaggaagagaagaaccgaggaagacatggtgttctcaagctctcagtggcttctatctctatatcttttagtgtgagctagctaagcactctgtgatggctgggagaaaggcaagcaagccagatatttatactgctaaactgcaccttacttaagcagttaagctactaatgcatgattatatttgattacagtgagcctgctgattaattactggtaggtacgtaggtgatctgcacccctttttggttgtttgacttgtttcgatttagtcagtcagtgactcagtgtgtgatctccccttatctttgattgtgtatgcatggtttgattaattagttgggaaaaattgagacccaagaaatttggttggtgaatgctatagaaacctagaacggacggtgtccttgtgggtacttgtgtggccacatgatatgagggtagtgggaagtaagtgaatcgtgcatgacaaggacagagtactacatgcatataattcctacgtcgcaaagtaaaccaaactcgtacgagataagatagatgaagtatatattatctttccaaaaaaaataaaaaagagagtagcatatatattagctatacatcgtacagccaatgctgacaaattaatgcttagcttttccagttgtaagaaaagatatgaatatactgcttttaaaccgctactacatatggcatacatgtgagaacaatttagatttaaatttgaaaactaaaacataaactttaaattgtatgtgtataagtattaatgtgttctatatgttgagtcgatgaaaaattatgcgttattagtcatgcatgccaatattgaaatctaaatttaatattaaacccggtaaagtttagtcaaatctatgttaaatatcaaacatttatgattgtagggagtatatgtttcgttgggcctgcttgattactcaaagttttatttttgatccttaattgacaaagtacgggagatgtgctgcattttctaccgttaacttaaaagcacggtatatatttagatatcttctcagggaaggtaaaaaaaaaccattcttactcgtaattaattaagtcgttgaagaattcagtttcacacatctcttgttcatattcaaattcctatatatggtaaagtagaagttgttggcccacagtgttatagtaactgaaaaaaatgtcctatgcacataagctttgcgcataggtataacactaatgaaagtatatacacattatttttctagaattttttatgatatttgttagttagtgtgcatagtgagtgcataatatgcataattcattcttacacacaaagacctattgttactgtgcattttcaatcatttttttaagaaactaaaaacaactatttttcctgaagcatattatgcagtctgcaaataaattgtaggcaaataactatttactgatttatataatactagaaacataattcaaacataaattaatgaagcatatatggtacatgggtagatgatgtgtgcatagatataagcgtagcacacgcaagtacatcctccaagaacaagaacaactggatggctgaaacatcaagcatcactcacacattcctagcaaacaccacagtttacatgatcatatcatacacacatatacaaataaacccatgattattcaggatgcgatatgatgggcccgatcaataatctctgcatcgccatccgatcatggcttggccatcggcacctcggggtaatggctctcaggcttcggcggctgttcatgctccggcacctcggggtggtgcggctcttcaggcttcggcagctccggcacgacggggtgcggcggctcctcgtgcttgggcagctccggcacgacagggtgcggcggctcttcgtgcttaggcagctccggcacggcggggtgtggcggcagctcaggtttgggcaactccggcacggcggcgtgtggcacctccggctttggcagctccggcacgacggggtgtggcggctcctcgtgcttgggaagctccggcacggctgggtgcggtatctccggcacagctgggtgtggcagctccggcacggcagggtgtggtggctcctcgtgcttgggaaactccggcacgacggcagggtgcggcggctcttcgtgcttgggcaactccggcacgacggcggggtgtggtggctcttcgtgctttggcaactccggcacgacggggtgtggcggcagctcaggtttgggaagctccggtacgacggggtgaggcggctcttcgtgcttgggcaactccggcacgacggggtgcggcggctcctcatgcttgggcagctccggcacggcggggtgcggcggcacctccggcttgggtaactccggcacggtggggtgcggcgggtactcctcctcgagccaccgtgccgcgctgctcatggagctggacgagagcagcagcagcgcggcgaggaagagaaccgaggaagacatggcgttcttcttaaagaccatgctggcttagctagctatgctacctcactgtgtgagctagtgtgctttgatggtttggagaaggcaggcaagcctggtatttatagtgctaaactgaacattaatcaagatcaataaattaattaatgcatgattaattacaggagctagcctgctgatgtgttgattaattacttgtaggtaggtgaactgcactccattggttgttcgacctgtttcgatgtgtgagtgtgatctcccctgagccctgatctatctctgttggcatgccatctttgtttgtgtgtttatgcatggtttagtaagttgggaaaaaatgagacgcaagtgagattggttggtgaatgcagtatctagaattgtgtccttgcgtggccacatgatattgcagagtaagtgaagccgtgcatgacaaagactaaccaagcactatattatcttccaaaaaaatttgacaaagttctttttaagacaacaaatagtagtatatatattagctgtacgttgcaggtaatgctggcgaaatgcttagctttgccgtttgtaagcagagatatgaatatcggcggtaattaaccggccggttaccgctgatcatgagccggtaccggctgacatctgacataacaaggcagaacaatctagatttaaatcgggagaatagctaatatggtctctaaagttttgctcctgggttattttagtccttaatcttttatattgtccaaacaaatcctttaaatttgtcatgtgggctaatatagtccttggtcccaccaaaatcgccacatggatatgccatgtcaccttcctatgcaagatctatatgatttgtctaatttacccttacgcataggaaaataaaaaacaaaaggaaaaagttaaaaaaatatatggtatgtgtaagagtaaaaatatacctcaaaagggtgaaaaaagaagtattttttttctatggttatgtctaattcatccttatatttatttttctatgatatacgtaagggtaaattggacaattcattatagattttgcatgaatgatgacatggcatatccatatgatgattttggtggacccaatgactattctatgctttatgacaaaggttaaggatttctttggaccatttaaaaggttagggattaaactgatcctacagagaaactttattttttttgaacggaaaaagggcacaagattgtgccttttcattgaatatagaaggagaaaatacaacccctaagggtaaagcaaaaaagactttaagctataaactatacaatgcgtgggacgaattcgcgcaacctttttgcccctgctaaggcccacaggccagcctcctcttttatttttgctaggagaaggcctaccgccatctctttgtgatcgaaaatccgccgatttctctccttccagatttcccggactactagtaggatgagggaccgaaggcccttttttgggatgttgggagtatttgctaggctttcccaccattggcggactgaccgggcttcctcccactgggacggctccaattgatgatatcccacccatccggcaacgtggtgccagattctctttgtgtatctgcatgtggcgacaagatgcaatcccgtcttagcttcgcaacgacagagggggcaatggccgttgttctgccaacctcttattgcaagtcggtcggacgtccagactctattctggatgatgagccatgcatggaatttgcatttccccggggcccatgctttccaaatcaaagagttgaggtttgtacttggcgcccccaagcactgtgcatgataggccgaagaggctgtataatggccattgcatgtgaatttccatacaatctgatccggctcttcactaacttactgcacatttcggaccgctttcctacagagaaactttagggactaaagtagctattctcccatttaaatcttaaatttgaaactccactttgaaattgtatatgtgtaagtacattaacgtgttttatatgctgctggatctatggataaaaaaatatgcggtagtcattccaatgtttaaaaccaaaatttttaagcgattatgtgttctgcccttttcaagtcggtgaggccattctcttaagcaacttactttgttcttacttcaacaccaaactttataatacaatgacaggcagagatttttgtgttcgtggagaatggacaacgttagattcgcagcgtggtagttgttgagtagttgggttatttgctctgattttcatcacttttttagaaaaaatcttttaagcggaaatattgcatgacctttttaagtattttcaactggagggtatacccaatactgtaaatcttttatactaggtttgttttgctcgagaaatgtatagggatcttccggctagcttcatagggtggtgggctagacgacctcctaattatttaatattaaattattccctaatattcgcgtcttttaggtttgttttgctcttgaaactggtaacttttagttttgaggaaaaatacattttttttttgtttcggagattgtgttcatatgattggacttcaaagccggtagtcaattcttacgtttgctagaagtcagacaagagccaacaaagagagcaacaaagagagcaactaaacggcaactaactatcaaattaacatccgtgtaataaacggctatatatgcaccaaaggagaaacatagacttctagaaattaatccaaacaccagataatgaaagtaagatcttaccatttcagtcatgaaaatgtgccattttgaatatctggttcggtctttatgtacagatttaaccgttaatttctatttcaaaatatttttaaaaaatctcataaactcataattgtatgaattttttttattttcatacatcaacctaagagttgtttttttatctaatcaaacaaactcatagtttgaagtgtgagaacaaaaaaaaaatactttggtgaacagtggtgttttttttttgacaccttggtgaacagtggtgttgggctaggctcacgggagaggagatacgtcagaaaactgaaaaacggggttcttttgtggccagaaaaatatattttattgacgtgaaacatgcatgatacctcctctgttcctaagtatttgtcacgatatatttattatcaccgttaaaactttaactagtactacctccgtttcaagttataagacgttttcactttgatcaaagtcaaactgctttaaatttgactaagtttgtagaaaaaaataatgatattatcaacccaagacaaatttattatgaaaatatattgaattattgatttaataaaactaatttgatattataaatattattatatgtctataaacttagtcaaatttaaattagtcaatgaccaaagtcaaaacgttttataatctgaaatggagggagtaatatttttaaatagacaggctattattaacgaaagagtaatgtttattactccctccgttccaaaatataggtatttttggaccctgacacaggctccgagatactactttgaccaacaatatctataaaaataagatgttttaaataaaaattaagagttgtatattataatagtttgtttattaataaatatagtaacatcaattttacatgattgatcttttttttaattattattggttaaagttaaaaatgtttgacttgtcactatgctaaaatgtttatattttgatacggactgagtagtatataacttatattttcataatgtatcatccttttacgtatttgtcgttttttttaaaaagaagatacgaatggtcaaagttgaaatatgaataataactgatgacaagtacttgggaacggataggaagtacacaacatcagccatcagccagctgaatctctgaatacaacaacgagagtacgaaactctgaaacatcacgatcctactatatcacatcacaccagccggggctcaccacgaacaagatcacacgcaaaacgtcctacacttcgcacacccacgcgaatttgattcagatcactgactgccacacgcctgcacggggtgtaatctgatcgtcatttttcatggcttggcctccggctccgggaagtggaactcgggcttcggcggcaactcgaacttgggcaatggcggcagctcagccttgggaatctccggcacctccggcttgggcagctccggcacggcgaggtgcggcacctcggggatcttcggcagctccggtttcggcaactccggcacgacggggtgaggcagctcaggcaccttgggcagctccggcagttcaggctttggtatctccggcacggcggggtgtgccgggtgctcctcctcctccgccgccgccgccgccggcgcagcctcctccagatacctcgccgcgccgccgatggagctgcacgagagcagcagcagcgctgccgcaaggaggagaatggatggcttggtatggctggaagccatgtcgaacggtttgcacttaacttagctgatgaactctgggtgagtgtgtcagtgagaggttactaggcactagctgatgatcacttgatcagtctgtgtgaagatggctgggtgagaaactaagaagacgatgctggcatttatagtgatgaatgggagcttagatgcatcatcaatttgcaggagtctctgatctttggtggctggcagcagtggcaggtgatctgtattttggtggttgtttactatggtctgtgtctctgatctctgatgatttcagtttcatgtactatggtttagttggttgggattattgagaccctgaatcgtttggttggtgaaaatgcaagaccatctatgtctagtttaggagtgtatatacacctgcactaaggacctcaggactacagctgggaatgaagcaatgctgacaacatgtttgattgtttggttttggttgttctgaagtgttgaaaatggacagtgtcatagatatttttgcaaggcttcctttttaatgctcattcaacaaatttccaaatgaagtagatagttaacacttcaattaaatgctgatatgagtatgttcagtagcaagcaagtttagcttacatacaatccagttttataaatttggatatgagtaatgctactaatatttaggttgaacactttctttgaaaaaaaaaagattcaggctgaagatttgaagattatatgtgtttatttgtattgaaaatactagcttaacaaatcttgctttaagaataaaaaaaactctcaactcccaagcacggtcagtactacaaaaccatgtcataagtttgggtgcataattcgcatgtcatatttccatgaatttttacaacaaacagttaagtttcctacaacaatacacaatagaaaaaattcctccaaacagagctttgaacttggcttgcaaattaaattgtattggtagtcatttggatgtaatcaggacctggtcctaggactaagggcttgtttgcttgctgccctcagattcgcgcctggctcaggcgtcgatgtcaggcgttcgatttcggtcgcctgcggtcggatcgacctgcctgagcaacggtctccaggcgagggcagcaaccaaacagcccctaaaagcccatgtcgattttttgaggtcccttaactacaaaatcagaaatgtgtaccccaaaactctctaaaaccgttcaccggaggtccctcggcagtatttttacccggttttgctgacgtggcatcctagtcagcaaaaaaattaaaaaaaatacatgggacccacatgtcagctgcacatcttttttttttcttctcttttcttcttctcctcttctctcttcagcgagcgcggcagccacaggcagagcggcgtgacggggttctcctccgtggaggcgacgagcacggccgcggcggtgacggcaggttcccagacccggagccagcgcgttcagccggagcagcggctgctacaccgacgccgcattctccgccgcgcgctcctcgccgccgcccagatgctgctgctgcgcctgcgtcgccgccgggctcaccgtcagcttctccttgatcgctcccgtcaataaaaatgtggacatcattattgattgctaggagcactacgtgcttgcagacggcgaacggcacgacggcgccggcgaagcccgccggggccgggccgcagctgaagctgctggtggacaagcgctcgcgtcgcgtacgtgctgtacgcggaggcgcgcaaggacgcggtggacttcctcatcggcctcctccgcgttcgtctcattcgtcgaggccgacgccgacgtctcgctggaggagttcggtgactcgctgtgcccgccaatcccttgcgccggcgaactcttgaccctgccggatagcaactccgccgtcgtcaccgaccggccactgctctaagtgcaggtacgtacgtcgtcataaaacttaaactttgcaaattttgcaccatttgtattgtacgtgatctacgtgttcatgatgccatgcatgtaggtgacgaggctgaggtgtggcggcttcgtgttcggcacccagatctgccacaacctcgtcgacgcggccgggatcacgcagttcttgcaggccgtcggtgagctcgcggaaggcgcggagcgtccggccggtgtgagcgagggagcccctcgacgcgccacccgccgcgtccggcgtacgaccaccccgagtacgagccggcgtccgacgaggccagcgacaggctccgtccaggagacgagctcgtgcaccgcagggtcctcttcggccccgacgacgtcgccgcgctgcgcgaccagctccccacgcgcctcggccgcggtgctcgcgcttccttctcctcgagtccccgggcccagaccgccgctttccgctgcctacagctgccgacgccgcccttccgcctgctccggccacgcgccgccgcccgctgccgctcgcccgccgcttgtcgccggctcgccgctgcagccgcgctctcccactgacgccgcccctccacctgctccagccgcgctcgcccactgcttgccgcgtcggcgtcgtcaaccgttggctccgggtctgggaacctgtcgtcgccgccgcggccgtgctcgtcgcctccacagaggagaaccccgtcacgccgctccgcccgtggctgccgcgcttgctgaagagagaatcagagaagagagtagagaagaagaaaagagaaggaaaaaaaagtacagctgacatgtgggccccatataatttttaaatttttttttactgactaggatgccacgtcaccaaaaccgggcaaaaatactgccaacggaccttcggtgaatggtttaagagagtttaaggatatacatttctggtttcgtagttaagggaccttaaaaaatctcgctattcagtcgaggggcctctggtgaccttattcctaaatctatttagaacaagtgcctaaactaaaaatgcaatggaagaaaattctctgataaatagtattttttaagaagcgtggagaaaataatccgtggtaacgattcggtcaatacgcagaaaataacggggtgcacagttttcttgtaattaatccattctcataatctcattctgttccttggaataaacattgtgagttattagcaaaccagggagcatatatacattataaactatcaaaactcgaactgcagactcaaagaaaactctccattatattgatttgtacatgaatataaacacaactccatggttaacctgtaatcatgtactgatacaagccagtgtagatagtgaatacagaatacgtaaacagtgaaccatcgcaaataaaaaccacacacaagtattattcagtacagataaaatggcgcgcgcgctatacgcggatgctctatctgatcgctcgttcatcatggcttggcctccggctccgggaagtggaactcaggcttgggcaatggcggcagctcgaccttgggcaacgatggcagctcaggcttcgggagctccggcaccgcagggtgctcaggcaattcaggcttcggcaattccggcacctcggggtgtggcagttcaggcaccttcggaaactccggcacggcggcgccatgcggcagctcgggctttggcagctccggcacggcgaggtgcggcggcagctcgggcttcggaagctccgggtactcctccttgggcgcggcctcctcctccaggtagcgagctgcgctgctgatggagctccatgagagcagcagcgccatgaggaagagaagcgaggaggacatggagttcttggaagccatgtcgacgatcgaaatgcagttaatttctagctcgtctcggtgtatcagtgacggtgagagagctagttctttgtgtgatgggttgagaggcaagaggaagctggtatttatagagcaaaaatttaaggaatgttagcttgctgaatgtgcatggaagtctcttctgatctttggtgcttggtaggtcatctgcatcagtaatttggtgatcaattggtttcctaatatatatttgaggatggcttaattagctgggaatattcagagtttcaaacctgattgatgaaatgcaccaccaaggcaccaactaaatctagccctttataaaaaagtttgtacacgtgtgcagtgtgatgtgggatgttaatgcaaagtaagatcaatcgtgcatgtgataaacaacagctaaggaacagagcaagtgagactatgctaccgtcccagtaagttctgacaaaatgtctgatctggttgctgaagagagtgtcaaaaatagcagtaaaattctccaactttcttttctgactctgcgtggtttggcgatcgactgcatgttcgagtaggagcttacatagcacactagtgatcaatcggtgttaggtcacctgttcaagatatctgcacaaaaaagttcagggatttgttgataaaatcactacaaggtcaagctagtcgcttgtcagtttcagtgactgatccaaagcctccaaaccgagctgaaaaaccaccattcctctgtaacagccttcccgtggacagtgaaagaagtgaggaatctgaacacattggctaaggaagaagttgttctgaaaacgatggcttattcagtgtagtgttgaaggtagaaggcgctactgcaacctatctgctcctccctttgatctctttaacttgcaggtttggtttatggttgatagctaggctcatcagtgataatacaggacatggaaaatggaactataatttgtaccacaattgtacctgcagtttctgcactatctgtacttttgtacgtgctgcaacctctcctactccacgtaaagtatgacctgtttccaaggtactaaaagagcaccagctagctagcttgcaaacaatatttctaatattgtagattaaacaactgaaagtggtccagctgaaattaacaagagaagagacggtttacaatcctggaggccctgctgcatgctctgcacattctagctagtcagaaaatggtgatttgtggatttaccccttctctattaatataaaacgggaaagcttttgccttccttcagaaaagaaaaaaaaaacaagaaaatggtgatacagctaaccgttccatattgatttcaggttcagtttacaacaattaactgtggtcagatctgactagcgagcttaatttgcggaaaatgacaaatgtcatattaaaatgtgcacaaattaacatcctatcggcctttatccatgttgattcaacgatcaagaagccttttctttttggcgaacacattgggaaacatgatgacagatgtaatgtaattctgaagaagaaaacatgaagccatacagctctggaggactattctttcatcatgcggtcaatgaatcgatggcaatgatgactgatgaatgcaagtgtgtgctcatatacacacataattgaatccatttattataaacaaatatgaatatatgatctcacaccctcagagaagagatatgtgagctgctcatagcaacaaactcagcaagtaacacacatctacacggacgacagacatggcatgcacgccgttgatacaggaaagaaatacacaaatgaaacctaatgtagaatctggacgaatcaatctgaatggacctcttggtggtcatcatggtttttgccctcccgttaccaggaggtgcacctcaggaatgaccggcagctccggcttcagtggccggcgctttcttccggctatggtgaaaatgggatctcaccgttcggcaacggtggcatctggggtgcatccggctttggtggttgttcatagtactctggctgtggtggttgatcaggttttggcggcatgtcaggattgggtcttggcggttggtcaggctttgatggcccattaggattaggttgtggcggctggtcaggtttcggtggcccattaggattgggctgtggaggctggtcaggtttcggtggcccatcagggcaaggttggggtggttggtctggctttggtggcatatcgggattgggctgcggtggctggtcaggctttatcggcccattaggtataggttgtggtggttggttagggattgatggcccatttggattgggttgtgttgattggtccggcaccgaaggcgcataagaattgggtgacccatcaggtttaggcattggaagcatatcaggcttcggtggcccattaggaatgggttgtggtggttggtcaggctttggtggaacattaggattaggcagtggtggcccatcagatataggttgaggtggctggtcaggtcttgatggctcataagtattgggcaacccatcaggtttaggcatcggtggcatatcaggctttggcggcccattaggattgggttgtggtggttgattaggatttggcaatggtggcccatcaggtttaggttgtggtggctgatcaggacatggttgtaccgggggaatgggtggcccatcgggtttaggcatcggtggcacatcgggcttattcatcggtggcacatcaggattgggcagtggtggaacaccgggtgtgggctgcaggggaggctgatttggatttggcacaacatcaggtgttggcagcagcggtggcggctgatcaggctttgggtaatcgtagggtggccaagccgcttcctgcaggattctcgccgcatcaccggtgagcagcagggcagcagcaagcagcaataagagcagtgacgaagtggacatggctatcttgcgagcagccatggctagctagctagctcgcaagctaactatgctaagctcaggaagaagaagatgtgtttgagctggatcggtgatgagaagccgatgctggcgaggtgtatttatagcctcgcggcggccagaatggtagctatcgctggcaatgcatgcactgtgggtgcacggttgggcgtcgcgtggaggcaagctcagctgcgtgttcgtgtcactcacactcgttatttactcctcgctgcatgtacaccgtccggttatgtacctgccaccgtgtgattgcatgggtttttggttgggttgttggaaaagctatcaagcgagagatatatcgtggagccgtacgtatgaataggtgtgcacacgagatcatccactgtatggattattggagcccagtgccccagtatatgttactgtacgtcgacgagatttaccgtgagatcgagcaaccaaatggccggagacgagatcgatgcatgcgtgcgtgcttcttctccgatgcgtgcagcgctaggcctccgcgtgcagacgagatcgtcgtcggcgccgtggccgaggtcgtggtgatcgtgaggccgttgggctgaatatgggctggatgagaaaataaagggaaaagtacacgcaaggtccctcaacttgtcagcgaggtacaaaatcgtccccgaaccgcaaaaccggacatccagcgtcccccaacttacaaaaccggtcacaaaaggtccctcggcggttttgaccccggttttgtcccacgtggcggctgactcagcgtgggacccacgtgggccccacaggtcatggagaccacgtcagcaccctctctctttttctcctctctctctctctccttccttcctctcgctctctgctctcg

SEQ ID NO: 7864 - DNA, 23677 bp, Oryza sativa
aattcctgcagcccttctctgactttggcaggaagcaggcggcaagtggggaggggacggcggtggtaggtgcggcggggagcgaggaggagcgaggttcagcggcggtcgtggttggctacggcgtggaggacggcggaggtcgcggcgggcaatggtgccgatgacggcggtgggcgacagcatcgaaagcgtagaggacggaggctgcggtgagcggaggcggcgggcgccgccacgcgggggcagcgggcgccgtcgcgcgggggccggcgggctgcgcgctgcgccacacgggggccggcggccgtggcgcgcggaggagaggcgggcgccgtcgaacgggggccggcgggctgcgcgctgcgccgcgtgggggttggcggccgcggcgagtggaggacggtggtcacggcgagcggtggtcggcggctgcgtgctcgagctcctctccatggcttctcctcgtgctcctcctgttcctagttgccgtgtgtggggatggtggagatgggttgtggggggcccacaattggccagccaaataaagtggccaaatttggctagtggagggagggttttggctagccggatggcttagccatccggttgaagaggctgttggccggagcacgtttttttagctagaatagctaaaatttaacttggagagtgggatagagaggctgttggagatgctcttaggagacgaaagatttatacaggttcaggccctctcaatgagaagtaataccctattcctgtccagggattgatccgccgagtgtgttattgatcgtataatctgggagaaaagttgtgcctctagaggcacccgaacccctcattatatagggggaggagtccgtattacaagatacagctcatattactaacggaatatgcaagtaaagataaactacaatcataaccgactaggactatcgaatgtttaattattattatacaagttaacataacaaccgagtcctttactaaagatattctaaccgtatatggtacccctatacccagtcggatatacatgccgtgtgggtacgaggtatccataatctctacagtatgcacggtgcattcactaggaaccatccattcgtaacggttggagttgttacaatccgttggtcaccgatgtgaagactcatatataactatggacctatttgaaaaagccttaaaattctaagaaatagctgatcggtaactatcttgtgagatcctggagaagctgagcttttcattttctgaaatctacaactacaacgtctcagaatctaaaaaaaaaactatttggtagaacttttgatccttgaagaaactatagttgtcaaaagctactttagtcatccggtggctatgcacctgggccatcctctacaaaccgggacttcgggatactattgcggtggtatcacaacgtttcgaccaggtagcacaggagtttttttttttacccagaagcatgggtggcgacctagtctctacggattgataaccactagtttctatgttttgtgatggggaagtcttcttaggtctagtgtttttggctgtgtgaattctatgcagaggctgggggtggattaagttagaatgtatcatcttggtgtattttactgactattaataaaacttccattatcttttaaaaaaagttgtcagaagcttccattatacgtctctgcttctctgcttgcttgcggcgctcgtgatccggcgaaggggcctgagccgctgatcggttggcaacgcgtcgtccgccatggttctagttccagccccatgctaggtagctatagctagctgctgctgctgcgtcgtcatcgcgagcccctgcctacacggaccacgctgtgagtgacgaccgttggctcagatcagatggtctaggttttactataggtttcgggcacctatatatcctgcttgatctgtttggtttgttgagtccatcctcccgtctcctcctcgctggttccattcctgcaaatgcataattaagcaagccagccactgtttttcctagtacatatatagagacaggccggccgggccatccactcacgtgtgtaggaaattaaacggcgaaaaacattggatgcactcagctaggacaggggcacagggctttgatgtaagtttgtactacaacttggggaggatacagttgatccagacactgcggagaggtacaggacaacaacaggatatgtgtgagccacacatcccacacaggatggatgaacagttggatgataacttgatcgcaatccgtcccatttccaataatgttctcattccaaccaatcttacttatatcatttttttccagatttacaaaaataaaaaccctgagacagacaactactgcctctgttgtaaatcaatctatgtacaggacgatatctagccaaacttttaaagcgttcaacaatttatagcttcttaagtgcttaatttaaataagcaaaaatatgggtagatttggctaaaaaagtacgtacattgtatttttagagagaagaccttgcggcccggtttatattgaaagccacattacgtcatacggtagagttggtaatgggggttgccagtttacaaaagatgaacaacttaaccaagtgactcaacgagtttggagaaacaccatgcgatcatcatgcaacagggataaaacctgcagctctaaagtagcaagcacctgatgtctcttagatctattacaaaacaggaataatacagaacattagcagaggtataggctacccaacccctgttcttcggatcttcaaagcggttgtcacatttttcaacttctctgcaaccatttccatctccacaacatccttagtgtgacaaagggctctccgcagcaaaagagagatgattcgaaaaggtaggatcagtggagagtacaacggcttggatctggaaatcatattatttctagtggtccataataaccagcaaacaaccacaaatacagcagtaaaaactctagattcaacttggttagaattgttaattagcaaaaagaactcatcaaaatctcttgttccccacccaaaagaatctctacaaatgcaccaagttaaagaggccatgaggtaggtaaaaagaatgtgggtggtcgatacaagtgccccacctattgacaaaattctgagcactcccagttttttttaattcttctacacactgcattttcacatctctcacacctctaaaggccattgcttcatagagtgactttgtggtgtatagtttattagctgataatcctcagatcatgaggtctggtgaattgactagtacaatctcttcaattatatatgtgacatcatactttctatgtcttcaaaagatcttataaaagataaacaactagcactctttgttaccaactttgagattgtgatgtctcgttggttacaaatctaaaaaatctttgggtatgtggtcttaagggggcaaggatcatgccagaaccatatatgtcttccatcctctagaagccactatgaccctagtttcatccattttctggtattcagaattctttctcgaattgtgatcccttttgaccattacattgggaaactcctctatcctaaagatattttttttctcaacaactcaacacacagactattgtatgaggactcaattttcataactcatttggccgatagaacagtgttcagcattctagttttagtcaagccaatacccccaaagtcttttgggaaagccaaatctgtccacctcaccatgtggtattttccgccctgtttgttaccagctagtaatacctcgccataataacttttgatgtaatccctcgaaaacagaaggtacttgtaatatcataaagtattagttttataagtttactttaatataaaatttatggtcaaagtttaaaaagtttggtaagaacttatctagtcaaatatttatggttggcggaagtaaaagaaatggtgcgcattagagaaattacagagcaagtttaacctttatggtgtaaacgtatgtactccactatacagtggaaaataaaaaagacatttcttacaataaaaaatataacgacataaatagatagtcccttcgactatttgagcgatggtagagagggccatggaactaaatattccacttgactagagcccgatcgagaggaacagaaagaagggaaataggagctatggtaagctgcagggtgtgtgtcaccggggccagcggctacatcgcgacctgcctcgtcaagaagctcttggaacgaggctgcatcgtccatggaacattgagaaatcttggtacgtacaacgtactccgatccatctctagctagccagctagagacctctcccaatcactccctgtttccaattgttggagatatggagataatatatctgacaggagatgagaagaaggcggcgccgttgagagagctccccggcgcggcggagcggctggtgctgttcgaggcggacatgtacgacgccgacaccttcgagccggccatcgccggctgcgagttcgtcttcctcctcgccaccccgtttcagcatgaacccagcagcaaggtatacgtagtcacaagctcgatcggaacacgcaggaaaaagatatcaatgtcatgtcatcatgtgtaacgtgggtaatttgttgattttgcagtacaagaacaccgccgaggcggccgtggacgcgatgcgcatcatcttgaagcaatgcgagcgatcaaagacggtgaagcgcgtcatccacactgcctccgtcaccgccgcctcgccgctccgggaggacggcggcgaggggtacaaggacttcatcaacgagtcctgctggactccactcggccagtctcacccatacagcagcgacatgtcggctataaatcaagtaatcaaccagcaaaaaaaaaggttatttttaaataattttttttaaaaaacaacaagatatatattgtgataacataagttagtacaacaaattagccctacacttaaagaaagaaaataacaaattttcatttacagtgtatttttttgttattttagtttctccgactgcagatacacgttggaagaatgtgtgcttaaattgctcctaggtgtactaatatcaatgtccatcaactaatggggtgtttagattcaggggtcaaaagttctagcgtgtcacattgggtattatatagggtgttgcatggggtgttcgggcactaataaaaaaactaattacagtatccgtcaataaaccgcggacgaatttattaagcctaattgagatgttcaaacgttcgatgtaactgggtgtaaaattttgaggatgggatctaaacatgccttaagtattccaatactgaaaacacatgcttcctagcgaaaatattcagaatataaatctgtgcttcgtaggtttacgcatcatccaaaacgctatccgaaaaggcgctgctgaggtacaacgagtccgagagcagggcgttcgaggtggtcaccctggcgtgcgcgctcgtcggcggcgacgccgacaccacccggctctaccacctgctcagcgtcccggcgatcgtggcgccgctcatcggccaggagtcttaccacggcggactcaagtacctgcaggcgctgctcggctccgtgccgctggcgcacatcgacgacgtctgcgacgcgcacgtcttctgcatggagcagccgtccatcgccggccgtttcctctgcgccgccgggtaccccaacatgaaggacttcgtcgaccacttctccgccaagtatccggagatcacgatcaagctccgagagtatgtgtgcccatgatcaattaatcattttcttgttttctcttttgatttttgtttgtttgtttgtttacatggtttattaattgtggaaattgctatgcatatgagcatgctcgtctttaattgatctataatttgcatatctaaaaacatatctctggttgtatataagttgtacaactagattggacgtataatattactcattaattttatatgtgtttgtttgtgaactcgcagggtggtaggggagggcgtgagggtgggagctgatacaaacaagctcacggatttggggttcagatacaagtatggggtggaggagacgctggaaggtagtgtggaatgcgccaagagaatgggattgctgtgatatgcggctgttgcgttgctcgttggtgtttagtaatttgcgtatgtgtagttggcaccgatttggacccagatgtgtttgtgcctttatgctaaaaaaaggttaattagatccataccattattattttgctagttttgaaaaataccattataatttatataattgaaaccatatcattgcagttattctgagattggaaccatgccatgttatacatccttttgtgtaatgtattctcgtatggaccaatatgcccttgtcttcttccttcctcagctcctttccctcttgttcatcttctctctctgtctcttcctccctcaatatgcagcaggtagagcttgaggtcgtctcgcctcttctcttgtgttgctgctcgtccatggttccacggtggtccagctcatagcgattccacggcagggttcactgataggcaccaaaagagaagcgacggcggcagggtcagggcgtgcgcagccgtcgccactggggctgagccagtccaaggcgttgttcactcttcttcctcctcctcccatgtcgtttctactgttgttgccgctgttggtcccgtatggatccataccttcacgacgagcttgttgctacagctcgcagccagatttgcttgccgctacacagctcgttgtctctgtaggatcagctctctgacgtgccgccgttgcagtacccgccgtctccgagaccttgctgctgttgtgacgagctcaccgctaccgtcgggagtggtctcgtgcaccattgattgctagaggagagagacggggcgatgaacaccgccgaatcctagcccctcgcctctatcgtcaccggatccgtgaccccccgcctaccccccttgcctggacgcggccggatatccgcatgtccgatctgccaagaaccgccgccggagtgaggggagcaagcggagtcccggagcaatgcccgacgctggtgagagggacgccgagctcctgcttgccgagagcgagtgagaaagaatgctcctgctgctctacggggaagagaaggaggttgaagacgggggcatttctgtcaagtgtatgtaaaatatatagatcaatggcatcattacaattacaaacaaacaaaagtggcatattttcaattaactgaatggtaatggtaaatttcaaaacaagcaaatttatactggcatgaatccaattaacccaaaaaaatactacctgtatctaatcgatccaaaactgcgaaatattaacacgagataaccatgtgtaatcgagaaaaatgtattgttgttgcttggttttgcattgaccggtctgacttctagccctatatgatttggcctctagtttctctaaccaaacagaatccaaaataagatcaacccaactgtttcatgtcatctcaacctaaaggttgacagattttgtttgtttattgtaatatttttgtataacaagaccataaattaaagagattcattgttcattttttgtttatttaactcagtattcaacaacgatttgttaacgtgattaatatttcacttattacaaacccaacaacttatataaaggatgtataccttgggcttataaaaggatttcttcatgcaaacaatcctcaccgcctcgaagtaggccactgtgttgatgttgaaccagaagtcatccactcttccctgactggttttcgatgtcggcgatgcggggggggggggggggcggtaggaggctctgcactggcaggcggcagcagatcttgtcctcgtcgacaaagcagacttggacgaggaaaaaaattcttgcagcagtgtcgcaccatgcctcatgtgcgacaccgcgtagacagctgacgcatgcatccaagccttctttagagttgagccgatgtgttgaaagactcaaaacaacaaaccaagccgaaaacttggggagccgctgaccccccccccctgtctagggatacatcgagccatcctcttcccgtcgcacagccgccggcgggggcaccatcatctctccaccctgagatccactgccgcctccatgcgtatagcttttgcacttctctccacagcctaaaatccaatccatcgattccaatttcacgcctccaacagaagggaagaagaccatgaaagggagaagatgccagatctgttgaagcagatctgttgaagcgaccttgaagggtgattcatggcttgtctttgcaatgtatcttcttgaaactagatttggaattgacgttctcaacagtctagcacatatataattcgcagaaggggcgctgtcgatatatccacattactcactatcttaaccttctccaactattttggccactcgggagatggtgttgtttctgaatttctggtgtgaataaagctctttggaaattttagtggtaatttgctgagtgttgctgaaaatggtgacttgttacacaacttttttattatgcaggaaaagagaaaggaaagctagcagcggccagcggcaattgaggagctggagactctgatagtctgtccagtccaggtaggtggccgcacggcccgatcaccagttcaccaaccactccaagggctccgtgcacaccccgctgcatctcgtcgcagtatgggcctgggccgtaatgtgccgcagctaaacttgccagcccagcccgttctgatgagcgcgagacactccagcctatcgagcggtcactactcactagcagttggaatttggacagcagcagcagcggtgagcgcggcggcggcggcggcggcgacttgctctcctcctccccacagtccagttcttacaggagacgaacgccggcgagccgcctccgccgcagctatggcttccaggacgctctccgtctcctccctcgcctccgccttcgcctccatcccccgccccaggccccctcctccgcctccatctcgcatccgcgcctcccctctctccaccgccgccgccgccgccagtgacggcgacgccgccgacggggtcgacaccgtggagcagctcctcgttacgaagccccccgcctcctcctcctcctcctccgcgggaaggggccggatcgaccggctcatgaagctgcagcgtcgcgcggacggggacttcccccccggcggggcgggcggaggtggttcccttacctggacgcgttccgggcggcggggggcgtggagctgactagccgggaggtgctggaggtgctggagccgcacatcatggaggcgcggcgggagcggatccgccgcgccgtcgagaaccggagctactccgtttgcctcgtcgtggaggggctctctgacttcgggaacgtctccgcggcgttccggtccgccgacgcgctaggcgtgcagtccgtgcacgtcatctcctgcgacaacaacaaaaggtgcagaggtgaaaccaaaatgtttaacttactcttcatgacagacattgctattgctcggtttggttgagcgaagtagccaagtagggaactatgaatagttgtagagaatgagaattatactaatctatttggatggatggttttagtttgatcccatgaagaaattgttgttgtgaacttctgataatgctcaaccatctaatttcagcatacagtttgccagtttgcatctaataatattctaatacactgaatctgcaatacctgattacctcaatactgcatggtattattctttttttcattgaggtgcaaaataaatgagaaatattttttgtgacctgtgcattttatttgtccattcagtagtttgtacaaaaatggcagaaatactgaccggaaggaaatgatccctcatctagtcatgtagttctaatatccaacacaaagagagtgattccttatgctaaattttttcctaattagaccactggattggtactgaagaacacagaacatttttctttcttattagtttttttatacataaattctgatatctgattatctgaatgaaattatatacgtattgcatcctttaaaatttgtatatatttctcaacttgcaagaccattgaatgaatatacttcttaactattgcaggtatagagacaataggcatgtgagcatgggtgctgagaaatggcttgatatcgaattatggagctcaactgcagaatgctttgatgctttaaaaaagcgtggttatcgcattgcaactacttatttgggaaatgattcggtaatttgttgttgctcacctttttagttttcgctcgtattttgaacagtaagccaaaaaagagtgattgtgatcattacatgcattgtcatttgttatccgcagtgaaagacaactctttttttttcttttcaagtaagaacattttcagtgacttacatagacaagataaaaacatttgttgtaaaattaggctagaaaagccttgaaatagattggtgtgtggtcgttgccaccaccaatgttgttgatcactgattgcagaatgattattgtcatctcctatttgagagtatattagtgaccgtttaggttagaatgaaagatatatttatctgtcccaaatacacattctttagtgaattggtaacttcagccttttgtgggattttgcaacaatgtaatactacactgtcattttctcaatatactttttttccgctctgtattgcattgaaagatgctttatcatttactgatctaagtaatacagttcaaggaataactatgctcgtaatggatctgtaggtttgtgtgtacgacatggattggtcgcaacctaccgctattgttgtgggcaatgaacttatgtagggctcttcctcttctccagatgcacatcttctcttgcaatcatgttataatgagtctcaaaagtatttaaatggaatgatcagatacgatgtcctcttttctacttcatgtatgttgtactttatcattacttttctacatcttttttaatcactttggggtaactaatctgacatctcctcttgcaagaaatctgcttaatcatcttgatgtatgttgtacaaaatggtttgcttagaagttttcctattacaaactagaaatgccatgtttgtttttactacagaagttccaaatagtccactgtgaaatttatatggatttataccttggaaagtaaagagagtactcagtatatcacactaacttaggggaatttatttttcagtatacttgtggagctacttgtatattaactagccattctacttctatggcaggggcataagtgatgatgctttaaagttgtcagacttgcactgcagtgttcctatgaaaggcatggtggattcttttaatgtatctgttgcagctggaatccttatgcaccatgctgtctgtgatcgaatttcccgcatcgtaagtgtctcaagcattactactaaatataccagcaggaagaataaacaccaaattcagtttctgctagtgggttgaacttgtctccaaactcatatataaattatggaaatgtataacaaccagtgaagcattttgtcagttttttatcctgacgatttgcagttaatatatccaaatggcttgaatcatcacttgttagtttcagtttcagctcactgatggattttggaatggtctgaacttactttcttttaagaaatgtgtctttataaattcacttctctgttcattctgtccaaatattccttcaaacaagggcactgccaagtgcatattctgcttaaaagttctttgtaaaaaatgtataacgaatactatcttaccagaagtttttttttttttaatgatagggtcatcatggtgatctcttgcctgaagaaagtagaatattgcttgcggagttttatttgcgccacagacagagcacagctggcatagttcacgaatatgccaaaagaaaggcaggaaacttcatggccaaactttgacaactatcattatagttactgaaggagaaatatacacaacctaggtattcattcaaagagatttgctttggcaattggagtttctggctctggcatatcatttttgacagagcagctggtaagctctttcatattccttatagttttccttttgctgtcatattatcgtatcagcattattatcaaatgctggaaggatgccacctacaatttcttttgtagttcccagtgttttgttattgtatatttgtattcctcaaaaaatattggctattcgcctattgattgtagtcttctctaaaccaagttgatagagatggtgtggaatatgcattcttttgtggtttccctttgactgctcaacttctctcttaactcatctttgtcagattggtatccatttaacatagcatgtgtttgttaaatcattttttcatgggttctaaatatcctcttttgaatgctttcaggtactccctccgttttttaattgatgacgccgttgatttttttctcacatgtttgaccattcgtcttattcaaaaaaatttacgtaattataatttattttgttatgagttgttatatcactcataatacttcaagtgtgatttatatcttatacatttgcataaaatttttgaataagacgaatggtcaaacatgtgagaaaaagtcaacggcgtcatctattaaaaaccggaggtagtaccatttttctaatgtttgcacatggtaatctgagctgttgccctcctgattactttttcttgacgaaggctttttacggagaggaactatcaggctgcttgaccatcatggtgcctcaagatgatgacttcagaacagaattttttgacaggactatgatctatcagagtatcaagctatcgcattatcttaacagatgacattactatttcagtcacattgcttgctacccaaatttggaagttgatgcaaaaactaagatgttgttttggatgctgacatataagaaaggatcgatgcagctttctctccgttcgctagaaccccagttgataatttttagagtttaactactgccttttaccgcgatgtgagacactgcactcagaactcaactctcttagcgatttaatgtcatgttttctctctcggattgttcacaataacagagctagagggttattttttggttattcaaatactctgagcggttccagaatttctgggtttttttccccatctcttgccttagctccataaataaatgctggtactataatgaacaaatttacttgtagtattgccaatgtgttaataataacaacaagaaaaaaaaatgttccatttaatatgatcgatcaagttaattattatgcacagtacatttcacagggccgatcgggcccacgcccgtacgtgggcctgggctgcgggcagacaccgcgctatgtgggcccggatttatgggcctgacatggctttcggctgcacgaaagatatcgacaggaggggcgcgcctccctttgcaagttgccaagttggcaaggtgagacgctcaagtggccaagtgggatcggagcaagttgctgcccgtggccggcgcatctccagatatacggatataccatgctcccgtggatcactcgtggatttattttctttattttttttaatggtataggtagatttcttttttagataataatggtataggtagatacagaaccgattactatattaccatattaccactactattgttatagacatgcatatataactatatatctgtctaattaattaccatacttcctcagttacatactaaataaaattataagatttggctaacttatttttgaacaaacgggaggaaccaaaaataaacttattctgagatgaaggtaataatgacatttttgacaaaacaaatatacaatggatttaatgaaatttgttcttctacaaacttgtttgacctgaaagaagtttgagataggattctaaaagttctgaacaagtttgaccacatttaggactataaacttgatcaacttgaagaattctaaaatatttttaaaagaaattaaactaactttgtaaaaatattacatgagcgtactccatccgtactcatttttctgtcactattaagcatcaatgtttcaactttaatcaatgtaataacttttacatatttaatttgttattaacgaggctatggttccaagtttatactacatttttttttgaaaaaaaaggacgagtggtaaaagttaaaagtaaatggtatggagtacatgtctacacaacccttgttataaaaaataaataaataaaacgtctgtacaagttgaagaggcatcaaccaagttggtagcctggttgtaggagtatttttcttatattgtattaatttcgtattataatacaccaggtggatactaccttagtccatgccaaaaaaatgcctagtacatgtcgctatcgccataaaccagagagatggaagagatgcatcagcaataaacattgggccgtacgatcttgcctgccatttacttttactctatttaatttaacaagctgtagttaaacaaactcataaatatcctgaggtggcccccgctcgacctcatctcgccgactactagtcgccgactggcccaggggtaatctcgtaatccctgagtcctctgcctcgctattccactaataaatgtttgtattttcaatatctggagtttaagcaattattaattttggcatttgaaacgaattaattttggagtagtatttattcctgtctagcactggtgggaggaaagatggatttagacatgaatttttaaattttaatcgaacaaataaaagaaaaaaatgatataaacacaaaaagaatctcataaacttttacaaaacaatgttactacatttcaattttccataagaaccaagtgaataaatcaaatataaatatttgtttgaagcactccctccatcataaacaaatctttaacatcgagtatatgatttgataaattttatattaaaataaattaataaaatatactcctaagtttgtaatattatgtacctcttttcgaggcaagtctacctaaaaccatttatttgttattattttttaaacaaaatattaatatgtggaattttgtggtaccaaacataaaacaaattttgattggagggattgatatttataagaatttttaattactctctctttcaaaaatataaacctaagattgaatgtgacatagcacctgtttgaattgatgctctacaaaaatattgatagcgccaaatcttgatcaaattttgatactaccaaaactttgatagggtaaagttaaaaatgaactggtttgaaacaaaaatatgctcataagagacaagttcatgggcaaagatagtgtttaatagagatgtttgctttgctactctcttggtagggcaaattttggtaaagtagcaatccaaactactttatccgttgccattcaaattttgtctaacaatacttgtcactctaaaatactacttatcctatcactcacatcttatttaaattctttttcttctacccctcaacgacctttccattttcaacaataaattatttgataaagacattatagtattttatttttttcaaatcttaatatgttaaacaactagaaatatagatatagccctgctctaaacaaagtgaggaaaatggcgatgaccaaaatgcccccgttccccttccatctgtcgtctccttcccctctctctatctcccctcgcctcgcttcctctctcccccggcggtggctcggctggttcctccccgctccgcctctcctcctcctcctcgcgcggcggccggcgagcttggccgctccggcacgcacggttcgggcagcctccactccttcccgactcccgcccttcctcccgcgcgcgcgcgcgcgcgccgcgggccggtgtgaacaggttttgggaggggggcggcgcggcgcggccggcctcgctcgttccgccgccgccgttggcggttcggcaccggaggtattccttcttctctctcagctctctccctccgcttcatgagccggcggcgtggtggtagcgtggagatccatcccggcttagtttgattcggatttcttcgttgcgtggcacagtactaaaatcagtttttgtttctttctgaaaaaattgggggttatggtgaatcccacatgcgtggtttagtttagatcgttagaactgtccaaaatgattgggtatagtttagtacctgatctatctgtatgaaaggcttgaccatttttattgatttgttgcgatgttggtaaccgattgctctgcatgtaactgaaatgccaatgtgatgcaggactgaagggagtatgaggaggtgagcattgtagctggagtgattcggttgccggaaatggtgctggtggtgaagcagcaccggtgcatgcactcggcgagctgcgtttgcatcaagggacacctcagcgaggacgcgctgttcctggtctttcgtcacatgaactggaaccccaggctgatcgccgtgctctcgtgcgtgtgcaagtggttcgacgaggtcgcgaagcaggtgctctggaaggagttctgccacgccagggcgccgaagatgatgctggatttgcattcgggtggcagtcacattgtcgacgggaactggaaggcgctcgggaagcttctcatctactgcaatggctgcacaaaagggggcctctttaacaacattcatgtccctgggcactttgtgttcaggacacgcttttcgaggaccgcgggcaagagtttcctgccccagcagtgtaggaatgatgtcttatatgtctcagatccatgcgagcatcttgatcaaggggatgaaggtgacttgggtttcttccgtggtatcttcatgtcgttcgccacctcaaaggttaagaagatgttgattgagaagcgggcaaggttccatccaagcgagtcatgtccctactgtaaggctaagctgtggagcatgttggaagcaaatatgtcgccggggagttcttctgccaggcttggtgcttacgaggattctgtggagtattttgtatgcctgaacggacatgtcattggaattggtacccttctacctctgtctgattctgaggaagtaccagaggagtagtaatcaggaacttgaatcaggtgatcatattttacattttctcttttgctgtcttgcaaagtataactttgtttatatttactgaattgaaactgcaaagcctgactttttattgactactggtcaagataaatatataggtatcttcattatgaatatacaaaccgaagaatatccagacattttttatgtccattcgttgtcagcacatttcttcattctgaatgccaatatcacttttcatggttggatatctagaatgactaatgttcaacagtagattgtgtatgtcaaactgttacatgcttaagccttttgtattcaactcatgaatatatgtggcttgctccatatgtgataactgatattactcctagtagctccaaaagaattaactaacatttgttggaaactatactatagttactttcatgtctgaaaagcttggttgatgatctgggaatatagaagttgtttgtttatggtctgtttaagggttgggttatggggcgctgatagcctgatactgcttttgatgttgcctccctgtgtagagaacgggtcctgaactggttagctggaatccccatcctttttttacctgttttcagtagctagttgtccctgttgtttagttttcgtttcttttgtataagaccttgttatgttttggctttcttcaaagggccaggtaatgaaatttgcctattgtctaaaaaaaagcttggtagacattactaattatacttattctcatttgtttacatggttgtgttatgcagtattcatgatccctggaccgactctacctaatcagttgccactcttattgcattcttttaagggttaattagatccatgccactgtaactttgccaaatcaaaaaaataccaccactattcgtcatatcggctacatgccactgaaaatttctaaaattggaacaatgccactgccgtccctttttccatccacctctctcacgccatcctcatcccgtcctcatccccttcctcctttgttccatcgtccatctatccatggccgctggaggttgacgcgagggaggttgcgaggaggtcggcgcgatggtggcggtggaggaggaggcgcgcacgggctgccgttcctggtgctcgcgcgtacggcgttcggggtgcgcagcacgcacttgctggcggtcatcagcgtgctcatcggttgcgggtggttcggcatcgaatcctggatcggtggccgcgccgtgttcctcctcctgccgtccaggctcaagtcgtaccagccgctgctcgcgccagtgccaggcctggggctgcgccgctggagttcgcgtgcttcctcgctttctgggccgcgcagctcggcgtcatcatgcacggcatggagggcatcagcaagctcgagaagtacttggaccatcacgaccaacattcccgccaacgtggtggtgccggcaaacgcgctcgtcagcttgagcccgcggaagttcacgttcgccaaggtggcgctggtcactgcgttgctcggcatcgccttccagccatggcggctgttcggctccagcgagagcttcatctacacatggccgttcgagctctcctccggcaccagcggccgctcggctccccggcgacctataactctgacggccatgagggcaaggtcgtgcacctgcatcgtcgaggacggcggcggcggcagctcccgagaccgagctcatcgtcgagcacggcggcgtcgccatgtgcgacggtggcgacgccacgttgcgccggccgggcacgtagcagctgcggcgcgacgggggtgggtggatgtcggcgaccaggaagtcaccgtcctcgtcatcgtcgtggatctccagggggaggaactccctcctcgtcgccatcgtcgtcgttgtctccggcgagctcgaaggtggcttacggctggcgttggccgtcggccgcgacttccactcctcgacgctctcttgccgcggtggagcacgaggagcaagcccgggggaggaggcagccggcggcgtcggcctcctcgccgaagaagaggaacgaatggtcggccggcggatgggaggccgttgaagctcccggcggatgcggaggccgaccaggaagccgccgcgcgctcccgcacctccgcgacctcctccgctccctcctccactcccccgcgggcgtcgccgtacgtcttcctctctgacctcctcagccctcgagcgctcgctgtggccgccgagttcgcaggaagaaagaagagggaaataacgtgatatgacgccacatctgacgggggaaacgagacggcgtgagataggagatggaaaaaggaacggcagtggcatggttccaattttataaattttcagtggcatgtagccgatatgatgaatagtagtggtattttttaaatttagcaaagttgcagtggcatggatccaattaacccttcttttaaatgccattagaaccatgaatgctctttattaaaccatagtttgaggaactttcatattcaaaatgatccatgaagtgggatgatcttatccatgtcagcaatcttcaagttcattaattattgttttacaaagctgctagctaagataacaaagcagatgtacaatctgaaagtcaaatgcagagctatttactttagtgatagtagtatgaacagtggctagaaaatcaatctacaattgcttagcacaagtagttctgtccttctgggaccataattttcccaattggttgaaaatatgtttctctcaagaaaaaaaaacaagagtgttctgaacaagcgtttgttgctgacaggtttgcaagactgaaaccctggattcgtgcatgctgttcgttgctgaatctttggttgcgactaacagtgggagaatgcatgcgcaaggcgacctgcaggtctgcaggatgacaagaatggctttgcatcgcagtgttgttcttcctgaaactttgcatcagatggggaaaaaaagctatttttatactgttctctcctttatcattgatgcctcatccctgcttcccctaattgtaaccgagacaccaatctcctgtcatgtcctatatgttcacagcacgtaatgtggtgtttatttagcttaattggactgtcaaaaatataaaactggtgctcatcacatgcatttcattttcctgtctgttcctgctgcattacttttgagaattaaggcatgctggttcattgccatacatagccttgccatttttttcggtaatggcaaacattggtcattgcaaaaataaaaagaaaaattggctaggtcttcattcgttttgcaaccaaagtcgtattcccattcgtttgagcaactcgggtcagattagaaaatgtcattagcgaatgattaattaattattaatcattataaaatttgaaaaatgaatttactttacttttaaaataaaattcttacttataatttggctcggttgggtttgctgtctttggaacacccattctgtcctttagagtttgaaacgttttctttccttttttacttcgttcaccacaaattaccagggattcaaacattcaaaattttgtatgaactactttgtattatctcctctatttcccgaacccaaacgcagctttggacgcgagattcctaatgggcgatcgatcgccccgagcgatcacccctcctcatggttttctttttttggcaccgcattattttcctattttagtaaatttatgcatttaaaatttgtacacctcaaatttacacatcaagtttagaaacccaaaatttataagttaaaagtttatatatcctattcaaatttgaatttgaattcaaatattttttatatatagtattttctatacatctaaagtttatacacctcaagtctatagacccaaagtttataagtcaaaagtttatatatccgattcaaatttatatattcgatttaaatttaaatttaaattcaaatatttttttatatatagtattttctatacatataaagtttatataccttaagtttatagaaccaaagtttataactcaaatgtttatatacccatttaaatttgaatttgaattaaaaaaaaaagtagaaacactggtcggggcggggggagctgggggaggagaccagcgagacgacgcgacgaggcacgtgaggtcgagtcgaccaggatcgtttgatccgatgtagataaatatagagcgttggatggatttgatgattgaagtattacgtaataacatgtaaaattgtgtgtgtgtgtttttgtagaactatgtaaaattgcgttggtgattcatttgtgtttagagagctctgctcaatactctgattcatgtgttttcttttacataattctcacaaattttacacagatctgttgattcatgcgtgtttttttttagaactatgtaaaattttgggcctatttggacggttacctaccaatttttttgtagtgccaaaatacaggcaagttttggcactaccaaatttttggtaaggtaatattgtttttgatcatatttggtttgctaccaacctagagccaaaatgtgaaaattatagtgaagaatattctagatgatgccaaatctagattaggtattaccaatgaatgtgcttcaattcaaatcaaacacatgtactattcaaattaccaaaatattggtagggcatgtttttggtagcaattcaaatagggcatttgtgtgtaagaactctgtagctcttcccctcccgtccacgccctccgagagaattttgcatatgtacctcagttaaaaaccggcttcgctacaatgccatcgtttaaatgggattcgctcaaacgccatcctcaagatgtgggtgttcgctacaatgccattttcaccattggttgcaattccaaaccattttctactaaaataattttttcgcggaccgttttgcccctagatctagttgaactgaaccacacataggggacgctaccactgctgcctagacgcgccgctctcctctcagcgcgacgacgcgacctcctctaccgccatccatgccgtagccttccccacctcgcaccgtcttccctcagctcgccgctgccttccctcacctcgtcgacgccttccccacctcgccgccgcccaaaccgtagggtgcaccgggcgcctcttccctgtggtagcagtcgccgccgcccaaacagagtatgtccattgagacactttgtgcaatgcatcgggggaggtggcgtgctagcaggatggagacggtgttgacgaggaccaggatgaagacgacgccgacgaggaccaggatggagacggcgtggttggggtagctgcgccgccgcgcagggaatcggctctaggaggagaagcagctcagctggggagagaggagctggcgccgcgacctagcttttggaggggtgagttgttccaggggcaaaacggtccgcgaaaatattattttggtggaaaatggtttggaattgtaacaaatggtgaaaatgacattatagcgaatgctcacatctcgaggataacgttgaagcgaattccatttaagtgacggtatcgtagcgtagccggttttttaaccgtggtacatgtgcaaatttcttgccctccgacgaccaaaccaaaagcccgcccatttcccgaacgccaaaccctcctcccgaatcctcatgaatccgcacactctagggtagtgtaggaggtgtagtagggtagtgtaggaggtgtagtggagtactagttgtagcccatggggatcacggaggagcagcgccgccgcatcgaggccaaccgcctcgccgccctcgagaggcgcaagcgcttcgcggaggccgccgccgccgatgcctcggtggggtggaggctcgccaagtgcccaagattcgctccgcctcctcctcagccgacgctgcctcctcctcctccgcggacattgcctcctcctcctcctccgccgccgccgcagccgccggtggggttcaaagtggtgctggaggtgtgcggccccgaggatttctcggtggcggtggggcccgccgagggcttcgcctaccccggcgaggccgagtgcctccgcgccgtccaagattgcatctcttcggtacggttcatccgttcttcatccctttcttgataatatatatgctgctcgacaaactcggtgctttcttggatacctcggagcgtttctttctcaagatttcgttaatttttccccgtgtttcttggcgacagcttagcaagtccgtggatatttgcaagcatttcttgaaatatcactccgagaattcgg

SEQ ID NO: 7865 - DNA, 46613 bp, Oryza sativa
tggcgacagcttagcaagtccgtggatatttgcaagcatttcttgaaatatcactccgagaattcggtgactcgataaagatagtctctccacacacaaacgatgaaccctagtcccatttggattactttcgtcgggagtttgttgggtgaaccctagttctaaatgtttaaagtccctaaaactggtaaatccaaatcgacttgttctcatgtctacttgtacccatcaacgggctttcccctttcacatacttgaccaattatctcgatatatagatgcattatgcacttaaacatgttcacaggcagcatatgtagtcgaacactgaaagcgttacttactggcttctagcaaggccattaaaatatacacctaagttttatgggtaattaaggccttattggtgccatttgagtctttattatgaataacagaaatttatgcgtcttctttatttctattcgatcttttttcaataataatgaccatgccactaatttttctgagcaagatgaagagccttcaaactcaatggttataagcacaaaatggggatgcattatgatgtgagcgatattacaattcagagctatttttttctaggtgtaaagtaatgagtagatttcaagcataaaagaacaaatatttactgttctatttaacctattttgattggctttctgggatgttatgttcttgatctagaattaaaactgatccttcccctgtattgttggtaaggctgcaccattctctacaacacaaagtcaaagtggccatattttctccgtatttaagctcatggactatgagcccgtgttaaaatgcctgaagaagttgcctggagttgctgtgcaagatataccttacaaaacaaggaatgttatcaagaatctccctaagttctttgccgaaagctgcgcttctgataaagaagttgacgggcttctcatgaagttgccacaacacttacgagatgcactcctaccctttcaacttgaaggtgtgaagtttgggcttcgaaggcatgggcgctgccttattgcagatgagatggggcttggtaagactctccaggtgagcattttacatgagagcatgcaaccattgctattctgtatgactattgtgcacatgaataaagtattattgttgaaaacaaggttttggagcctacataatgctgaagtttgggcacactgttaaagcatgttactgtttacaacactaataaattagacttatatgaatattaaactgcctgaggcattgtaaggggtctttttttcttcttctttcgataatacaaagaagcacagctctcttgcgtttttgagaaacacagcttatatgaaatagcaacttccattttagtttcatttccaaacaattcttaataaaaaaatgttttttagagcatatgaataattgaatgaataggcttttgagcgtccttttttccctgtgaaagcagcacattctcattcatttaaatgcaggcaattgcaatagcttgttgctacaaggatgagggcccagtgttaatagtgtgtccagctgttttgcgttatacatgggcagaggaattggaacgatgggatccttcatttctgccaaaagatattcatcttggtaatcattcaacctctaatagtctttacagtttgttgatgtgaaatctggtattatgattattgtaaagctctggtgtataaaactcattttgcctttgatagttgtgaagtgctgattttatctttgcccgcattttcattactgtaatcatttagggtcttcaatgctttctctttactctagtttgattccagtaaatatagtttttaaatgaaaagtatagtatttttcacttttcaattaaaaagcatatacattctatttctccaaagactgtagattgtattatttttaataaatgttgcatattttatatttgatgtattgaaaattctgaatggtggacattgagaaagctacattcattgcgtcaatccagttgaaatgcttcaatatagagtaacattacagattagatgacctgcttctatttgttgattgattcactctactttttttttgtttagttgaattaacttgagattttactgaactcattgtttcctaggatcagctagaggttttgtaaatcttgtagtaaagttgcactagctaaaaatgaaatgctttcatgaacagtatgaaaggaattataatgcagtaaccaaagattgattgtattgacctgagttgaaaattgtgaacttcagccctaaacttaggtaacataagtattttactcaagtttaccagtgcgcttgaggtttaaatagtgcctttaacttttggctgagtcacatatgcaatataataatttgattcttctatactagtgaagaactgaagatactgtttaaaaaagtatggctaatatcatatttcttgtcacttgtccttcaattgtatattactactttatttagcctttcagttttgttatatacttatttttttaattaggagcacaattttaacagttcggttgtcactgtataattttcagtgtttggtcaccaagacagtcttgaacgtttaggagcttgcccaaaggcagtggtcatttcatatcagatgctaagccgtcttcgcaaaagcatgatgaataggagatgggcactgatgattatcgatgaatcacacaacatacgctgcacaaagaaaaaacacgaaaaaaatgaggtgtttaaattattagcttgtcatgcaacaatcttatgtatcaatacaattaacataaagtattcagctcttgaattctccaatccatgagaccatgatggtgatttggtgctttgtaaatttggtagatcatattttattgtgctagaaacgcctcacttttttttaaaataaaattctcccagttgattttattgatctggttatatttttcagcatttctccctgctttctaaaatattgcaatgcacaaatgttgaaattatctcaaactatttattccaactacttcagtcaccttgtgtatcaatattgcatttgatttcactaatggtaagtgaccgttggtactattttatgacctcatgacagacacaggctgtactggaactagcgccaaatgtcagtcgcattgtgctgctctctgggacaccctctttgtcaaggttgtaactttaaagatattggttgaatttctcttaaagctccttatgctattgtgctattttactccttgatatctggatctccaatcatgcagatagctgctatgatatatgacatattttgtgtacatcatctaaacggttttaaaattccagaggtgggtgtggatagcaatatccaagctacctgcgccttgtaattgagaaaagggaatgatgaaaactttatcatggcccaattttctgaaattttacagaaagtttttttttttgtctattactctttcaaccattttttgttcatctagtgtatttgtacttacccatattattttcaaatgcattctctgcactatgttcattggttactggtcattacttgttacttgcaatatcttcctttttccatatttggctcgaagtctggctgtttgtaccgtagagatttagagcactcaagtacatttttgtcattcctatatgtttccttctttacttgattaatctgatttcttggtacttatgtatggtttacttatgatagccttgattggagacttctattttgcttgtcagatctatctcacagtttgttttctcctaggagacaatagaccttttgacatctatcatcagataaatatgctatggtaaggaaaaggtgaatgccattgtattgtgttagtcttatcaaacttttctgatcacacttccctggcttttcaggccccatttgcttggcagcaataaatttgactttgcgaacaaatattgcttgctacatactgttcaaggctgcaatgggagaacttaccaggtattttgagtgtccggtttctcaaggcagagttccagcttttctattgctaagctctactaggttgttactccctctatttcacaatattgttctggtgtacatactaagggggcacaatattagataaatgtggaattgaactattgtttttggtggaattgaacaattgttgctttattagatagatgtacaagtactctatctaatggcatcaaatttggtctgattttatcaactgtattacgattttatgttttcttgattattggaccgaggaccagatatataatgcgaaacaaggagtatttgcttttgtgtaccatctatgctgcttatacactaatcaatcagtgaactgtgaaatagtttatgaaaaactcagaaaaccagtgcttccaaataatttttgttccagtagtaggagcatatgtagataaacatttgattctgttgagggctgtcaccatttttctctctgcaggatttttcaaagggtgctcggttgacagagttaaatgttttgctcagtcagactctcatggtctgttctttctctctattatttatgcctgctatgcatagcttgtttcgttcattttattcatgatatgttatctgaatgtggtattcagactatccataagtattattatgggaaatatgaagtgttccaaatgtgttatgttgatgatatttctccttgaatttgtaaatggaaaaatcagtactgtgacacgggaagttcacgagtttagatttgtaagtacacgataatactgccacaagttttcaaatttcccttttataccatttctgtttattattaatatgcttgcaaatattgtagttgttttgtcgccacaacccatgctaaccacatgatgtttttgtctggtaattgattgttcatcgaccattctatgtcggatataacagatgatgtttacttctgtgctgtagattaggcgcttgaaggagcatttgttgaatgaactacctcccaaacgtcgacagattatttggttgaagctgaatgcatcagatatcaagacagctatatcttgtatcaaaggggtgaacactagtgatgagattcctacaattgcctcgccagacaatagcaatgactctgaggaggtgaacatggaagaaggtaacactcattgagctaatggcagatatgataatgagacctccttgtatcagttataattttatgtgcctttgttatgctgaaatatataatacacaccttgttgcatttgaatgtttgatattgttagatttcagaactataacaaaatgcaacaacttatatggaactgtaattttgttgaagcttgcttggcatttgtggcatatgcaatgccaaacatgtatgggtttacagctttgcatattggcagttggttatgacataagcaatgcaatatggcgcagtatggtattgtacttgacactgtctgaatcgaaatttatttacaacttcttttcaaaaagagccattttcttatctatagtaacagagaacatttgtcaagaaaaagataaccagcatttttgttgatttctgttctgaagaacactatgtatatcaagtagaaatgttggtgcaactgtgcaatatcctgttgtactttacaggtgaagaacattacttgccatttccaatcattgtacttatttttttttaaaaaaattctgatatgttaaacatgaactaccatgatcaaaacattatgtttctttttgacaaacaaccaggcaaccacctctttttaagagtagcgtgccactttaaaggagacaaccttcctctttttatccttatgtaacatgtttctttctcataaacaattattaatgtaacaatgttaaatgtaacactggtattaacacttgggataaagcacatgttttctactatttcagggttcaagattagtaagattggtctgtctgctccttataaacattgtgctcatttccttgtatttccttttcatttgcccacagctgatggttgcaagaaatctccaaggaatctcactacacaagaaattggtattgtgaaaatacctgggttcagcgagtggttcttaaatcatttcatcatgaaagaaccagctgataatggtagtctggactctcagtctaattgccagaaaacaataattttcgcccatcatttaaaggtcctagatggagttcaggtaaattctgaggtttcttttctgtattttttttgcgagtttatcatgctatgtttctcacgattgacaatagaatcttgaacagtaagaaaagatttataatcacaactatgttactttatgtaattttgattttgcaagtatcatttcaactatttgtagttctatatatcttgtaagcttcacttcctcctaatgaaatagaagtttcatctttagagtaaatgaaacaaaataaatgatgtgtcaagaagctggactataggatctcatatgaatagaaacactggtgtatgtgtaaaattggtctggccatgtacatgtcattggcaccgttttttagaagccaccagtaccatgtccagcattctggcattctctagcatataatactctttctgtgggactgtagatgttctcgtaatggtttggaagttttttttgtcgaatacgcaagatgcatatcattgcattaataggagtccaaacacgccaaagaacagcaagaagtacaagacctcaccaccgcaaaacaacccattgcaaaggcggttacatgaccaaaaggaactaaaactaaaataaaatgccctagctggggtccataattagggagagccccttagccccgccaaattacataggccagcttcctcacttgctaacatcaagtcggttgataaacttggagatactccattgaagacaatcatcccattgccgccatgttcaagatagtccattaatcagttgaatacatggaaaaaatcagactaatgatcaatcggatattcgggtgcacactttcactttataatagttagatagcattatatcatattaaactataccatctaactttatgaaaaacatttgccaatacttttgactgaagtttttcttcgtacgtaggtgtttgtcacagagcagaggatcaagtatgtccgcattgacggaagcacatctcctagggaaaggaaagatgctgtcgattctttccgtttaaatccagaggttgtcccttcccttccattcggttcgattcatacttggtattccatgttaagctctcaagttttattctcaaactgcctatccattatttactattttactagttcttttattttctaccaaataggtaatggttgcaattattggaattactgctggcggtgttggtttagatttctcatctgctcagaatgttgttttcgtggagctcccaaagtcagcttcagagttgcttcaggtccttagccttctctcttgcacatacattttcctcatccatagggtacaagaagacttttgagttttttttcaccatcctgttgtgtagcccaccattcacaattcgcactatgatattatttatatgtactgtagcaactgcagtattattcactgggcctggtggtgtagctttaattggaattcagagataagaataattagttttattgttgggtttatttctttatatatatgtaagtttctttacagatatgttttccatagggatcaggtcaagtcatcccctatcagtcgagcaagaagaaatgtttctcctctatttgcttaaaaacacttattcctatttgctctcttttgatccctttacgcctcttacccaatctgtctattgcctgcttcaaatgcaattctgcatggtctttatcccgatgtggactaagattatctggtaaatgaaacaaatcaataatgcacagtaaattgctacatttcatggttcatgcgcatgagttttcatgctttcgcacacttaatgtgtgtgctctcttggacgcatgcatggtgcaccctactgttagtgtttgtttattgtgtttctaactgtttggtacatttgattgttgatgataggctgaggatagagctcataggcgaggtcaaacaaatgctgtcaacatatatatattctgtgcaagggttagttccttttttttttcctgtagcgtactttgtaattttgtcaaattataactataaattgttctgttttgtcttggtcacagaacacattagatgagtcacattggcttcatttgaaccagagtctgttccgtgtctcatcattgatgaatggaaagaaagatgctataagagagattgaggtaggccatagggtcatgtaatttttgattttatactgttccttagggaggttaggatgggcactacaatataagtgtagtattgtttggattgaggtgcttccatggtccgtaacaattgacaaaatgtaagtatgcacccattgtttggagttaggtttttctatagtttataatgcgacacaccacataactttagaaatttatgctgaatttgtactgaatgtttgcatattcaatcttttccatttcatgtttggtgctgtaaaagtagaaaataatttacaaaatgaaccaaaatagtttaccagtactataaaagtctgatgccattaaacttcaacatttaacagaagggattgatatactactcaatatacctttgcagctgagacatagtttcttatatcactgctggaatcaattggcttagtagaatcttgttggttaacagaccaattaagggactgcattgttctacagtatttggtgtttattcattcaatatagtttccttctttctaaggttgatcaagtttaccaccttgaggaaagcagtaaatctgagggaaaatcacagcttggatttcttcctttggagaatcataatgctggtaaaacatctgaacatcgttaacagagaattcatgcattggtaccaatcattattacatgcttgtaagtgaaatgaaaggctgaattttttgaacctcatgcagattgtgggcatggaccaggagagaatgtagaaagtgatgatatgtccattgagaattttcctggcctcaacgatatgaattttgagtcagatttcttcagtattaggacaattcctcttcactttgaggtagaaaagaggcgttccttgcaaattttggtacatgtttactacttgctagttgctacttatcagtcagtagtcctatgaaatccttcaactgattctttttctatgcctcctcaggatgatagccttcatacggtaatgcaaaattgtccatctccaacagcacatgaagagatagcttttgatagttcttctatctctcaagcttcagttatttgcccttcaatgtcaagcgctaaatcagtaaaggtaataaaaagttcttgcttgtattatacaatgttttgcactatatcctatgcaacatcacctcaaatatcgcaggctcgtcggaggctttctgaaatttttcagactttaggccttccagcaactacagactgcaatattgaagagaagtttctgcgatttgaggtttaactgtcctctctgttcatattctgttctcatgacttgtctcattaatgtgaagttaatttcattttacattccattccggtcttcattctttgaattcatttgatttatcttcgtattttacaggttagccagcacacaggccgaattcatttgtacatatgtgttccagggcatgattcaagacccagaccactttttgaaaacttcctgccagaagaagtagagtcacctttatgttctgataataccatgaaaacaagtaatcgtctcttgaagagggatcctgcattttgcaatacgttcaaagcgttcgtgaaggaatggttggcgcttagaccaattgagcagaagagactactgggaaagcccttacagcttcccttgagccttgagttgtgctacctgaaagataccaacaaccacagcacaaaagtacgttcctcttgattttgagtgatcaatttgaatattggtttaattccaaatattgcagaaaatatgcaaaagcaacgcttccatgatattaagcatatctatgttctatctatatcattctttatgcaagtttttcttatgttctagaaattgctcaagttctatcaggatttactctaatagaggatattgcaatgtttgacttttactctaatggaggatattactctaatggaggattcaattggtgatttggcatatacaaaaaaaaagcaaaataaaactgcagcttttaagctgctaggcccaccacagtgccacactaccctaggcatctcattgtagctaagggtttgcttgtgagctgctatcatatcatcccgatgtattaatttttcatttgaaatacagtttaaaggatctgattttgtaccaaactaagaacatgaaatgaaaaaaaatatgtcttggcattccttggtttaatcatgtttattttttgtcaattgtgctctacttcataggggttgcttaaaggaggaagtaagaggcgtgtaacaccatggtgtgatattagtaatcctttgccagaaaatgctgaatggagaaaggtggttttgcataatggtacaagtagagagagagagtacactcaaggctggactgttcacgatgaacctctctgcaaattatgtcaaggaccttgcaagtaatatgtctcatttgtgcactttatttccagtagccatctgtgttttttttttgaaaaaaaataacaatgttgttatttgtgatcagtggaaggcttgcaaagtcacctgaatattttgaagacctgttctgtggtctgccttgcttcgaggtgttcagatcgagaactagtggcaggtttgcacggcaggtgagatttttctttaatcttctgcaattagcattcataaacaaagtgttaagttgcattatttatgaataaagctggtatgccagctatatgtgaaaatatggaagttatatgtactaaagcaatgcttgcctgatgaataggcactatttgaaattgaacatggtatatgctccaagtgtaaacttgactgtcacgagcttgtcaagaatatcagaccattatgcaagaaaaagagagaagaatacattaggaatgttgctccaaatattgcaagtagattgaaattgtaagtgccatactttgatattatgcttttcaatgttttgtgcttatgttaacttctctttgcctatttaggcaacttacaggctattggggacactattgtggtctgaactcacaaaatattaatgaatatgagtagttctcctaatttgtagattgatggtgacactgtttttttcactatattttaccacaggctagataagcttgtacatgagccaaatgagggtaatgcttggcacgcagatcatatagtgcctgtatataaaggaggaggtaaagtgtgtgcataatttttgcgtgcttttggctcttaacattatggtctaatttatctgatctcacgcaggggaatgcacacttgagaatttgagaactctttgtgtggcttgtcattctgaggtcacctgtgcacagcaaaaggagcgaaaagatttaacaaagaaagctaaagagcttctgaaaaacaccgtcaataatcagcagaaggatgaagttagtagtcctgccctatttcaaactttttttgaaaacatttttcctctgaagtgatgccatctctgaaattattaagattacagtaacacagtgactctcctgtgcttactgttgatactttctcatatattagcttctgttactattgccagttggctgtcatgccatttcttaagcatggtgaagaatgataattttgcgatcattctacaaggcaaatcatctactgtctccgttcagaaatataaggcatattttgactgtccaattttgagctttgaccaactattaatctaataatatttacattttgccatgaaaagtgatattataggattttgagtatgcttttgtatccgtaagtgaaataatgtaaggaaactttacagtcaaagcttgtcttttggatcgtcaaaatacaccctttgtttttgaaaaaaaaagggtagtaaatagcttgatctggataatgtctatccctttatgctatgtaagattgcactcactgacttatttcctggactatggttccaattgttttttttttctttttcccattgtaggcaagtgaagcagcagaagaagatgataagtcgttgcttgtcgttgtccctggtagtgcctactcctgagttgggtagcgtggttctggctagagcatatgtatgtagattacagttggacattcttccaaagggcaccaatattttgtgcatatatttgttgcgtgtggccaagattgcaattgcactcatgcattatgattgcgatctgcaaccgtcttctgtttagtcggggcggcattttgggctgtgtaaggaatggttgtgaaagaagaaaggaaatgtcaattttgttttcagtttttacccacacgaaacattggagaactgccacatgtttgtttgggaacttttttatttttaattttattaatagacttttacaaaaaaaacatttccaaggttcagatttggaaatgcttgttgggatgatctattaataaaaaaaaataaaaaagtctaaaaaataaaaaaaaaactttgtttggaggcaaacttgtttgtacattatgggtgcgttcgttctgggggattgggtgagaaagggacatcgtattccgtgcgcacgcttcctaaactactaaacagtgcattttttgtaaaaattttctataggaaatttgctttaaaaaatcatattaatccatttttgaaatttaaaatagttaataatcaattaatcatgcgctaatggctcacctcgttatcttctcaatcttctctatcctcctctcctcaaactcaccctatatataggctgtgatgtactctcgctgtcccaaattataaagtctatatttttttacacggtttttaatgacatactttaaccattaatttatctcatattatgtttccaacaaaaatgaaattagcatcacatgaaaatactttaaaatataaatataaatctagtgatattggttaagtgtaaagttatcgagtctgattttcctttaaaggatgtcctataatttgcgacaaatggagtaatatgaaaacacaggttacaatcgtaactgaaaattattgatcaactggcacaactacctccccgatttgcgtgcaactataaactacatggacgatttgtacgtactcaagtaaaaaaaatctctattagaaatgatcaaatctcactgacttgccttcactgatcggtgcagaatgtgctttaataattttacagtgatcaaaccagaagcaaagctgataaccacgtctccatttctcagagttatcaaaaacgattaaactcatgatacaatgcaaatgttgttcatgtctgcataatctacgaactcgcgattactagcacgtgctaattaagcctaggcggctaggccgcgcatgcgggagccttgaattccgtgaacctaacgaacgcgatgccgcgcgccgccacgcgcagcggcgccgcgcacccgtcgccgacgacggccggccggagctcggggatctcgccgcccgggccgagcgccagcgcctcgccgttgagcagcaccacctggctccggatgtcgccgccgagcgggctcaggtggtactcctccctccgcccgccgcacggcgccgcgccgagcgcgccgccggccaccgacacgtcgaacgccgtcgcgttcgacaggttgatcaggagcaccgtcacccccggcttctccctcgagcagtgcgcgtacgaccggaggtacggcgaacctccgccgccggcggtggtcgccgccttgaggaccaccgggcccatgaggcggtgccagagcagcgcgccgtagtagtcggggttggggacgaaggtggtggtgttgaggaggcagtagttgccgccgacgagcgcctggcggcagtacaccctggtgccgtgcgccgccgacatgccgagctggtcgaggtaccagaagccgttcacgtacctgtccgacacgcccttcccgccgctgttgtacgcgccgccggactcgcccacccacggcgagctccacggcccggagccccgcaccgtggccgccatgtcgcggaacgtcttctccacctggtcgaggtaccccgggtcctgcatcttcctcgccaggtccctgtccttgccggagccgaggttgtagatgtggtgcgtcacgccgtcgacggcgccgcgccccgacacccgcagcatctccgagaaccacgcgccgtcgtagaacccgcccggcgcgagcaccttcggcacctcgccgccgccgccgtacacacgctccaccgccttcctcagcaccgccacgtcgcggccgtactgcgccgccgccaccctcgccgcgacgccgctgccggacagctcgttgccgagctcccacgactcgacgcggtagcccttgccggcggtgtaccgcatcaggtcgagcgcgttccgggcgtcccagtcgccggagtacagcgtgtccttgccgccggcggccttcctccggcccttgagcgcgttcagcccgaacgtcaccgtcgtgctgcacgtcaatcaaatcaaatcaaagataattagtcatttaatcctcctcgaaatggcgattaattagccgataattgcagtttaattacttggttcttttgaagaagacgttgagctcgtcccatcggttcatttcaaggcagccgtcggtgaagccgaagaggccgccgtcgtctcgctggaagctccggcaatcgccgtagttgctgccgactttgtacgtcacctggtcctgaagagaccctccgagcctaatcctaagcgagttgaacgctgcaacatcacataaaactctggttaatttcagtacaattttttttgatagatcagtgatctgcaaattatttacctttgacagcattgttcagaatagtgttgttcagatcctgtgagggaagaagagtgacgtgctcagtgtcagttagaagtagattgatccatatatgaaatgaaggtgattaagtttggctaatcaagtttcaggggtggtaattaccaggttaatgatggaggcgttgtaccaggggcacatgccgtagttgcacttgtccctgggccaccagtcgagcgtcgcgcagacgaagttgtcgtcggtgcgggagacggccgccgccgccttgacaaccacggtggccgcctcgccgccggcggcggcggtggaggcggcgggatgcaggccggagaagaggacgaggagggcggcggcgagcaagggaaggacggcggccattgttccacagagtgtttacttactgctcgtccagtgatggtgtgaaatgagatggagagctacatgtatataaaagagagattttgaaaagggataagattttggcgagatttggatttgttattaggtgcagagttaatagggatgagctgtttctcatgcatccatgcaaacggtttttggatttggatgcaaatccatcggagcttagcttacgcaacaacacacctatgagttagggagaagtggttggatcttgaatggatggatagatggatgaatcgatacatggatatgctgttcagtggaaacgcaaagagaggccgaagaaggttggcgaaatatcatgtgaaaacatgggtttagtggaagtttttgcttcacttcaactctcaaacgattgtgagatgagcgtttgttatgcatacgtgcaaaatcaagatcaaaatcatctacattttgagtgattttggctctacgatcgttataactcaagcaatataactattgctgagaatcccagcaacatacttaaagtgaccaatcgagtgataacaagttcactcaggtactcaggtacagacaatgttaccagaactactgtatgtcagataatatctcattttggttaccatcccccacccacattctcctaaaaaagaaaaaaaaacgagaagaagaaatgcagcaagaacaaagtgtcagtgcagaccaaagagcagccttgagagctcgtgaaacattatcttcttcatcatagtgcttacactgcatctttaaccttcttttcttctctcattcgagcccttgacaaagcgtcagtcatatctgagttcagtggcacagcaactttcagcagatcaacgaaaatttcaacctcctcgacatcaccttcatctccaagatacttaagtatcatctcaatcatcccaggcctagggatccaaccagtatttggagcatatacacatagggcattctttgtcagctcatatgctttcgcagcatcacctttctccgcatagccagctgccacaattgcccagctggttgaaggaggcatctttcccttcttcaagaaatcatccagaagtgcctcagccttgtccagcaagtccttctggcggtatccagtgagcaggacatttggaacttggaagtcaaatgcatttccgctcgactcccactctttcagcaacacttcagcttcttcaatctcattaagtttcacgagcactgcaagcattgtagtgtaatccttattaatatgcctattgcagttcgacatttggagcgcccacagcctattgacctctgatttgtcccccagatgtccatacaaggaaatcaggtggttataggaatctgaatcttttatatttatttttgcttctgctttctttaaggcagagaatgctttctcccttatgttgcccttaatgtagttgcttgccacgacagcatacgtgttccaatcaacaacgattttaggttcacactccatctcttcaagggtgttttccatcccgaaaaaatcagcccttgtgccataagagttaatgcatattctgtagctgaaattgtcaggaacgataccattgcttttcatctctgcaattactgaaggaaccttttcatgctgccctaggttcgtatacagacccatgatgttgttgtaggggagtgtggaaaacacaaaacccaactctttcatcttctgaaaatgagccaacgatttttcaaccaggagttcccgtgtgtagcagttaagaagtgcaccatagggtttttctgtcttatctttatctggcaggttgttgaagtaagtctcggctgcactgcttccatgaatttcaccaatcaaatccaggtgaacagcgtgatcctttggcagaaattttacatgtcccttggcattcatccattcagagacctgcgcaaagtaaaaggttacagagaaatcaaattaaacatgccaactaggaagtgcacttgattattaaaataagaagccccaatggtgataagctcttgaggtctggagtgtaaattatagatatgaatcagtgttgcaaccataattgataagcacattatattagtgcttttaactattgatcaggtttcatttcttggggaaaaaaacatacaatcccatcacagaaactaaaccaaatacattaaccgatggaacacttagcaatcagtcaaatcctctaattggatgaacactcccaactcccaattgacaacaaactgtcatgcaagcctcctcatgatgttcagttgtacacagccaatcgccagttcttcataacgcccaaactatattaacacgacgctactacatctctcttcttgttcatggtgcagcattacatcatacacctcacatgcatgaagagggccaacaatttggcgagtgcaactcaagaaaccaaacagcggttgaggccgcaacggcatcgaacgccccataatagtctactgatgatgagctgagctgaggtacgggccacgggggggggggggggggggggggaaaggtggagttacctcgagggcctggcggtggcggcgtcgcttgcggagctccttgacgatgcgctcgagctcgacgtggcggaggcggttgcctggcttggccgcccaccgctcgatctccggcaccaggagcgtgcccgggtggcccagcggccacagcgtggactgcaggctcgggggccgcgccggcttcctccccccgctgtggccgcgaggagaggcgggggaggaggcggcggcggcggctcgaatgagggcaggggtggagccatgggatcgcgcgtggccggcggggaggagcctgccgcagccgaggcggatcaggcggcggccggcggcgaggaaggaagaggaggcggccatgggggttaactggggttttcctcccttttgggcctcttgggttgaaggaggtgatatgaacttgtgaaggttgctcaatttgcggaaaaagtacaccgaaaggtccctcaacttgtcatcgaattacaaaatcgtccttgaaccgtaaaaccggatataaagcatcccatcttataaaaccagtacaaactaggtctcttggtctcttgatggttttaactccggttttgtctgatgtggcagctgactcagcgtgggacccacgcgtcagcctcttcttccccctcccctctccacctctcttcctctctcctctcttcttcacgggcaccggcgggggagcagctgcacggtcggcaggcggcggggcaaggagccgcgcgcgtccttctccggcgcggtgttcaacctgtccaccaccatcatcggcgcgggcatcatggcgctcccggccaccatgaaggtgctcagtctcgtgctgggcctcatcctggtgatgctcgccgcggtgctcacggacgcctccatcgagctcctcgtccagttcagccgcgctgtgggcgccacctcgtacggcgaggccatgggcgacgccttcggtgctttcggcagggggatcctctagctctgcgtcgtcgtcaacaactgaacaacgtcggcgtgatggtcagattcactgaacatttcattgtgactctaatggcttgtgttctttttccctgggatgagttcagatccactgaaatacacgccggccgtgtcggttgctctggccatcgtgttcgtggtgatcaatgtcggaatcgccaccatcaagctgatgagagggcagattccgatgcctaagctgttccctgatgttcatgactggagctccacctggagacttcacactgcagctccagttcttgtgagttgtgaccgcctacatttgccattacaacggtacattttaattaccagctaagtttgcatttttctgtgggaatgtgattaacttgccactgcattcagtgcacacaattcacaacgagctcaaggaccactcccagatcaggccaatagtgcgggcgtcactgctgctctgcttggtcgtgtacaccaccaccagcttcttcgacttcctcctcttcggcgaggcgacgctggacgacatgctcgtcttccccatcgtgttccacgcgctgcgattcaacatggacggcctcctcttcccctcagcgaggcccctctcctgcgaggctgcgacaaccggaggttcggcgcgatcacggcggcgctcctcacggtcatcttcctcgccgccaacttcgaccccaacatctgggacgcgttccagttcactgggagtagctgcatgggcgacgacgtcgactgcggaggcggcggcgacagctgcctcgcggccgtaatccttgtggcagcagccgtgtctccgatgaggccgcgctcgacgccgtaatccttgtggcggcagctcgacgccggtggcggggaagaaggagaagacggcgacgaggtggtgctcgccatccgctgcgccccgatgcgacaaggctgcggcgggtcacggaatgccgccgccagcgccgccaccaccaacgcccaactctgtctgggccatcgctggcgacacgacccccctagcccctccaccagtggctcttgcccctgcttcggccggccggcatgaccggcgaattagaagagaagagaagagaagagagagagagagaggaggggagagagatgacgtgtcatcctgtcatgtggggcccacgtgggtcctacgctgactcaggcgccacgtaggataaaaccggtgtcaaaaccaccgaaggacatattgtaaccggttttgattagttaagcgacgtcggatatctggttttgcagttgagggatgattttgtagctcgatgacaagtcgagggaccttcggtgtactttttcctcaatttgcggttgtgcaaattttcttaaatttgggaaatggtttacgcggtgacaaaataatttctccgctgtttgtttgttactccagcttatctccgctgcatccgaactttaaatttcgaaaaattttagagtttatttttttcacattagcaattaagttgctaagaacatcaccaagtttttttttaacgacttgcacaagacggtgcaaaattttattgatagaacaggaaaaaattacaaagattacaaccatgtaaggtcgtaactaggaaaaacgaaaaaatataccaccacccacacaccggtagcgccaaactacaagtcttggagaagactagcatcggaccgaccgccgctaagctaacaacggaaacaaccaagatcgcccaaaaccctatccttacaaacaacataaagcccaattcatccacgtcttcaggatctagggagaaagggtgggagagaagatggaacacctctccccctaggccctccgccgtggccaacttgttgaaactaggacaagttttttttttttggttgctacattgatttctccacttatttatcagccatagagcaaacgatgagaggctattaaatgctaatttgttttatttttgtaggtcatggttaatttgagtttataatccaaaggagataatttgaattaggatgtatgatttgctagtataattcctgtcacagtgaaaaatctcacagaacattgctgaaaggggaaaatccaaataccccccccctacaagtcactgctctttctactctccccccacaactcaatattgttcaaaacactacacataaattaatttctcttccaattttccactcctattcagtttttacgctttctcgtgatgcgctcaatttctcgttatcgtgggccttcagcgcagcccacgggtggagttgtctcgtgccacattggcggcaaaagcgcgcacaccttcttccactttccatctttccctgctttaatttcacgatcgctactgcaacactaaggcggcgaaagaacagcggtacaacggcgaagtacgacgatgatcgcatagtacagagagaagggatatcaaatcccctgcccggcaagagaagtcgtagaaggaagcactgaagcatcctgtacttcgatcacctcgtcaattcattctacaggttccttttttctccctggttttggtcggatcatgttttatgcatgtaattgttgtattactagattcagataatcgaatatttgctctttgatttaggttgcaaaccaataaattggtataatctctgcagatgggtcgaactagtatttccttcattgttcatactggttgtacaactagtggaagccctaggaaatctggtggggaaaggaattgttcatcgatctatcttttagacagggattctctgaaattcatcgatttggaggagtcattgcttatacatggatatcaaaaaggagatggtgtatactacttgaagccttcttatgtccctccacaaggtcttgtactgattctaaatgatgaaaaaatcaagatgatgttggatgatcataagacggaaacagagtgctcactgtacatttttgcaaggccgcaggaattagtgactgataatggaagcacatcaaggtttgtaagcccaagtagtatcccattaatcggacatcataacagtgtcccaggtgattttgataaagatgatttgacattgcatgaagagtatgtacagcaacagttgagggaaaagaaaaaaggcaaggaacctgctattggcaaggagccagtaatgttcttccaaggagactctgatactgaggacctatatggtactagtcagatagatgcagaggttaaccaagcagaaccacatccgggaaaaactacacaggaaaaagaactagtagggaaaaaaactaacaagagaaaagagaaggatataggccaatcagctgaggtggattatttgtcagatgagcccaatgatgacacaatagatttcaatgacgaagcacctatctatgtgcacagatcaagaggaattgaagacatcatttttgatgagtccaccctacggcgtccacacatgcaagttggcatgttgttcagtaatgttgatcttttcagagctgctttgaagaatatgatcatcaacgaggggagggaggtgttcaagggcaagaatgataggaatcaagtttctgtcaagtgtaaggcagataattgtccttggtacatatatgcttcaaaattgcctggtgaagacacctttaaaataaagaagtatgtttcaaaacatagctgtgggaaatcacacaatatagcacagcttgactggagatggcttactaatgaatacatggaattctttagatctgagaagaaatgggatgcacatgcctttcaagattgtgtcaggcgagataccaatatagaagtcagcataagtaaggcatatagggcaaggagggaggcctacaagaaagttatgggcgatcatgatttgcagtttaaaagaattcaagattatgctcatgctgtgctatctgctaatccgggaagcaatgtttttgttaagtgcgaagtatcacctgagccagaaataaggcctaggtttcaaaggttgttcttgtcatttgatgctcaaattactggcttcttaggtggttgcagacccttcatcggtatagatggatgtgacatcaaactcaacaatggttctcaaatactagcagcacaaggcagggatgccaacaataatcttttccctattgcctttgtagtagtggagtctgagtgcacaaaatcttggacatggttcttactatgtttggagaaggccattggaaaaggagaagagtttgggggctgggtattcatgtcagatagacaaaaggtaatggctatcatatatgtctactttgcattaatacatgtcaactgttttttttaacattttgctgccatatatagggactacgcaaggcagtggctgaagttttcccaggagctgagcaccattactgccttaggcacctacatgccaatttttcccaagcaggatttagaggggaatatctgaagggtttgatggaacgagcagcatatgcatatagacaatctgagttcaatgctgctatgcaagaactaaaggttaacaatttgagggcatgggagtggctaagcaaggttccaaccaagcattggtgtagatatatgtttagttctagagcaaagacagatcttcttcttaacaacataagtgaaacatacaattcaaagatactgggagctagagatgaacccataattaccatggttgagcacataaggacaaaaatgatgggtgatttcaataataagagggaaggtgtagaaagggacaattggcaaatcccaccaaatatattaaagaagcttgaggcagagaagagagaggcaagatattgcaaatctgtgtgtgctggtaggggcatttggcaagtgtccgcatttggtaatcaatatgtagtggatttgaacaagcacacttgtgggtgtagaaaatgggatttaactggaatcccatgtttgcatgttgtttcagctattcaaggtttcaagcaaaggccagagagctatgttgatgacatattgacaaaggatgcatatgcgaggacatattgtgggatgatttatcccgttcctgatgagacacagtgggaaaaaactccatttccagatgtagacccacctgtggctaggacacaaccagggaggccaaaaacaaagagaactagagcatctgatgaacctagggttcaaggaaggtcggttgcaaagacaacaattagatgtagcgtctgcaaagagtttggtcataacagcagaaagcatggaaaagacaaccaaagttcttcatctcaaaatgtgagtacactactaatttatcatataaagacattgtactttgctacttctcacaatttgttgtctgtttctctcagtgtaaaacacaaataactaggaggaagaagaggagcaattcccagcctattagttctagttcaagagatgatattccaacaacatccacacagccaccagtatatatggacaatgcatttggtgttggtctctaccatcatgtgccagatgggccttatatcggtcctactggaagaaagctgcaaattaggagaaactgatctcctatttttatgcagtagtattatttacatcaaaattcttagctacaattagtgggggatgctgatcccttcttaatctcagtaccatcttttttacgacaaataattttctgtacttctaactatcagatttgaattgtgatttttaaggggattctacttcaataagcatgtcttaaatattctggaatgtgtttttgacttggtgttgccattcttcatattgatgtggaatcacgaatcaggaggcagacacggttgttttgcactggtggactagaaattgttttcctgtgtttatattagcgtcatgtcgtcctacccatatggctcgcagaattaagagcggatggagatgcgcgcgcttttgccgccaaggtggcacgaggaaacttcgctcatgggctgagctaaaggcccacgataacgagaaattgagcgcatcagagaaagcgtgaaaaccaaatagggtgggaaattggaagagaaattaacttatgtgtagtgttttgaacaatattgagttgtagaggggagagtagaaagagcagtgacttgtaggggggtatttggattttccccttgctgaaaacacacacagcatcaccaaggtggtccgactgcttaagatgcatgttcttctagcattatctaaggaaaagatgcagcattcaacttgctgcacaaatggcacacccaaaatttcttgggaaaaaaacatgaagtttaacatacatttttcactactaattggagctcaacaccagagaaagctagaaaaagcaaatcaacacccagagaaagctagaaaaagcaatctggaaaacaaaacagctaactaagatttacaaatacatgtgcatttaaccccatttacatataacaatgttggtacaaagaattatctacaacaactgcacgcatgagtgcaaaagtgatcatctagcactcctatgttctagccggcttcaccatccgcatcttcatcaggacgccattctagtagagcttggttctgtggcttctcattggaagatctaacatcaactagtccttcgatagagcagttagacagctctaacaacattgcgcagaacccgcaggagcaagatctgcaaactgtcccatggttcaacgcagagttaaacctctggaatggacgcgtacatatcagtataccatgaagctgatgatggagcatcagaggaataatgtaaagactaagaaaacatgatggagcactaggccactatcgccctggcaagcacatacccctaaagaatccttcaatttctttatctccatagattgcttctgagctagttcatgtgattcctgcagtttcctcagggctccactcaattttctctgctctttggaaacctgcttagtgcatcaggaataaaaaataaaaagtaaactagataagccacagatatatcaaaacaaaggtacaagtcaaattcacttatatttatatactaaaacatacttggttttttaaatcatggggcaaccatttcacgtagtctatacttacgtttttctagctacatttacacatctaacttatttatttatcagtacctgagcctctagttcctggatttgttggatagctgcctgctcaatgcaagaccgacgcttgtattcttcctcaagcatgccagttatttggtaccttagttcagccatttcttgggtgagatcttctgcatcctcctttgccttcagtttttgttctcgaagctcttcctaacatatttaaaaacaaaatgcttacattacaccaaatgatcgaagctattcaaataaaaaacaaatggaacagatacatcctcaaattagctacttttggtacagttaacacaccggtaggacgtggcagcgggagaatagagggagggaaagcaaaagtgccgaagtacatttagtagacataaactaaccttgagctgctcaatcagtagttcagattcttcacttcgctttgccatattttcaagtattgcaccgcccctctcatagtattgaccatcaatcttctcaattgttttgtcaacttgctcatcagatgttaaagcagtggcaactcctccagggaacaaccgttttagttctttattctcaagtaaaagatggtcaatagtcttatgtgcctcttgcagctggagctcatactccctcagtttattatctgctatggctttatcagcagaaacatgctgaccaaagctgtcagcatcaaacagtctctgttcaagtgtagttaaatcaagttttaagctctcaatctcacattgtgaatccaaatttacattctcaagcttctctatttgtaaggctgcctttttcaatttctcttcttggcatcggacttcttccatcagaagccagcactgagaatcagaccgcatcagctcatcatctataactctaactctttcaggaaacttttcaagttcagttagtttcagttcaagactgtggatatgctctcccatgatgtttgcttcaacatttcggatatttagctgatcctgcaaatagtctggatttgaaaccaacaaaaactgttcaagtcattgtgttaacaatagcacggactaacagcaaatagagagagtagaaacaaaggaatataccaatttcctgatagcagttcctcagttctgtttccaatttctcgatgtaatgcctgtccttctgacaggccctaaaagctgcatttttgtctagcagcattttctgcattaattaataaaacaattagctccatcggagtgctaacaaatcaataacacaattctctcttatgatacattgttttggagaacatgcgcaatactatcctatgttacattgatttggaaacatatcaaaatgtcacatgatctggagtgtcacttcgaaatgagatggaaacattatcatgccagtacatagaaaattccatgaaggagcttgcaccttacaggcttacagtttgtcatagttatgttcaatttacatgttttataaacactatatgaggattctatcaaacaactgtttagctaaaatttccactttacagtgatagattgacacatataccaggtggaaatatccaagacttctcaccttcttaacaataacaaggaacagttttcaagcataggaaagctcatgaagctacttaggttagataccagactaccaggagtggtaacttaagttcacatgaatcatatgaactgacacctgagtgtaaataacaacctaatcctcaatgcatatcaagaaatggttaggtaatttggcattacacatgtgaccaagtgagtagacaaataggctgagaagaaagtgttctggaaacttgagaaaaatctctctttttttttgtatcaatcattaatttgcagggtaagggagaaaatcttccaagtgccaatatcagagttaccattgaacaaaaagaatgtcagattactggtttctcacaacactaaaaaataccagtgctcccaaaaaattaagttttacaacgaataaatcacgaaacacatgtcaggtacctcttgattgttctctcttttttgcagaacctttgcaccattaacaggataatgcccattgccattggagctactagacatctgcaaagaaagcaacggataagccctactgacagaaaatttggggaactcaattaagatgacattatcctgtgatatcaagcacaagaacatatttactagagtagttactacgctgccatatcgaagctagagattggcaatcactccaacatggactctcatgctactatagttgcaaaccaagaaaccaaaatgcggatccaatatttacatagcataccgaagccgtgccctgaacgaaaacagcgtgtacctctgaatagattcagcaatggatagatacagtacaccaggaatcactatgagcaagcgacgaaatcgagagctactcgggagcaagtttgggctcccaccgctgcctccgaccttagctccgggaagcagtcaagcaggagggttcggccggcggcggaccgcgagttcagttcccggccgcgggcttggcgtcggcgaccgacgacaagcccgccggttaggtcgggcggcggcggcggcggcggcggcggaggggggaagggagcggaacggcgagggcggccggtggccgagggaggcagggcagcacggggggccagccgcggcctcggggtggggttgggtggcggcggcggtggtcgccggagtgggggggtgagacgcgagggtggtggggacttggccgccgccgccgctacggagtaaagcagtagaggctttttgcccacctttctcgagaattggccacaacaacatgcacgccacctatatgagaaaatgtgtgaaccaaacttgccaaatgcttcacctcaaaacatcatccaaaagcgaaaattcatcaaattttggacaagctaagctactactgctcgatttagttctccgttctataagggaggaactttcagggacagtagctgcaagaaagacatatccaaaacttgtgcaatccacttggtccaatgctaagctttgcgaccaaggttttgtctcacagacagatcctcctcattatcaatggacaaccccaaatagcacattactactcaatacgcataaggtttggggtttgcctttcgttgtatgggtcaaacatgagactatatataccaaattctaaactttgcaccgttaaaatgagatgttgatattaaacagtcagctaaaagaataggtataaaagggatcaaaataaaaaaaaaattcaagggtatacaaaggaacgagcaaagctcaggataattttctattactattactaagggtgtatttgtcatttgctactcaatctgccaatgcaactgcattgtgcatttgtgtttcttcatgaatgcagctcattagttaatctagtagtactagtcctgttcttgaatgtctcacagatgtaggcacacttgtccccacttgttcttcactatgacagcatcacccatccgggaaaatcattacccagcactgctggtcaacagtttaagtacgcactgactaaactcactaaaaacggtataagtacaatttgacacttctttgctcaatagctcacacacaaggtttttcttttagataatagctcaacatacacaagtagcatactaataaaaaattgttagttctagatttcatacctcttatcccagtagtaagatcatgaaagaatttaataaagttgccaattgccaaccatgccaaggactactcaactagtgctagatttctgaattttctttttttttcttttcaggttgatcagtgtagcctctatgcgttgtcaatgatacttctccctttattttcttcaggaaggaacagaaagtcaccttctggagttcttgttaatgatccttctggaagaattaatcttgcatgaaaaaaattggctaacttgcaacgatggagaattaattaattgcagggatcgatgtgtgcacccaagggaaaagccggccgtatctatgcaagataagcagcaagcaaagcaaagttgatgccttgatggccgtagttaagtacagggagacatgccagtagaagatgcagcaaatggggaggctgcagcaaagatacgacgtgtttggatgttccaacaactccactgaaacagtttaccaatcactcgctggtcatctcacactaataactagttttaatttggcgccacataatgctggtccatgcagatgcaggcatgcagagcgtgatgattcactgaccaggcatgtgggtacccggcgattctactagtctgattaatcaactttgttaattgagcaacttttgttgtttcagtatttaaacacagcagcaaagttagctgtttatgtgttcaggactggatgaaggtttaacaaaggactttgggctactgacctaatggctaattgacagaaagtgatgttcatattgatacctacagtttatcaagcagttctttaattatatgcatgcagttaaattacgtagtactagctttgcgtattgtactcccttttgaagagctgcacagctattggcaaaagcttgattaggtttgtttttgatgcccaaaaaaatgtcaacatgaagcactagtttattcagcttgctgtcctgtagttccatttagtggactcagtgtttcccatgactagataagttcccatataaatttgttgcttgttccaaacagaaacaatttctttttttgggggggaagaaacatttttttaataaacagtttacaatcttgtaattaactgtgtcattctatcttccttatgcctaggttcataaggagaacctatttacacctcagttagcctagcctgaatattattttttctcacctgaatcttcaatttgagttgcacaccaaagttgtgttactcaccaatgtcctttggttgttaaagtcagtatatgcacgttctcagacagccagacaagtaaaactaaagtgccatattgatagaaaatgttgctccattcgtatgagacttttatggttgatggattatcaccgagatgtattctaataactcgagtggatgttcgatcgtttattgcatgtcaactggatggttatgaaaaaatttcaaaaaaattgacaagatagatcaatatataatatatcactttacaaacatgcaagttcaaattcaacttctataagttgtaacaaaaataacaaatttagttgtaaatatacatatagtaatttaatttttgtttattatttttgttacaatttgtagaagttgaattttaacttgcatgtttgtggattgatatattacatattaacctatcttgttcatatttttttaattttttttataaccatttagatgacatgcaataaactggtggacgtccactcgagctgttaaaatagtgtcccggattatcactgcacacatcccaatcttctaaatgttatgattgttactaaaactttttcatgagcatttcttatggcagaggccaggagtcctgtctcggtataattgtatcgtctcgatgtaattgattaagtttaatagaatcttctgttatcttaatataaaaacagagcatttcttaagaaaaattgatctttttattttactttgtaatagctaattcatttgtttttaactcagattcatccatcatccacattcaaatgtaccccttattaccttgcataggcgcatagttgcatgcattgagaagtaagcacagcactcaacggtatagagaatttttttttttgaacgaatcggcaagctgccaatttcattgaatagagaaggagtaaactttacaagtaagaaaaaccaggcccaggaccttcggtcctactgagctaaaaataaaaagcaagccagctaccaagatgcctcgcccccgcccgagaccatgttttggcctcctctttaattttggctaacagacttcctgtagatagctctttgtgctggaaaattctacgatttctctcgttccagattttccagttgaccagaagtgttaacttgcgaagtgctttctttgggacttccttcaagttggcggtggcctcccaggtatagagaatttgcatttcttcgtctttcttgtttccttttggagtcttgaacaagtgtttgatgggtgtgattgatcactgaagctactacatactacatgacggccaaatctgccgacatccttgtgaattaaaaaaaaactgacagacttggttagcaacaacaactgggaaattaaacggcaatttgggtaattataagcagctagactgattaagaaagaattaagtgtaaataagctgtcactcgcacgccataacatttgcaactatccaggagatcatccatataaaacacatatgtatgcgttatattgccgtgtcactgtgcggtaatagcgtactgtacattactaattcattattattgggtacaaggtacaagaaaacgatggatacgcatgcaattgctacatagtccagcaccatattttagaaaataatcatttggtatatctaccagacctcactggtaaactacgtggtagcttctattgtttaccttgcagtttatagatttgctccggtccaacaaaaagtatctcaaggtaccagtacctctcggtatcaaatcgttttcgatcgttggatctaataatgcccattaagatccaacgataggaaatgattggtactgtgaggtatcggagcaaatctcttcagtttataagccactatcaaattttaaactttaaaacttaagcttaaagttgatattaggtttttttcgttatagtttgttttttaaacatagattttagaagtcactaaggacacgtataaaaatattactcataagttatttattttaccgataaatcgtaaaacaacttattagttgtaggccaaacgataggtaaaactcagtggtaaactaatagtgttatgaataattaaatgtatccaaacaataatgaaaaagctctaaattctttcctaccactcagaaaaaagcctgcaatataatctgcaataatcataaaaagaggtccagtggatgaatttatcagctggcagcaaagagacaaatatccactactttattataagacgatgtatgcgatgttaccatatatcacgccattctatctccaatgaatattgtcggcttacactagcctacccatgaacaactagcgatgcgtatgtgtcattgtagatagatagacaccatctggtcatcgccattacttataggtgtccaaacgggcggcacggcccggcccggcacgggcacgggtccggcacggcccgtttcggcacggcccgttaggcacggctgatgaaacgggccgtgccgtgccggcccacgtgccgagccgccggcccaagcacggcccgtggatggccgggccgtgcccgtgccggcacggcacgcctgcggcccacgggccgttcggggcgaaatttgagattttttagaattttttcgaaatttttatgaattttttagcctcccaacggttattttcaaatttgaacggtcaaatagccgttagtgtgccacgtggcgccttcccattcgaccgccgcccgcccacgtggcgctttcggcctgacgggccgccggcgaaacgggtcgtgccgtgccgcgggccgtgccgggccgtgccgctacagtagccgtgccgtgccgtgccggcccgcgggctcggccagcggcccaagcacggcacggctactcgggccgtgccggcacggcccgttactgtagcaggccgtgccgggccgtgcctgctacaggttcggccgtgccccgggccgcccgtttggcccggcccgtttggccacctctaccattactgctccctacagatagctatatacagttgctcgagaaaatctatatacggtggtatatatccatatcaccatgatcagggttcacaaagccgtctccttggtgggtttccaagttttcacgaaaagtgattaaattttattgaaaaaataaaattcagtttgactttctttaaaaaaaaatcattgatttaccgagtggtttgtcaactccagccaacttaaaaactgtaaattccgtgagagaaaaagagagatgatttttatagattgtgtgaacacttaccaaggtatcatttcatattattctcgtgaagtaagcataactcaattgattagattccttatgataaaaccagtccacttaaatcgaagtcctaacttaacatgagtgttgttatttacgactaattattctgtcgacagcgaggcgtccaaatttgataaaagatatgggcaggttatgtttctaaaaaaagaaaaaaatgtcctcgtagacttgacacgtcatcaaagcagcctccacagcggaccagctttctctctccaatgtaacccccttctttctctctcctcttcggcccatgtgactctctcttctccgtctgtttttaactttgcttccatgcatggatttctcctcccccctctccctcaacctcaaccgcaccccccgctcgatcgcgtcgcccctcgccatctctgcagcttaaccacaccaccaccccaccccaccctaccctacctttcctcccctctactcctccacctccacttcgatcgaatgctcgctgccgcctcagatcttcccgcgcgatcgcgcccagctgggtcaggttcgttcgttcttgatccccggatcctgaattccggggtttcttggaattctttcttgggttcgccatggatgcggggggagtggagctctctggcgtgatgcatcggtgtagggtgtgcgggaaggggttctcgtgcggccgctcgctcggtggccacatgcggtcgcatatctcgtttggggaggcggcggcggagctcggcgccaatggcggcgtggttgggtacgggctgagggagaatcccaagaagacgaggcggctgtctgagtttgatggtgatggtgatggtgaggaggtggaggtggaggagggtggcgatggcggcgagctcagggcgtgccgggagtgcggcaagctgttctcgtcgtggcgctcgctgttcgggcacatgcggcgccatgcatccggcggcggagggaggaatcacgacgacgacgacgatgacgacgtggatgtggaggatgagttcggcggcggggaggaggaggagattgtggcgccggcgccggcggcggtgactgtgatcgcggcgccgccgaggcggaggcggcggtcgatgcgcgtggcggcgcccgcgcccgcgcccgcgccgccgcggccggtgctgctgggcgggttcgagaaggaacaggaggacgtcgcgctcggcctcctgatgctctcgcgcgacaccggcgtgtggcgctcgccggtcaaggcggagacgttcgagaagccggagcagaagaagaagaaggcgacggcgaagcagccgccgccgctacccctcccaagaaacggctacggctacggctacaactccgacgaggattcagctctgctccagtacggcggcgacgtcgcgaagagcaggaagcgaagggctagctaccactctcccaattccatctcctcgaagaagaagcagcagccgcgcgcggcggcgccggcgaagcggacacggtacgagtgcccggggtgcggcaaggtgttcgcctcctaccaggcgcttggcggccaccgcgcgagccacaagcggatcaacactagctgcagcgcccccaaggtctcccccgccaccgccgcggcggcggcgcccgcgccggagccgagctcggagacgtacgcctcgctgagcaccctctccccctcggcgtcgccgggctcggcggccgccggcattggcgaccgcaaggccaacaacaagtcgtcagcggaggaggagaagttcggcggcgcgtgctcctccgacgagctctacgccgagctggagctggagcagcgctcgccggcggcggccgcggggtttcttgatctcaacttcccgccggcctcatcggaggttggcgtgaactgaagcagaattggccgcgtcagcagctgcacggagccaaagatttcttgatccgaaaatcgaggcgatcaatggggaactgtacagattcaattcattccattcattccaatctcgagctccaagctttccaagatcattgaggaaaaaaaaatcgacaagtgatcagagttttctcaggttattccaaagttttcttcatttttgtttcttcttcttcttttttttttaacatttcctttatttagttttctctcctttgaacttctttgaaggggctaaatcacaataagcctatgatgataagagctcacagcatctgaactgattcagttattaatagcttaagattagctcaaagcaactgtttttaactctgttatctgcttgcttttagcaactatccctgtgtcagtatactaactgaatcccccgtgaatttctgggtcaatgctaacctttgctctgctcctacttttgctgcactaatccgagatctgccttgggggaggcaggcagcagcaaagccagcaacagcttggttgcctcaaagtaaccacttgcttcagttgctgcatgcttagtacatcagtactgtcatgccattggttggtgtggctgtgagtgaacattgtgcagcagagaagcaagcaacaatagcattggacccccaagaaccagtacattatctctatctgtgacagagaacacaagaatgcaaatgctgataaagaatcaagaaagcattgtgcaagcagcaaggtgagtagagagtgatggaagcagagagaagctgcagactagtgatgaaaatgattggtgagtacagtgtaacaactaacaacaagtctctatgaagaagcaggtactaagcatgcatgtgtgtgtgtgtgtgatggcatgtggtatcaatgcttctggggttgttcacttgtccaccagagcaaccaggacaagtcttctcactctaccattccggtgtcattttctctctcaacccctcctcttgttgctttagcaagcctgcagcttaaactagattatgttttctttcctcaataaagattaatagtattgttaatcatgacatctttccctcacctgtttctctctcaagagagaggaggaggtgcacaggcacagacagctcacacaaacattgtgttgttcatgtctctttcttgcctacctttgttgaactggtttgccttgggagacacacaggacactcgaggctgcctggctggcctctttgtcagggagaaacctgctaatctgctataatagtgttgcttataattctatgattctatccatcacaaaggacacagtatagctgcatcctttaactgcagcttgcaggcctttttcatcgtttacttgttagcttatcagccgcgaccaaaatttttagtactaaaactcaatattagagttgatgttagggtttttttcatcgtagtcaattttccaacattggctttttaaactcaatcttgttactctgcaatagtatatgccttgcttcagtttgagatattcagtaaactgtgctgctggaaaacaattttttgtaggtccatatgtgttgtggtgttggttatcatgtagctcttgtcgaaaattgaggtgtctgaatataatgccaaaaggcaagcaaaactgcaacgcttgatagttaagaattttgggacggcagaggctaaatagggtgtgtgatatcaatgacaatcagatgtggaccattcttgtgctgttcttctgcggccccatccttatttggtggagctctcgatgtatgttggcgatccacttgtcaggcaaagtctctttgtttcttttgtggtgctaactttggatgttggcctgaattgaccacaataatctactagcatgtctgatcagtgatcagttcgtggtttgatggtaattaagaagctcaaatgtgcacaacatagttgaactgaattatggctgatctggtactgttctactgaactcaattctcagtttagtcagtgattaggcacaatttgtcctgatgtcagatatgagtagcttccattttgcttttacgaagcacataaattgtgccatagtcttacacacactcatcactaactaaatttaaagttattgccagtgacacatccatttgcagtttttgcattgacttgaactgaaggccccaatcaaacaaaaccttttgtttttcctcaacctccatccctgaatgagttagtttacaattccaatttcgatccaaacaaaacagcacgatccttgaccagtaacagcaagtccctagaataataatgccactgtttttcttttaagtctcagaacgagcatgcagtccatcacccccttggaagatcagacacaacaggccaaaatctagaaaagaaatgagctgtcacaaagcttcttctgcatctaatctagccaaagcatcaggtcatcacattccacaacttgtgagaaagatatacacctgcagagaagaaacaaagatctcccggattaatgaccatcattgcaagaaaaacaatgaaaagatactgcatcaataaagccatgagaggtcaggtgatgtgcaggccacacctctatctgtgggctgtggctcccacaaaagtttgcagcttaaccagcagaagccattgctctcctgcatgcctgcattgcattgcaacaatgcagccacttaaccaacctttctttggtctcaaaaaaaaggaagaaaataaaagagaaaagaaatcttttattagcagtcagcacagatccagatctgcctgcctgcctgcttaggtgatcagtacaatgttgctaaaattagccaagtgaatgctccgaaagataagagctctaattggctgtatgtgaccaggtaagtaagcagccaccaacttaacctgacattaattgtagctaaccattttagcttgtttgtgttttttatttgtggcctaaattaaagtcgttaataattcggtacattatttgatgatatactggtctaccagaaacaaaggtagactctatttgtgaattcaagaatgtaataattgggaaggccgattaattagttagtataatgaccaagatcacaccagccaagcttggtggttactctttcacagaaaagctgaagctttttacatgccctgaaatatgtgacaaatcatagctctatctagcaatcagcaaatgctgccttaatcagctaccatctcatgccatgctacttgctttcagtcactgtagttgagatgattaaagaaatacatatttagtgttagggaacataagctttggattcaaagaggatgatctagactaaatcaaaacaaacagacaaaaatggaattccgtttttctgttatttttcaacttttgagatagacagaaatgttaccatatagttagcctatgatctcttcatctcttgattccaacttgatctcaccaactaatcaccaacaacacaatattgcaggaaaaaagtgcagaacttggtgtcaatttcggtgcattgcaggtgttgcactgttgacgtcaacttcttactaactagtacgtacagacgtactacaagtactcatttagctttactagaaaatctgaaacatttcaggtcacactcttcttgtaaatttgacaagatttggaatgcatgaaaaatctgttattagacaaatttcctcgtatgatcgcatccgcacagtaaaaattcagaggacaaagtacatatcaaatccatcttgtcgcctttgaggaaaacgcatcaatttccactatagagcaaaagatcggcagttaaagggaatatcatgaaatctctgatcagcaaataggattcgaacagctttgatggaaaaaaaggaggcaaagactgatgttagaagtaaagtgttccccactagcatctatcaggaaaaaaaatgtcaaatcaaattcaactctgtttttaactgcttgatttggctatgttcatccgtattggacgtagtgaccaggttttaatccattatctaagggccccttcgaaacaaaggatagaaaacacacgggaaaaggaaaaacatagaaattaaagtagcatgttttactagtcttacaggaatagaaaacacaggaaatatttttttgggaatacacgagacacacattttttattaagaggaataaatgtatttacagagcgggcctgaaaaccaaaaagaaggggacagggtacaggagaggggaaaagaaaagcataagcctaatctcccgaatgatttggcgacccaagaacaaacgaatggactgtcatggttggtatggctgatctagccatccgccagaggtccacttccccatcatagccctagctatcttcatccaaggtctgctcttctggttgaagacccgattgttcttttccttccagattgtccacgctaccagtgttgcaattgtgtcgaaccctcggcgatgatccttaatcatccttttgcgactgtcacacagccaggcatgaaaggactgctcgttgagaggtagacattcggaatgaccgatagcactaagagcaatccaccaaagctgtcgggactccgggcatgcgaccaggagatgatcaatcgtttcgtcgcgttgatcgcagaggggggcaatgatccgggaaatatgaggagagtctatatgatagcaccataggaaacaaacaaagcataggaaagtttccaagaggttggacctcttgcttatttcctatgaaattgagctataggaatgcaatcatatgaaaaatttcctatacttttatgtgaatcaatgggtttcataggaaaaattccttaggaaattgaatactccaaaattcctatggcaatcctccaatttaagggtcctaaaagttttcaaattcttagatatttttgaacaccaggatgtgtatctcttgttttgacgacacgtgtgtcgtactacctccattttcatttactcatcacttttgattgtgaatatatgtcactacgcacttaaatatgtgattcctcttttgcccttggtgagcctaattaaggtgatatatgtgcggcatatgtatttataaacctctagattctatatcccactaagttaggggtattttgatcattttatatagaaaaagtttattgttttggtctgggtgcatggtcaaaactgacaaataagtaaaggggagagaataattcgaatagtaatttgaatattctaactcatgtgctggagctcagacagagcatgcctaagagatacccaatactatccccaatcctgaagtatttgagttatatagggaaaaagtggatctaatagacctccaatctagaaaaaaaaaaaagaaaccctgatctcggttctcgctctccacaagttatgaagattgcaaactcccatttcactgatccatggaagtttgcgcgtggtagatcatgtgggaaggggaatgaccgttgtgtggtagttcggggtggacctacttctaattattgggtgttaattttgagttaatttttagatatctgttggagaaaagagtctattcacatctaaaaaccttcttttttagaagagtgttttttttactcggcctctatacccaaccggatactcaggctacatgccctttcgctcacgcctaaaaacctatttagggatcgtaaaagcataattttaggaatatattttttgggttttttttgtaacatacacatttacttctcttagccaaggctcaaatttgaacatatgaatgaatttagcagaaatttagaggaaatttactccagaataattagggactgaatttcaaatggaaattgactaattaatattaagctcttgattgtcaaaaggataaaaaaaagagtgtcctgaaatatttcagattttcacaatgtgtggcctaaactttttttttttgagggtaatgtatagcctaaactgataaggcagaaatctaattttatccacgagactatagtgagcctactcttcaagctgggcttcaatttatgtgggccaagtgttaacgaagagacattttgggccatcatattcggcttgtatgggccatcagatgtaacacctacgcttctctttacggcccaaaaacacctacgcttccgtagttctcgaggcttctgtttcctcgtctctcgtcgtcgtcggcggcggcggcggccatggaggacgacgacgagtgccctcccctcgccgtcgagctctcgccggagaagccgtacagtcctccgccgctcggtccctccgcggcgtcgccggtcggagtcaccgtcatcactggctacctcggcgccggcaagtccacggtgagcttttctccgcaggctgtgccctccccgcctccccgccccatgctctccctgcaaagtgcttggaggattgggggcgtcagattactggaactatgtaggatccgagattggtctacggaagattcctggaggactggagttgtggctggtagtttgatccgatcgagttgcatacttgcctgtcgccatagctcttgctgttttcttaggtttaggtagttctcaacatgctgggttggttggagcagtgtccttttctatttggtgagctgtcatgtgactcgaactcgcttcgagggcttcgtttctcataggagctcattttcaatttatttgtagttctagtagtatataagaaaaggttcatcgatctacatgttgaactagtaaccaatcaattttgaactgtagttgaatgttatatcaccaagtggagtaactagttctctttctttttttagactaaacttaacattaccgagttactcatggataaacacctttttcacagttgatgatatattgaggatttatacatgtgtttagtactattttatcccgtgcttttttatcaaaatgaatctgtcagtggctgtttactatttagcttatgttgacatttgtttctactatgtctcaccttaccactctcctagcagaacctgtacttattgaccaagtgtcctgtgaactttataatccagtttgttagttcaactaattggtatgttatgggataacttatctcccgcacatcaaattttcagttagtcaactacattctaagtgcgcaacatggaaagagaattgcagtgatattgaatgagtttggagaggaaattggggttgaaagagcaatgatcaatgaggggcaaggtggcgcgcttgttgaagagtgggtagagctggcaaatggatgtgtttgttgcacggtgaaacacagcctggttcaagcacttgagcagcttgtgcagagaaaggagaggtaaatacggatgttgctgtcttgcatggatatgtagcatacaccatttgatcctataagtatgtgtcctactattatgttttattccctatgattttcagtacaaagtgatgtcatgatgtataaagacttagtgatatgttctgatttgctattgatattctggttttagctcaaaactatgtttacactctggcattttttggttagtccacatggttgtttgtttgttctagttcttctggaaatagtaaaattttgattcactttcctgtgtatgctatgtactgatgcaaaaatgtaaagtggatcatgctcttactttgatctttcattaaagaagattggtgttttttttttctgataacattagtagtttcattatactacagtgccttgtaaattacgacggtatgaattgaagatactatgtgctgcagaatggatcacatattactagagacaacaggattggctgatcctgcacctcttgtctctattctttggctagacgaccagttggagtcatcaattaaactagactctatcattacggttagttcaaccttatgttcttatttgttagtctgactatatcttacaagttcgggaaatgtgcctgcttctttggtccttactttggataacagtttgaaggactgcattgtattggacaattttcttatatatatatttactggtcaggttattgatgcaaaaaacttcaggctgcaaattgatgagcacaataagtcatcatcattccctgaagcatttcatcaaattgcatttgcggtaacttggtcctcagtgttatcctatttgtaccattttgtcttcactacagaatttggaattctttgtgctgattttgtggttctgaaatttgtcttacttgatgaatcccaaaatgcaaacaaccataataacaaaagtgtcaaaactttcctggaccaggatgttgtgatattgaacaaaattgacctagtagaaggcagtcttgaggatttggaaaggcagattcatgaagtcaacgctcttgttacagtggtgcagtctgtccgctgccaggttgacttaaataaaatatttgatcagcaagcatatggtgccaaggtcaatacctagctcgaaacttgcattttgttatttctttgtattcaatgcagaggaatctgtctttgattttgtttttggacaaaaaaaagactaactttgattagttaattgattaagtatgacatcaattagtcatgtcaacatatgggcactaaatctagtcatgccaagacatggaaactaagttattctcaggtcattaaactctatggcacttcttaacaaaagctcgaatcattcagcacgaaaaatcagtgttggtgagacgttttttcagcatctgcttgctcatgctaactagcaatacagaaatttgcttacttgcttttggtacttattttgtagttattgcttttgctggcgatggcaccttgtgctcaacaaaatctgaacaccttattcagggatttgattctgacatgtttttaatttattttccatagaattcatcgcagctgcaagaacttctggagtacagtaaatcagtaccacctaatctccgtcatgataacagtatttctaccttgtgtatttgtgagcaggatccaatttccctgtctaaggtactcttccattagagttttttttaactgcagttaacatttagaaaacatttcccttggacaactttgaaagggtatttattcattaatcttaaaaacatagattttggttgacaactacatcattgggatttgggatatttagtttttttttctgtactcacccattgttctgttagtactttgaagtacatgctcttatgtttcacctacttttctaaaatatgtcttcacattccatactgcttaggttgatttgaaaagttacaatgaacaagtgattgcaagctctacactcacttttcctggttgatgctacagcaacaactggaaacattatttgattaatattgccccttgaagtcttcatgttgagatagatgtgttatatgtcatgatttcaaagatgatcatttattgggatctgtgaaggatgctccatattctgctctactatagagaagagtagaagtctgtttaatattcaagcacatacactgcatttcctaggtttctccgttcatgaccaatgaacaccgatatacaattgtgagatatatgcatttttgtttgatttaatttgttctgaaggtggaatcatggctcgaggatcttctttgggaaaggaagttggacatggatatttatcgttgtaaagggattttacatgtccataactcggatcaagttcatacattacaggttgttgcatcataaaaagtattctcaagaatcatacattatgagttttcaaacaaatattatcccacctgtttgctctcatgcaggcagtgagggaagtttatgaagttctgccagctcgagaatggtccaagacagaatctcgcacaaacaagatagttgtcataggtatatttcgtaactcactagtttagcgatggcaacttatgaattgtttattaattatcatatgcctgtggtgctgcaggtcgcaacttggatatcaatatccttcaagattcatttagtcgttgcaagcactgatatcgaagggtttgttcatcctgtaccctgtaagttacattctgttttttggggttgtttgtgtgtgtgtatatacatacatacatgcatgcatgtatgtatgtatatatacatacatacatacatacatacatacatacacacacacatatatatatatatatatatatatatatatatatatatatatatatatatatatatatatatatatatatatatatatatatatatatatatatatatatatatatatatatatatacacacatatatatatatatatatatatatatatatatatatatatata

SEQ ID NO: 7866 - DNA, 17993 bp, Oryza sativa
ctttgtttagcctgtgagagcatcctgagtcatatctcatatgcatacttagttctttgattattgtactatacatgtcatctctgggaatgcacgtctgtcattcactgaaacggtggtgctccagtttccctgtttctcttgtagtgatacttacctgtactcctgtctatagctgatatgtggattcctctgacgacatacatgctggtgtaaaactgctcatcttaccgtgaattttgtattttctggaaaagtatcattggctccccaaacaatttttcgattgttgatggctaagttttcttaacccttggtaggtagtttatttcttctgcaatgcagtgccctatacattatggactgttagtgttcacttttcctgtactctgcaactgggacaaatatcatatcttctgtaggcaaagaggcattacattatgtataagttgtatgctgagaaaccaaccactaggtgcaaaatcaaacctgatggttctacatgagccagcacttcaatattttggcacccaagtgctagtggctgatgacaaatttaagatagaatacctgtgtcaacctaaaggagacacaaagaggcatactgatggaaataaagttgaatttgattcaccgacgcattgtttggcactgtggattgtagaatattaatttgttgaaaaaagcaatgaaatgacctttgcatttagtatttaaagaggcagtgctggaaacgtagttttctactgttttattattctattcatttgtcttgtgtttaatagataataacttgttatgttaggctgtgttcgttttcttgtgttgggaacttattccttccgcacagaaactgagtgactcattagcacttgattaattaagtattgatttatttattttttaaaaaataggttaatatgattttttaaaacaactttcatatagaaattttttacaaaacacacattgtttagtagtttgaaaagcgtgtgtgtggaaaatgaggaaggtaagttgggaaagatgggggaagaacacagcttaggagctttgggaaccaattaagaacatgggctgagaccctcaccaaaggagatatctgtatgatgacaaatcacctctgagttttgctcttttgaaaagaagttctgatgatctaggggcatttatattaattatggatttgggagctggtcagacttaaaatgacaggcagtggatattttcctacatgaagtggtggaacaacatttgtcaacttctattttattatctgctattctttggtaagcgattctttcgtcattctgcgttatacattcagtgtttttcctgtgacagtgattggttgatagctatactcatttcaaatgatgattgttttgggattactcacaaaacgaaacatcaccagctcattttagaactgaatgtggacagttttcaatcccagtagtcttctgctggccaattctctgccttgtactgtagcatgctctaaattactctacctgcaactattacaaccttgtgcccactgtattcttgttatataattgctaatttcacgcaatttgtgcatgtgtactttaatactggatctgtgctaactgctaagcatcactgaagtgatcatgtgcttctagcttggttttcacatgtctagttcagaagtgcaatcataaaccagttcgactaagtcctcaaaaaggagaaaaccagttctcgtaccagttcagaagaagaaaccagttctggactaatcatgttattaagatacatacagatagaatatttattgcatgttgggcatgctgttgtgtactcatctcactgtactcaacctcagtgcatacccaatcaaaagctatgatacctagatgtttcctttcatcatctatgtgtttagctcactaatcaacattatcgctttgtcagcatgccaatacaggcaagttgatttagtagtgtggccagcacatttcccaaacaatgttctctgttatgataaaggtcttaagacccatagatatatgcttttgttgaattgttgggtatgaatcatcaagagctggtgccatttggcatcaactcatttttttttgcagtttgttagaaagggattggtgtggttgtgtactgacaaatctatggtattcaataagaaattagcatagggtgatagggaggtcactgattggtgcatcatttgcttaattaagtactgccaggttggtgtgttagcctatctggagagagagagagagagagatcatgcaaatcaaagctttttggtagctcatgtcagtttgatacgtgtgcatgcatctgaatgtagatcggtatccttccatttgtctcttcctttgcagatttggggattatttgtgtcctcttttttttttgtcagaagagttcagggcattgccatgtggctggtatatatattcctgctttatcatttgctgaagtccccagaagccacaatacgttaaactctttatatatcagggaggaaagaagtagattaatttgtcggtgttgttaatacatttccctctagtttttcagctgtaaactcctgtgcctagaaaaaaaataaaaagggggtactatcacgtcattatgttaattcggtatacaactattttacttctgatcccacagatgtaactgtatcttgtatataattgttaattatgtttctccaaatacaattttctgttctatgcacagctatatcgatcaatcctcgctattaaaatttggactcatcatgatctactggtttacaaagttctctgtcttctattaatattgtaatttctaggcctttggaatgagtacagtggtttttttcaagtttgttttgataatataatagattgatgtcatcgacataaactttcgcataatagaacttggaatcgtgttactatttttctagagttattttttcaccgtagttttctgtagctagccatgggaatggtgcctacctcgactggcagggagctgttaggagcagacgagcagtgcaccagcctgagtttgaatccctttcagtgcatgttgttggtaacttttttggttacgccgtcaatcatgatgaaaacacctaatgttttgcggtgctacaaagtcgtcaaccatctcgatctagataaatctaaaccaaggtggtttatgtaattcaaaactgactagttgaagctggcttagatgaaatagggataaacatttgtctcgtgggtggaacggaaggtttttgggacagacctacaaagagattcgcacacccacatcgaggatggacggctttcagtgcaaaccgacaaagatggatgaaaactagaaagaaaaaaagtgattggctaattgtattgaaaagagattatgtgttcagttgaaccggccatagcctttataaagagactggtcttgtctcctacagaatcttctccacgtcttactcaaggtagataccaataaaaactcaaaaacctcaacccaagcaaggaagcctgagacccgacgaaattcgactcgaagtcggacttagacggtttgaccgtccatttgtcgccaatcagatcgatcagccacacaccggcgatcatactagccctatgtaggaaatcccgatcttattcaaatttgatcatattttcttatttcatgtctagatgtcaaatttggatgttaacacatgttttctcactactttatcagcaatggatgctaagatcctctttagtaacctaacacatttttttgtttttttttaaaaaaagttagccatgagtccatgacatcctaggacaagagtaaaaaaaaaatcaaaacagataaatcaaacttaaaagaacacccaaaattcataagatcgtcgatgtgctgcccaagttgccgtccacggcgacgtgacaagactacaagagaagggaaccaaaaggtggcaatggcaaaatccttggttctgctcgactgctcctactcatcagtcaccgaggcgaaaggcatggctgttcttgctccaaacccgtaggccatccactgcccattcgtctgcgctcacaagttgcagttaatgctaaacaccaaaggatgcatatacgcaagtatatattccctccgtactcataaataaagtcgtttaaaacaatatttaagtcgaaccttgaaaatatatattataaataactctcgagttgttgagtttgtaaatataaaaattatatgaatagatttgtcttgaaatttttttataaaattatatgaatataacttttccataaatattttttatagaaacaagaagttaaagttatattttgaaaactgtgtcgctgtagtccaaaacgactttctttacgagtatggaggaagtatgctttacaagtaggagtaggtcagatgaatctgatacagtaactatgagtaggattccatcatagagtttgcatgcactggcgtataagacaataccaacacgatcatatgagccaaaaaaaaggaagtccaataattaatccaactatccaagtagtactcgtttagattctcttaaaaaatcagtcgagtattgttaaaaaagaaaataaaatcagtcgagtaattaattcaagtactcgtttgggttctcttgaaaaatctctagctcccttcaaaggttggtgctgccgcttcgtcgtggcactttcctgctaacgaattcaaaaaagcgacaggggaaaaaacacttcatggctgtatttagttcacgctaaaattgaaagtttgtttgaaattgaaacgatgtgataaaaaagttggaagttcgtgtgtaggaaagttttgatgcgatgaaaaagttaaaagtttgaagaaatattttggaactaaacacggcgcaaattggataggaattgggaaaatcaaatcggtgcgttttttcaggtgaaaatgtcaagcagtcatgctgtgtcttgtgcatttcacggcacgatggtgaactcactcgagctattcaattgtgaaagctccaaatcttgtctcggtcatgtgagacatctccggcgacgacgatgggtaaattactctgtcggtttatttatcttttctttttttttaaaaaaaaagacatgtccagccacgtgactgaactatgggtaaattactctgtcggtttatttgtttatttcaaaaaatataaagatgaaatactaagaacatcgtgcccctactccattcccaatatagatttttggggatttcagtcggaaaaaaatacactaatagtttccctgctctctcacaaaaacgaaattcccttatctttcattctcactctccacaagttgaaaaccattctctcccaaatttcatcttttgagcgagactgcaactcaagagcaagcaggagaatgaccctgctagctaaatgggtggcatgatctgataatgcctaggtgaagggtgatcatcttttcattttagagagttaaatacagacatcaccttcctttctattttaagaagttaaatacagactatggaagcatatttttaataagaaaaacgggtcaaagttatacattaaaacaaaataaagtcaatagtgcattgaggtacaactgttaatatcctatatgacaaaagaaaacaaagactaattaatcacacttttaaaaaacaacgtccatggtgcaaattcagaagttgaaaacatacggcaacaaaaaaaattaaattcgaaggggaaaaaaaatgtcgaggaggagaacacggtcgaggaaacaagatggaaggaagcttcacctttaaaatatgcaaaatctccacaaagtcaactttccgcctccgcccgtagacttctttgaccgcatttccaccgcgcgtttgactttggcatctttgaccgccgccatgtcatcgagcctatcgcctcttgccacgtcagatcctcgcagctttcgtttcgcctcctccgctccgagacgaaggcacgaagcatgctgaaggccgccacgtggcacggctcgtccaaacagcagttagtttttaggctatcgctggtcttgcctaatcacgaagcaaattagttaagcgtgtgccagctaaattcacagtgtaaaccttcgtcattagctagcagaccttgtcattagctacataattaattatgtgttactcctaccatgcaagcttaaacagtaaaggctgtaaggctccgtttgaattcatggaggatgaagattaagtaaaaaatacataaaacaagaatattattattattattattattattattattattattattattattattattattattatttattaagttatttatctaatagtttaaaacaaaattaacttctatatagaatttttttcacgaaatatataggttagtaatttgaaaaatgtgttaacggaaacgagataaaatccatatcttaataaaaacaacgcgttacctggattaatatgctttgtcccattgtgtttacgcgataaattactggactaactaactcgccgcacaaacaaaggttgctacgcgtgggacgtgaccatgcgttgtcatcttttaattttcaattttttttcctccatgggcggcgcaccgtcgttgttcaattccatttccacggaataaaatgggagacgaaaacggtggttgatgccgtacagtggactaattaaaaattatttgaagctctttcgcttatcttttggcgtttttttagggatggagtgtaatttatggggcacttgacagttgacatcctaaaaagacaaggtgtgtatatcagtctctcgatcgatggtttgacaatattaattagcgaggtcctcgcacggccgaaaggtttagcaaatgtgaagattcatataggttgcctaattcctatttatttgcatatatatatatatatatatatatatatatatatatatatatatatatatatatatatatatagagagagagagagagagagagagagagagagagaaacttttaaggcttctgtgatttttttagagcaaaattcattgataaaaccttttcgtctccggataacattttgatatcaagaggaaagttttatttatctatagttgatagttttcatagactttttttaaggctccaacaaattttgcaggtatttccttagtgaacacatttgatgttcgaaataaagggtactaaattagtgcagtaactctgtgattttattttatttttttgacaaactaaccgtgtgatttcaagaagtcgaaatgttatggaaatttgttagggcatccacactatgctaaaaagtaggtagcaaggagtcatattacgtggttcactattgtgagggtaggtagtaaggtggatactactattgtgagggtaggtagtaaggtggatagtagtatgatccagtagtaacactactaccaaataacaagcaatcaacaaatattaaaacactctcctttctcactcccactctcttattcacccatccattcctagtaataactaaaacaacaactcccttcattgtaaaatataacaacttaaaattggataggacatatctttctgtccagattcgtacaactaagatgtgtttcattcagtcatatgttgctacattttgggatggaaagagtacatgattttgtgttccatccttattacccacttgctattcccttcattcacaaatgatcagcatatatgatttgtgcacctatgccaatgcactcccacatgccacttaaatttacatcgattaacctgcaacaccgttttttcatatcctatgcatgcaacaagggaaatttgcaccaatgatatattgcttgcatgtatacatgcatgcacctcaaattacaattagttgaatagtacattgaactatgcatgcaaaagaccatttaataatacacagagaaacgaaaagccaggtataaaaagtactatcaaatatgcttaccatttctatataacgttgaaaaaaattatatgatgatcatttatgaatggagagtcttcctcctcattatagtccttctagaatccaaggtattttgtcgaaatatatcctgtctttgaacctttgtatccctaggagagtactacattataaggaggcccttagaagtaatcctctcttcaatgtcctgactagtcgatgcgatgtgcttacaggctacagcaaagaagggtacgtgcagctggttggaagtcgaaaccgcccgcagctgtactctctttatcacacgaaaacaaatctatgactagatgtgatatattttaataaaacgaatctagacattctagtacaataaatctggacagaaatatgtcttgaattcgttgcactaggatatgtcacatccaatcctagttttttttttattttttttacggagagagtagctagcgagagaagttcaaaccgcatggcatacacagatcacacgacacgaacatgctagctagatcaatttaccagttaatttgtctaatgctctattcatcttctagcgcttagactaacaaaagaaaattaaataagttgtacgaaatgtacaatccaacattactgggtgtgctcagtttcaaagtcatgaacaaccatttagacatacaaaacaggtggaaaaatgaaggcgatgcaagaaattttggtcaaggcgtatctagaaattccaagcccgaccggcctaacactctcgactcgtttcagaacattcagcaaaacaatactccctccgttgcttctttaacgtttgacatcattaacttttcaataaaaaattaacaatttctcttcttaaaagaagttactccctccatcccaaaagttactagagtacaatataagtattttttttactataaatctggataagccaaaagttattatattttgggacggaggtagtatataattattatttttttattgttatttgctttactattaaatatactttaatcaatttttttcatatttgtataatcttttaaaaaagaatggtcaaacgtacgtcttcaaatattaaaaaataggggcagtaattaattactgtacttttcctagcccgagctacttgtaaaaacaatatacagccggcatgtcacattagtgtacttgccttgagataaattaatatagagaaaaaaatagctcagctcagctctctgaatttctactactacaacgtggtggctcttctgaactctgaacctttaatatattttttccctcagcgaaagagaaaaaaaaatcaaggccggacgacgtactggcagagcaaagatccgaatcttggggcgtcacatgccgccacatgtggtccttagctcgtctcgttgttcttgcgtcgcatgtgcatggatggatggatcatgcatgtaagctagttgcacttgcaccacactgaccgcacgcagcagtggcacgcctcactcacgtcccgcgtattccctctccgttccttaagaaaagaatctaatacgaaaatatgatatatcctaaaactataagtctaaacagaccattatttagattgatagtactaagatgtactcactccgtcccaaaaaaaatccaatcctagattagaacctggacacatgtgtgtccaggttcatgtgtccaggttcaaacttaggattgggtttttttttttttgaacaaagggagtatgtcatttttagagacgaagggagcatatttctcttgcaaccaagcacaaacagcacaaatatttattatagacaaaacataccggacaatcctctctctctctatatatagagagagagagaggggcaaatataacgtcatcctgtctgtacttattttttccgtgtctgcaggacaaagatattcataccgaatgattcaatattaacgtggtaccatcaataatttgtacggtctttctctctctctctcacacacacacacacacatatatatatatatatatatatatatatatatatatatttgtgtgtggtgcaccagagctgtccttgatcctttatgatattgcttatgctattttaatatatgtatttcttttgagaatgatgaatatatagttgaaaatataatacatgcatataatatcatatgcgtagtagtatatgatttgacctaattaggttgtgcatacgtctttcacataatccatcaaacactagatagatcatatctaggacatccattgtcagtcaaagtcaccattttcgccaccacgacgaatctaattccatttcgtgccagaacgtactctcgtcgaatgtgagagcgaaagcagtatatccacactccatgactccatatccactagccctcctcatggatcaccaaattcccctcctcccttcacaatcagccaacgtgcagtgacacccaaaaatccttggagtccacccaggttcaacgaacctggacgcctttttctgcctccctaaacctctaaaacccgtcccagttcaaaaccatgtccaggtccatccaagagaggttcaaattacactggctgagccgcttaaaatcaaggtggcaaccggccggttgctaccgctttttgacctggtttgcattgtgaggttgttttttcttctccccgagataagaaaaagcgagcgtttgccgtttcggccggatcggcggcctcgggcaacgtgctcgagcaggcttgtgtgtgcgcacacgagtcagtcaagtcgccacatggccggaaaacacaatgcgttggatcgtttcgtggcagacaagttttttttttgagtgattccaaagaggagcaaccagggttcgtaattctgacaaaaaccggctgtattctatgaaatttcgaccttttgatatggctcggaattaatttttggttaaaattttgaaggttaaacattaagtttggtcgaaatttagtcgaaatttatcgaaaaccgatcaaaatttgtcgaaaaccgtgataccgacgggctcgaaatttagtggtcaaccggtaatataaaccctgggagcaactttggtgctcccttaatctcaaaagtatctctaccgatcttgcaatttcttgtgtcctataaaatacatagatatctttatattaggtataaatttggactatcttttcctatgaatttgagtaaaccaaattagacatgttcgcggtatagccgctatgtcacatctgctgacacaaagtgctattcgagctagctgtaccgtagtcgaatgagtgcagccgaattcataagtaaagatacctatatttttggtgacgagactaataaaagtttgcctataattttcctattttttagcacataaaatgtacaaattaagggtaaacatacaataagcacatcattgtattatatcaataaaatcgcacgatcacgctgacactattttgtttcctaaaatattgtgcattgaaattgcgatttttaacacatttgttgcaagacaggataagagaatggaaattgaatgaaatctactcggagcaattgagaattagagactccattttgaggagggaatgggcaaacaacacgccgaagataccgggagaaatgaatccgctatccaaaatcgagctaatatagcactgttactcatatgaatttctagatttttttcctacatatatagtgcaattctatcatacagttattattaatttgtaataggtgtatttcggtcttattaaactccgataataatggtttaacaattactccctccgtttcacaatgtaagtcattctagcattttttacattcatattgatgttaatatatctagacatataaatatggaaaatgcaagctagacttactttctccgtttcatcatgtaagtcattctagcattttccatattcatattgatattaataaatttagatagatatatatgtctagattcattaacatcactatgaatataagaaatactaaaatgacttacattatgaaacggaggaagtagatactaataaaaagggataaaatatacccaaacaatcgagccttgtatatgtattttatctaccttgatacgattgggatcaaagtaatacagtagtatattcttgctttcatgggaggatcaaaaaaatgataacggtataaaaaaagcagtgaagcaagctcgcagacaacacgccggatacaaaggggaaaccgaaataaaaccgccggagaaaaggaaatgaatatatatattttcaatttcgtaacgaaaaaagatatatatataaaaagaagccttgaactccgcctttaaatattcccacctcgcctcgctccccttccccatcatctcatctcacaccaaaaacgaatcagctcgtctccttcctccgcctccgcctccgcgagctcccattccattcccggattgcgccgccgccggtgttgcagcagccatggggatggggccactagagaacgccgtggtggacgcggcggcggaggccgtggcggcgaaggccgcggtcggcggcgtgggcgtggggggttcgtacgcggtgctgcagtgcggggaggactcggagtacgtgaggaaggcgtacgggggctacttcgaggtgttcagggcgctgctggcggaggacggcgagcggtggcgggtgtaccgcgccgtgcgcggggagctccccggggaggaggaggccgcggggatcgacgggttcgtcatctccgggagctgcagcgacgcccacgccgacgacccgtggatcgtcgccctcgtcgacctcatccgccgccagaacgccgccggcaagcgcatcctcggcgtctgcttcggccaccaggtgccacccccctcctcctcctcgtccgccatggatgtctccctctgttcgtctcggttgcgatttggtttggtttgctcgggggaggggtgaaatggtaaatttgctctttccgagatcggcgccgcttgcgattacctggttggagtggcgttgttctagcgacttcttatggattctttttttttcgtcttccttttgcttttttaaaaccatgcgcagtaaaaattcgaactaattgcattatcgcaggttaaacaggttgaatccgagtacaaaatttgtaaatagtaattcataaattggggggtaaacctgcaatggcaactgcagaagttcacaggaggtgagcttagcctttgcagtgatccgcacggactttttttttattttgaaaaagtacttcttctcaaataaataaaaattgcttaaacttaaaatatactctatccgtccaaaaaaaatcaacctcatactgaatattgaccatatccagatttataagatataatatatcttgagtttcttttggacggaaagaagtacaagtataaaatcgtttttaaaactagtagagctataatatttatggggcgtgaatcccgtgggcccacaccgaaccgcacccgtggccagaagaaattcccgtcttgtgcgttggacaggtgggccccactccctgtcacgccaacgcattagcctggccgcttaaataaaagaaaatgaatttttagctttcgctaaatctaattccggacacggttgatgacagcctggcacagtgcgccaaggcggttcacgtgagctgacgtggcggcaccggctgagctcacttgctgttgcacacacacaagacaatctagtaatctaattttatttaatatatattttttcttctctatatttggcggtaatcaactcctccgtggaattgctgccacggaagctgctcggtttgaacggcacacggttggcgtgatgcatctaaaccggtgaaggcggtcagcggtcgcttttcaaatcaaaccaccagcgacagcgcccaaagagtgtgatttttgtgttaggttggggtgggcttacatatacatgtttgaatccggtcgtttgtccgaacgagcgggaaccatggttacgtgaggactctgtatacgttttgttgtaaaaaaaaggatgagtgcgcgtattcaacttactataattgttttgatttttttttaaattttttttaagagattgcacagtctgatctgtgtctatagaaaggagatagaagtagccttgtccctaacttgatcgaagagacgagttgttcttgtttgtgcgagtagggaagcgcaacttgtgctgctgttcttgggggacattgatccccaacttgtcagcgggattggtttctttagtgattagtataatcgtaggatggagtcccgtaccgatcatagcttaatatccaagccaagcatcgtccgtgatttctgttcaaaagtcaaagctttgcaagaaccgtacagagctctgtcgaagaggtcagcgtgtccatggcagcaacagctgcgcaagaacagttataatttactcctacattcggtgtgccgcgttagatctcgcaagctgtctgaatccgaaaatggatcatgccagctcagctcgcatgtactccctctgtccaaaaaaaaaaaagacaaaccctggtttctgtgtttaacgtttgaccatccgttttatttgaaaaaattatgaaaaaaattaaaaagacaagtcacgcataaaatattaatcatattttatcatctaacaacaatgaaaatacgaattataaaaaaatttcatataaaatagacagttaaagttggacatagaaacctagggtttgcctttttttttttttttggacggagggagtactccactgtctgtctgtcggtgtgctctcctcctccacccacatggctgggctctgcgaagctctaccagttggaattagttgaaatgtttgtgatttgtgaacgagctggatgtgatgcgtcgccggccggccccggcatcggtcgatgatgaccccagtgtggcgaggatggaatcgatcgcctgtcagaaagaaacacgtttagctcttaaaaatgccagctttggtcttaattattcacgcacaggaccgagttggctgttgatctggtcccccttttgaagatctctgcatgtgattgactgcagtctgcaacatttgtttttatttttactggaaagtttcagatatgaagtaataatatagttttgccgtacaatggttcagtttcttgccgtttgaaaaaaaaaaaacaatctttacacaagtggctaacagaggcgtgatcactctgctgcaggtcctgtgccgagcgctgggcggcaagacgggccgatcgaagaagggctgggacatcggcgtgaactgcatccaccccaccgcggccatggcgaggctcttttcgccgatcaagctccccgtccacatgcccatcatcgagttccaccaagatgaggtacactttttcgccgtttcgttttcaaggtttgctctgatcaaagcttcagaaatggtcaatgacctgacataacttacatggcaaaatgcaggtgtgggagctgcctcctcaggccgaggtgctggcgcggtcggacatgaccggcgtcgagatgttccgtctcggcgaccgcgccatgggcgtccagggccacccggagtacagcaaggacatcctcatgagcatcgccgaccgtctcctccggaacgatctcatcctggtaagctacggaattgactgaactctctgtggtttcttctgtctactactgtagctggtctgaaaaactgaagatttgtgttgattacaggatcaccaggtggataaggcgaaggcgagcttcgacttgcggcaaccagacaaggatctgtggaagaaggtgtgcaggggttttctgaaggggaggcttcagtcatcgcagcagccgcagcagcagcaacatcagaagcagcagaaggcggcgcagctggtgctatagtaaacaagattagtgagtgagatcagatgggggcattggggagcctagattaatccttattttctgcttcagatttgtacaggaaaaaaactatttattcggagcaataataagagagtaattgggggtggcctaattagcaaaatcccatttgccaatcaattcccatcttccatcctacattttcgtcacgcggcacataacaaaacgtacttacatggatgctcgttcatgtatcgatcgtcagtactgtaggatgcttccaattgaaaccgagtcccttttcaacttttccaagaaacaaagctgtgtccatccacagcgcccaaacctgcaaagtacaaaaacactaactttctctttggcgtcatttcaaaagacccaaccaaccaaacaaaacaagccagtaccaagtccctctcatggctcaacagtgttgtgtttgttagttggaacgaacgaaggacattgtcatcatttgggctacagaatccgctcggtttcttggccgtcctcatcgcgcgagagagtctgccaagatccaagattccggcggctccccggccacgcacgcgcccatctctcgcgaacgtgacgccgttgcggcgttggtgaggacgaccacaacgcaacgcagcacaacacaaacgcggtagaaatgagttgaagagatgtggccagccatggccatatgtggggtgcggggggttagtgtagtatggacaatggaccaccggcggagcgccgttaagctggtggagacgcgcgagcgagacggatccacgcgcagccttctccgtaggcagagggattccgggaccggcggccggtggctcatgcttggcggagggggaccaattgatgcaattgaaatggagatagctacgtaacggtattccgtttaaacgggatgatacttcagaggtactccctcctctccgtctcataaaaattatatttctagctccaagtctttgtcctataaaaattatatttctagtcatgtggggcccaaccaattgattcatctatataagtttaatttgggctgctaatgcttgtaattttattaagtatgctaattatatgggttaattctctcaaacttccttttaatcatttgtatatatggaatgtgtgcatgcagtgggttcattaaataagttattgtggtcatttttcaatcctactattttatcctaaattagctagaaatgtaatttttatgggacggaggtagtatcatctgatgtgtggatatcagccgatacctaccaggtatctgacaatactttagaggtttcatctcttctgaacggaatatcgtcctgtagcatttttcattgaaatttactccgaactatttagttttttttagggggtggcaattaggatatttatagagtggaaataagattctatttgctttactactttatccctattttttctaagggaaaatctgctctaggacactttaggctttattttgttgccaattccaaccttacttaacttgatgccttacaaaatttagtagtatttttgagaggaaagtttcggaagtaacaaattttagtagaatgtcattggtaaggtaatgtttagttcgttaccctactaaaatttggtagcactacaatttaatacgtcgaaagtggtaacaacgtgaacatgccatctcactttgatgtgaagttgaacgagggttccatagcaatgccttcaaaaaggtgaacggcgctcgagggcattgttgtcgctccaccagcaagccgagtaagactttcacctcagagtccccatacaaccctagcatccacaacgaaagccaccaaatttcacatacacaccgaagctacctgcactatgcacactaccacctgcacaatggtcggactggtaccattgacaacctgctctgccacctagccagacccagggagccaggtcgtcggtgctactagatgactaccaactagacagtcccctcacagagaccaccatataacctggatgtggatctacagaaagagaggagcaggaggagggggggggggggggtagggagaaggaaagatgggctgcaggaa

SEQ ID NO: 7867 - DNA, 13860 bp, Oryza sativa
ttgcgttttcgtatcacagatttggcgggtgatggacggaattggcgggaatggttaagtgtgtgcaccgttagctggaacccactaattaaatggatgcggttttgatcagcttaattgggacaggtgacaacggccggccgtttctgatgcagagatagaggtaagaggtatattcagctgatgaatctgttctccaaaaaaaaaaaaagatgatgagtcacctcactggctgatgctgatgctggcgtgtatccaacggatctctctcttgcttaaccgtctttttagctgaggtaggacagtgcctttgattccttggtcgagctaactgatggatcaatgacagctattagcaaaggctgtttggattgtaatttaagcaatgagaggcaagagaccaaaaaacagtactaccattattactactgctcgttcttgaagaacgatttaaattttagttttgctgttaggggttgttaatttgtatctcaggttttgttaaagctggtttaccttaatcatgttttagatcaaatcttgtttgtttggcataagagaattgtggatatatataaaaaaacataagttctctcaaagtaaaaaaaaatgttttattcccttcgctcttctgccttttctcttgtgggccaaacagaggatttggattttacataaatctacggtaacagaataataaccttaaacctaataattcgtataaaacttgtttttacttttcccatccaaacaaccactaaagacgtctgattagctcagtacttaaaatacagaaccttatgggattttatcttttttctttttgaaaaaaaaactactccctctatccttctctaaaagatcttatttttatctatacgtttggagtatcttttactccctccgtttcacaatgtaagactttctagcagcatctatatgaatatgggcaatgctagaaagtcttacattatgaaacggagaaagtaatacgtatctaaacaagtatttgcctagatgtataaccagaaataatgtcttttaggatagagttaatgtgcagttaattactccctccattccaataaatacatgaatatatccaaaatttatttaaacattgatttttttaggcgaagtgagtattaattaggggtaatctctaatacatgagtcattaatctctactgtttttaataaagaatcattaaagatgtccccttaaatctctataagggttcttctgcgcaataatagcatgtcctttaccatttgaaattacccctcaattgctgaccagatatttttaatggctcgtttaattgttaaggatcacagtggtgaaccattagatattaggctctgagtagaagtacgtgacttgaagatttgtgcgaacctttcaacatgttgaaattaatccactaggtaagggatttattggggtgccggacattaacagagggggagacgaccaataaccgatggtgcattaattggtgtggacggtagaaagagcattcacgtacgctgccactcggtaatgcttgaaggagggcaatgcatgggtctattccctcggtcgaaaaaaatgaacaaacatttgtattagaatatgacatatcctaatacaataaatctagacatactttatatttaaatttggtgtatcatatcctaatacttgattgatttattttacaccactagagaaaggggctttagtcccggttgggaacccctatactcctggttatacaactgggagcacaaatccaaaattaaagatgcccatctttagtctcaggtgaaataaccggagtaaaatggagccaggctaggtgcggttgctttttcttttcttttattttttttcattgcttttaacattgaatattgatttcactccatttccaaatcatcccaaattcgtgaaatcccaaatcgatcatcacatcacaaattaaaaggatcctctccaaatcctcaaatcgatcatttccaaatacatcacaaattcttaaaaaaaattacatcacaagttctaaaaaattcatcacaaatacataatatattcatcacatcacacacaaatcaaatacatctcagatatgaataaaaaattctcaaaaaaaaaccttagaggcgctgcccaccgctgccacgctggcctgccgccgtgccacccgcttcgctactacaagatgagaggagaggataagagcaagaaaagaggagaggataagatagagagagaagagggagagatgaggaagatggggagagagactttgcaatagtggatttgaggataagttttagggattatatacgacgggttgagttttagtctcgggactaaagatctaaataatctttactcccggttggttgggactaaagttgtgatctttagtaccgactaaagattctcggccccctgacaggcctctgataggagatgaaccatgactaaagatcatctttaatcccggttgatcaaaaaaattttaaccgggactaaaaataaattttagccccgattcttattagaatcgggactattgtggaaatcagccgacccagcaaagaccacttctctagtagtgttaggaccaagagagtatatttcaaagggggcaatgaaagagtgagatacacagattttatttgtcaatgaaagtttattgtctcaagttgatttattttgatatggaagtagcagttttggagttcggatataaatttgtagaatacatagatacatgccggtttgatgatatatatatatatatatatatatatatatatatatatatatatatatatatatatatatatatatatatatatatatatatatatatagagagagagagagagagagagagagagagagagagaaacttttaaggcttctgtgatttttttagagcaaaattcattgataaaaccttttcgtctccggataacattttgatatcaagaggaaagttttatttatctatagttgatagttttcatagactttttttaaggctccaacaaattttgcaggtatttccttagtgaacacatttgatgttcgaaataaagggtactaaattagtgcagtaactctgtgattttattttatttttttgacaaactaaccgtgtgatttcaagaagtcgaaatgttatggaaatttgttagggcatccacactatgctaaaaagtaggtagcaaggagtcatattacctggttcactattgtgagggtaggtagtaaggtggatactactattgtgagggtaggtagtaaggtggatagtagtatgatccagtagtaacactactaccaaataacaagcaatcaacaaatattaaaacactctcctttctcactcccactctcttattcacccatccattcctagtaataactaaaacaacaactcccttcattgtaaaatataacaacttaaaattggataggacatatctttctgtccagattcgtacaactaagatgtgtttcattcagtcatatgttgctacattttgggatggaaagagtacatgattttgtgttccatccttattacccacttgctattcccttcattcacaaatgatcagcatatatgatttgtgcacctatgccaatgcactcccacatgccacttaaatttacatcgattaacctgcaacaccgttttttcatatcctatgcatgcaacaagggaaatttgcaccaatgatatattgcttgcatgtatacatgcatgcacctcaaattacaattagttgaatagtacattgaactatgcatgcaaaagaccatttaataatacacagagaaacgaaaagccaggtataaaaagtactatcaaatatgcttaccatttctatataacgttgaaaaaaattatatgatgatcatttatgaatggagagtcttcctcctcattatagtccttctagaatccaaggtattttgtcgaaatatatcctgtctttgaacctttgtatccctaggagagtactacattataaggaggcccttagaagtaatcctctcttcaatgtcctgactagtcgatgcgatgtgcttacaggctacagcaaagaagggtacgtgcagctggttggaagtcgaaaccgcccgcagctgtactctctttatcacacgaaaacaaatctatgactagatgtgatatattttaataaaacgaatctagacattctagtacaataaatctggacagaaatatgtcttgaattcgttgcactaggatatgtcacatccaatcctagttttttttttattttttttacggagagagtagctagcgagagaagttcaaaccgcatggcatacacagatcacacgacacgaacatgctagctagatcaatttaccagttaatttgtctaatgctctattcatcttctagcgcttagactaacaaaagaaaattaaataagttgtacgaaatgtacaatccaacattactgggtgtgctcagtttcaaagtcatgaacaaccatttagacatacaaaacaggtggaaaaatgaaggcgatgcaagaaattttggtcaaggcgtatctagaaattccaagcccgaccggcctaacactctcgactcgtttcagaacattcagcaaaacaatactccctccgttgcttctttaacgtttgacatcattaacttttcaataaaaaattaacaatttctcttcttaaaagaagttactccctccatcccaaaagttactagagtacaatataagtattttttttactataaatctggataagccaaaagttattatattttgggacggaggtagtatataattattatttttttattgttatttgctttactattaaatatactttaatcaatttttttcatatttgtataatcttttaaaaaagaatggtcaaacgtacgtcttcaaatattaaaaaataggggcagtaattaattactgtacttttcctagcccgagctacttgtaaaaacaatatacagccggcatgtcacattagtgtacttgccttgagataaattaatatagagaaaaaaatagctcagctcagctctctgaatttctactactacaacgtggtggctcttctgaactctgaacctttaatatattttttccctcagcgaaagagaaaaaaaaatcaaggccggacgacgtactggcagagcaaagatccgaatcttggggcgtcacatgccgccacatgtggtccttagctcgtctcgttgttcttgcgtcgcatgtgcatggatggatggatcatgcatgtaagctagttgcacttgcaccacactgaccgcacgcagcagtggcacgcctcactcacgtcccgcgtattccctctccgttccttaagaaaagaatctaatacgaaaatatgatatatcctaaaactataaatctaaacagaccattatttagattgatagtactaagatgtactcactccgtcccaaaaaaaatccaatcctagattagaacctggacacatgtgtgtccaggttcatgtgtccaggttcaaacttaggattgggtttttttttttttgaacaaagggagtatgtcatttttagagacgaagggagcatatttctcttgcaaccaagcacaaacagcacaaatatttattatagacaaaacataccggacaatcctctctctctctatatatagagagagagagaggggcaaatataacgtcatcctgtctgtacttattttttccgtgtctgcaggacaaagatattcataccgaatgattcaatattaacgtggtaccatcaataatttgtacggtctttctctctctctctcacacacacacacacacatatatatatatatatatatatatatatatatatatatttgtgtgtggtgcaccagagctgtccttgatcctttatgatattgcttatgctattttaatatatgtatttcttttgagaatgatgaatatatagttgaaaatataatacatgcatataatatcatatgcgtagtagtatatgatttgacctaattaggttgtgcatacgtctttcacataatccatcaaacactagatagatcatatctaggacatccattgtcagtcaaagtcaccattttcgccaccacgacgaatctaattccatttcgtgccagaacgtactctcgtcgaatgtgagagcgaaagcagtatatccacactccatgactccatatccactagccctcctcatggatcaccaaattcccctcctcccttcacaatcagccaacgtgcagtgacacccaaaaatccttggagtccacccaggttcaacgaacctggacgcctttttctgcctccctaaacctctaaaacccgtcccagttcaaaaccatgtccaggtccatccaagagaggttcaaattacactggctgagccgcttaaaatcaaggtggcaaccggccggttgctaccgctttttgacctggtttgcattgtgaggttgttttttcttctccccgagataagaaaaagcgagcgtttgccgtttcggccggatcggcggcctcgggcaacgtgctcgagcaggcttgtgtgtgcgcacacgagtcagtcaagtcgccacatggccggaaaacacaatgcgttggatcgtttcgtggcagacaagttttttttttgagtgattccaaagaggagcaaccagggttcgtaattctgacaaaaaccggctgtattctatgaaatttcgaccttttgatatggctcggaattaatttttggttaaaattttgaaggttaaacattaagtttggtcgaaatttagtcgaaatttatcgaaaaccgatcaaaatttgtcgaaaaccgtgataccgacgggctcgaaatttagtggtcaaccggtaatataaaccctgggagcaactttggtgctcccttaatctcaaaagtatctctaccgatcttgcaatttcttgtgtcctataaaatacatagatatctttatattaggtataaatttggactatcttttcctatgaatttgagtaaaccaaattagacatgttcgcggtatagccgctatgtcacatctgctgacacaaagtgctattcgagctagctgtaccgtagtcgaatgagtgcagccgaattcataagtaaagatacctatatttttggtgacgagactaataaaagtttgcctataattttcctattttttagcacataaaatgtacaaattaagggtaaacatacaataagcacatcattgtattatatcaataaaatcgcacgatcacgctgacactattttgtttcctaaaatattgtgcattgaaattgcgatttttaacacatttgttgcaagacaggataagagaatggaaattgaatgaaatctactcggagcaattgagaattagagactccattttgaggagggaatgggcaaacaacacgccgaagataccgggagaaatgaatccgctatccaaaatcgagctaatatagcactgttactcatatgaatttctagatttttttcctacatatatagtgcaattctatcatacagttattattaatttgtaataggtgtatttcggtcttattaaactccgataataatggtttaacaattactccctccgtttcacaatgtaagtcattctagcattttttacattcatattgatgttaatatatctagacatataaatatggaaaatgcaagctagacttactttctccgtttcatcatgtaagtcattctagcattttccatattcatattgatattaataaatttagatagatatatatgtctagattcattaacatcactatgaatataagaaatactaaaatgacttacattatgaaacggaggaagtagatactaataaaaagggataaaatatacccaaacaatcgagccttgtatatgtattttatctaccttgatacgattgggatcaaagtaatacagtagtatattcttgctttcatgggaggatcaaaaaaatgataacggtataaaaaaagcagtgaagcaagctcgcagacaacacgccggatacaaaggggaaaccgaaataaaaccgccggagaaaaggaaatgaatatatatattttcaatttcgtaacgaaaaaagatatatatataaaaagaagccttgaactccgcctttaaatattcccacctcgcctcgctccccttccccatcatctcatctcacaccaaaaacgaatcagctcgtctccttcctccgcctccgcctccgcgagctcccattccattcccggattgcgccgccgccggtgttgcagcagccatggggatggggccactagagaacgccgtggtggacgcggcggcggaggccgtggcggcgaaggccgcggtcggcggcgtgggcgtggggggttcgtacgcggtgctgcagtgcggggaggactcggagtacgtgaggaaggcgtacgggggctacttcgaggtgttcagggcgctgctggcggaggacggcgagcggtggcgggtgtaccgcgccgtgcgcggggagctccccggggaggaggaggccgcggggatcgacgggttcgtcatctccgggagctgcagcgacgcccacgccgacgacccgtggatcgtcgccctcgtcgacctcatccgccgccagaacgccgccggcaagcgcatcctcggcgtctgcttcggccaccaggtgccacccccctcctcctcctcgtccgccatggatgtctccctctgttcgtctcggttgcgatttggtttggtttgctcgggggaggggtgaaatggtaaatttgctctttccgagatcggcgccgcttgcgattacctggttggagtggcgttgttctagcgacttcttatggattctttttttttcgtcttccttttgcttttttaaaaccatgcgcagtaaaaattcgaactaattgcattatcgcaggttaaacaggttgaatccgagtacaaaatttgtaaatagtaattcataaattggggggtaaacctgcaatggcaactgcagaagttcacaggaggtgagcttagcctttgcagtgatccgcacggactttttttttattttgaaaaagtacttcttctcaaataaataaaaattgcttaaacttaaaatatactctatccgtccaaaaaaaatcaacctcatactgaatattgaccatatccagatttataagatataatatatcttgagtttcttttggacggaaagaagtacaagtataaaatcgtttttaaaactagtagagctataatatttatggggcgtgaatcccgtgggcccacaccgaaccgcacccgtggccagaagaaattcccgtcttgtgcgttggacaggtgggccccactccctgtcacgccaacgcattagcctggccgcttaaataaaagaaaatgaatttttagctttcgctaaatctaattccggacacggttgatgacagcctggcacagtgcgccaaggcggttcacgtgagctgacgtggcggcaccggctgagctcacttgctgttgcacacacacaagacaatctagtaatctaattttatttaatatatattttttcttctctatatttggcggtaatcaactcctccgtggaattgctgccacggaagctgctcggtttgaacggcacacggttggcgtgatgcatctaaaccggtgaaggcggtcagcggtcgcttttcaaatcaaaccaccagcgacagcgcccaaagagtgtgatttttgtgttaggttggggtgggcttacatatacatgtttgaatccggtcgtttgtccgaacgagcgggaaccatggttacgtgaggactctgtatacgttttgttgtaaaaaaaaggatgagtgcgcgtattcaacttactataattgttttgatttttttttaaattttttttaagagattgcacagtctgatctgtgtctatagaaaggagatagaagtagccttgtccctaacttgatcgaagagacgagttgttcttgtttgtgcgagtagggaagcgcaacttgtgctgctgttcttgggggacattgatccccaacttgtcagcgggattggtttctttagtgattagtataatcgtaggatggagtcccgtaccgatcatagcttaatatccaagccaagcatcgtccgtgatttctgttcaaaagtcaaagctttgcaagaaccgtacagagctctgtcgaagaggtcagcgtgtccatggcagcaacagctgcgcaagaacagttataatttactcctacattcggtgtgccgcgttagatctcgcaagctgtctgaatccgaaaatggatcatgccagctcagctcgcatgtactccctctgtccaaaaaaaaaaaagacaaaccctggtttctgtgtttaacgtttgaccatccgttttatttgaaaaaattatgaaaaaaattaaaaagacaagtcacgcataaaatattaatcatattttatcatctaacaacaatgaaaatacgaattataaaaaaatttcatataaaatagacagttaaagttggacatagaaacctagggtttgcctttttttttttttttggacggagggagtactccactgtctgtctgtcggtgtgctctcctcctccacccacatggctgggctctgcgaagctctaccagttggaattagttgaaatgtttgtgatttgtgaacgagctggatgtgatgcgtcgccggccggccccggcatcggtcgatgatgaccccagtgtggcgaggatggaatcgatcgcctgtcagaaagaaacacgtttagctcttaaaaatgccagctttggtcttaattattcacgcacaggaccgagttggctgttgatctggtcccccttttgaagatctctgcatgtgattgactgcagtctgcaacatttgtttttatttttactggaaagtttcagatatgaagtaataatatagttttgccgtacaatggttcagtttcttgccgtttgaaaaaaaaaaaacaatctttacacaagtggctaacagaggcgtgatcactctgctgcaggtcctgtgccgagcgctgggcggcaagacgggccgatcgaagaagggctgggacatcggcgtgaactgcatccaccccaccgcggccatggcgaggctcttttcgccgatcaagctccccgtccacatgcccatcatcgagttccaccaagatgaggtacactttttcgccgtttcgttttcaaggtttgctctgatcaaagcttcagaaatggtcaatgacctgacataacttacatggcaaaatgcaggtgtgggagctgcctcctcaggccgaggtgctggcgcggtcggacatgaccggcgtcgagatgttccgtctcggcgaccgcgccatgggcgtccagggccacccggagtacagcaaggacatcctcatgagcatcgccgaccgtctcctccggaacgatctcatcctggtaagctacggaattgactgaactctctgtggtttcttctgtctactactgtagctggtctgaaaaactgaagatttgtgttgattacaggatcaccaggtggataaggcgaaggcgagcttcgacttgcggcaaccagacaaggatctgtggaagaaggtgtgcaggggttttctgaaggggaggcttcagtcatcgcagcagccgcagcagcagcaacatcagaagcagcagaaggcggcgcagctggtgctatagtaaacaagattagtgagtgagatcagatgggggcattggggagcctagattaatccttattttctgcttcagatttgtacaggaaaaaaactatttattcggagcaataataagagagtaattgggggtggcctaattagcaaaatcccatttgccaatcaattcccatcttccatcctacattttcgtcacgcggcacataacaaaacgtacttacatggatgctcgttcatgtatcgatcgtcagtactgtaggatgcttccaattgaaaccgagtcccttttcaacttttccaagaaacaaagctgtgtccatccacagcgcccaaacctgcaaagtacaaaaacactaactttctctttggcgtcatttcaaaagacccaaccaaccaaacaaaacaagccagtaccaagtccctctcatggctcaacagtgttgtgtttgttagttggaacgaacgaaggacattgtcatcatttgggctacagaatccgctcggtttcttggccgtcctcatcgcgcgagagagtctgccaagatccaagattccggcggctccccggccacgcacgcgcccatctctcgcgaacgtgacgccgttgcggcgttggtgaggacgaccacaacgcaacgcagcacaacacaaacgcggtagaaatgagttgaagagatgtggccagccatggccatatgtggggtgcggggggttagtgtagtatggacaatggaccaccggcggagcgccgttaagctggtggagacgcgcgagcgagacggatccacgcgcagccttctccgtaggcagagggattccgggaccggcggccggtggctcatgcttggcggagggggaccaattgatgcaattgaaatggagatagctacgtaacggtattccgtttaaacgggatgatacttcagaggtactccctcctctccgtctcataaaaattatatttctagctccaagtctttgtcctataaaaattatatttctagtcatgtggggcccaaccaattgattcatctatataagtttaatttgggctgctaatgcttgtaattttattaagtatgctaattatatgggttaattctctcaaacttccttttaatcatttgtatatatggaatgtgtgcatgcagtgggttcattaaataagttattgtggtcatttttcaatcctactattttatcctaaattagctagaaatgtaatttttatgggacggaggtagtatcatctgatgtgtggatatcagccgatacctaccaggtatctgacaatactttagaggtttcatctcttctgaacggaatatcgtcctgtagcatttttcattgaaatttactccgaactatttagttttttttagggggtggcaattaggatatttatagagtggaaataagattctatttgctttactactttatccctattttttctaagggaaaatctgctctaggacactttaggctttattttgttgccaattccaaccttacttaacttgatgccttacaaaatttagtagtatttttgagaggaaagtttcggaagtaacaaattttagtagaatgtcattggtaaggtaatgtttagttcgttaccctactaaaatttggtagcactacaatttaatacgtcgaaagtggtaacaacgtgaacatgccatctcactttgatgtgaagttgaacgagggttccatagcaatgccttcaaaaaggtgaacggcgctcgagggcattgttgtcgctccaccagcaagccgagtaagactttcacctcagagtccccatacaaccctagcatccacaacgaaagccaccaaatttcacatacacaccgaagctacctgcactatgcacactaccacctgcacaatggtcggactggtaccattgacaacctgctctgccacctagccagacccagggagccaggtcgtcggtgctactagatgactaccaactagacagtcccctcacagagaccaccatataacctggatgtggatctacagaaagagaggaggaggaggagggggggggggggggtaggg

SEQ ID NO: 7868 - DNA, 2827 bp, Oryza sativa
ccagtaactgcacaagtcaagctacttgctgaagatgaagaggagaagcttgcattaacaaactcgttgtctagatatgaccaagcaaaggcttttggaaaaacaacaattgatgtagctcgtattgctgccgggttgccttgtggtagtgagagcttcctctcgatgtttgctcgatggaaaaaacttgagagggatttatataatgaaagaaaggagtgagtaaaatgtttcacttttagacttcttgatgtcagaaatcattttattaaccaagtataacttccttctccaatcacttatatagtgctccataaattttactgcagccgatttgacattacacaaatcccagatgtctatgactcctgcaagtaagtgaacaaaccatcttcaagtaactaggttatttagaaagaaatcaggagcgtgaattaactgtctgttttcattagcaatctctattttctagcttttctgaatccaaagccgctaatatatttgaagggtacctaaatactcattatgacataaagttatttaaatttgacacagaattataacgtgatgccattattcttccttatatatctaatgtacttatttgaattatgaaagatcatttacatctgtcatgaaccgcacaatctaagtgctgaattacattgcagatatgacctcctgcataatgcacatcttaaccttgaaggtttggaagagcttttcaaagttgctcaagtaaggaaccttaacgttctgtacttccatttgatctctcttttaaatttgcatgaatgttactgatggacttcttgagtagccacgaagtcatattgactaagtacttcctgcagaagagaaatcagtcaattgcaattgtaaatatatactgatatgcaattgcaaaatatggccatattatttttgtatgaacaactgggtagatagggcattgaagttctgacttctgaggatatcatttgacacaagtcacctgtgccacataaagaatgacattcctagttttctttgcctccacaagtcttggagtgcagactattgcattgtggtcacataggccttgaaaagatcgcaagtggttaaattatacagttccaatgctcaggtgatgtgactatgtgagacaaactgtatggtcagtgcttatgttatgatgattcctcatagaaggttcaatcttatattctttttgtatagccttatgagagatgtgagtcttaagttcattatgctagatcttgtggagtgaagtgacctggaacagacattgtttgtttagtgcatctgtttggatgattcaacgtagaaggtccaattccacattctttttgtataatgttatgtgagatattagtgagaatttcattaagctagatattagtgagatatgttcttttcttcatacttttatcatttcgtataaatcaattactccctctgtagaaaattgtagggcatattttatttggaaaagaagtttttaagacaagactttgaccattgattgcgcataaatatattcataatatctataaaagcaatgtttatgaacgctctttgaaaaatgaatgtattggtataattttatgcactaaaatatacttataatttgactaattgtttgtcaaaaatttacaaagtttgaccttctgaaaaattatagcttttatctattagagccacatatgatgttatagttttggattttttttgttagtttatttgtgtagattagttctctttgacgtttttaatattttcatcatagcttatctaacattgattgttgtagcttcttgctgatggcgtaattccaaacgagtatgggatcaacccaaagcaaaaactaaaaattggctcaaaggtttgttttaagaaagacgttactgtttgttccatccacagatgattatatgctctttgcatgccacaaactgattaatcattttgaatgctttgattggttttcctagatagcacgtcggttacttggaaaaattttaattgatctacggaacactcgtgaagaagcaataagtgtttcagatccaaaatttacagaagatgaagctacattcttaccaacgaaagaatcagagtaccaacaaaaacttcaaactagaaatgaggatggaagaagatctagttccacaagtgagaaatcattggatcaggaagatgaagatgatagagaaactaaataccgcttagatcctaagtatgcccttggttttatcaatcctaatcaatcctaatcacatgtgtatttaatttctctaattcactttattccaggtatgctaatgtaaagacacctgacagacatgtccggacaaggctttatttcacatcagtatgcatgagacttcatgttcagctttgcttttgttcttatcatcatttttggatttaattgttattctaacattctctttaacaggaatctcacatacactccttaatgaatgtccttcgctattgcaacttggatgaatgtctacaaggggaggatagccttgtctgccaaagcgctttagaccgactgcatagaaccagggagcttgactacatgagtaatattgtgcttagaatgtttgaaaatactgaggtatggatctttttcatatggctcacaagaaaacttgccttgttacaaatgctatttttattctgggtaagatttctgtttttcacaaaatacatgagaccatatgtttccaaaccgccattttatgtgcgatgaggtcctggatctctttatcttatttccttgactattctctgttttgcacctacttatgttgat

SEQ ID NO: 7869 - DNA, 2445 bp, Oryza sativa
cccccctacacccacaagacccatggatacccccggagcaacctctttatttttttaccatgaatgataaactaaaggtccctaaatggctagaggttaaagaaactgtgtaattgagcccccccccccccccccccaaatttttgttcctggatccgcccctggaaggggatctcgggtgatggtgaggggatctcaggtgacggtgggggatcgtcgacgacctgttgaggcgcgacctgaaaccgtctggcggcatacctatgacagcttgagggcgaggtggcgccgtggagaacggacggacggcgtggcggcagcaagggaggagggatcgcgggtgacgacgacggcggaggggcgggatgcggcgccgagagcaagggggtcgtcgctgttctggcgagggcaatgggaggcacgatggaggcgcgggcagtcggcggcagaaggcggaggaggagcgtgcggcggcggaaggtggaggaggaggcgcgggcggtctggggctttgggcgacggtttttttttctttttgcgaagaaaaggattcagaagcgctaatcggtagttaatccggcgctaattgcaaggttaatcctacttctaatttgcatcattggatgaggggatctgatggttaggaataggtgggtgtactaattgcactaaacaactcgtgctttttatattagtctagattatcatatttttatgttgttcagaaatgatcggtgtattttggtaaattgatattccctctcagcgtcttttccttttccatttacctttacgaagtaaatggatcagcgcatgcatgcgcatgcaattgtttgcgtgtagtgcctcattgtatcccttcaccttcgtgtgcactatatgacacatccactaaagtgaagtaatatttttctttcatcgatacgctaattaaatagagtatgggtcgattttctcctcctttggtctcaatgcgaacacgatgaattctggagggagggagtaatgaaactgagtcagatccaagcagtccatccgttttggagccgtctgctgcactgagaaactgtgattttcggatgcatcgctcgctagtgaccggtgcacctcgtacctgccaatctgccatatatcgttggtgggcgagtcaacaactaccttcccactagtgagttgtgatccctggaatccggcacaagacaaatatagcatagcggcgacatacatcatcatctccctccaactcccaagtctcccaacctctcttgcgcggtggcagaggtaacgacatgcacaccaaggaattcattgacgggaaacattgccttgccggcgacaaggacctggtacgccaacattacatttgggatcatttgttcatttcggcatttcttttctttggggttgatgtttcctgtgggtgatttatatatttgagaaatctcttgatgggattctcggatggaacgagacatctagtttttttgggtctaagttgcatccctgatcaaagagatctagaaatggatgaaaattggggcagacagaatcacacaatacaccaaaagcttcagttttccaatgtgatttttttttcaactatgatcttctttgcaatttacaatacggtgaagattgaaatgaacgacaccggagacccgacacagatgcggaaaaccttttccagacgctaagaggaacacgagcttttccaataacaaagctcggggacctgaccagggaggggcatccggcccctcccattacaatataaatttgatcccccagaaaaaaaggggagaaaattggacaaagaccaatcaaatcaaaccgaagtcctaaataataaataacaaataggcctaacgattactgaccagactagaccatgtgattttggtaaaagggcaaaagggcacgagtagtatgtacatgagttatgcacaagttggagatgagttggacaaaaggagaataggaagatgttttgcattgaaaggatcaccactcttgatagtcctttctttagtgtaggaaggtaaagccagagttctccctgatcaaaggcggcatgtcaacatctgttacctcaatttctttcattgactttgagatatcatccaccgaaaacggaatgctgcaatcagaagtaccatggccaacgttagagaacaactttttcaggtgtgattgacttttgttgaagtttggtgtaagggaataaaccttgaatcatcgtccagcaagaaagaactgctcactgcgttattcgagtcttctgtcatcattatcctcatacttgagatgacctataagcatttgtgcatgaacaaaaacaatatttagtgataaagaaataaagaaatatagtaaatccaccgcttgacccagtagcagatgtatattggaaaatttgacaagtaaaattaggccaaacaagattac

SEQ ID NO: 7870 - DNA, 30503 bp, Oryza sativa
cgccgccgccatcaccggatatggacgagaaggggaggggggacggccgcagtccaccgctgccaacacgcatgcggcccccagcgccacccaagccgtcgccccatctggatctgacttagctcacgatggtccactgtcagctacttatctatttccctccatcctcagctaagttcacagtgctgaccacggtcaaggtgccacgtcatcgaataccgcccacaatactaccataggagtcgatttgtaccggttctagtaattgggggaatcgtcctacccggttttctagttaagggtcacgaattagattcggtgaacaattaagggagtcaaagtggactttttcctagcggcgccgtcgacaggctgacatgttccatgggatgggccgccgactcacccaaccgcgcgcatccccgcggcccaaaccaaccaactgcctactcgcgcgctggagctcacacaccgcccccgcggccgcgcgcgtccgtccctcttcccttccccttatccgctccgctccacagcctcgccccgattcccccctcgtgatttcccccttccgctcgctcgcgccgctccctaccggccaccaccgcgcgcgggacaagcaacctagctgctccggctgccaagccatcgccatggctccgtgccccgccgcgaccacgtacgtccgctgcacccagcactcctcctcctctctgacatttatcaccttatcaccttttgcttctctccctctctcgatcgtcagaactcgcattggggcgccgccgttcgccgcgacgacggctcgccgacccgcccggggcgcgacgacgacgacgaaggcgcgggcgtccgggctgcggcaggtggagggccccgtgtcggagagggcgtactcgtcctcctcgcccgctcccacccacaaggtcaccgtccacgaccgccagagaggtgtcgtccacgagttcgtcgtcccacaggttaatcaatacacacacaccttcgatgccgtctcaagcagcagtagcgcaattctccttcttgtgctttgtctgattcgtgccgtggttggggggcgcaggaccagtacattctgcacaccgcggaggcgcaggacatcacgctgcccttcgcgtgccgccatggtaggctcccatcctcgtgcctttcccaggacacattttttcttctgattggctacactttgccctcactactcactcgctcactcaagcttattagggcagtcccaaccctccacctagtatggtgtctatgacattaactacattgccatgtaggacttttagcttatgcggcactatattaattaagagagagattgaagagaggaagaaactgggtctcatgcaagacacagcttcaacacgagaacctatgcactagacactatcaagttttacattgggagagaatagtgtcttcataatagatgaagattaaatatgattggtagagaagagagatgatgtatttattaatggcccactttaaaaaaccatgggttgtagagtgtagttttgattgtgatgtcttattaacatggcaccatagacactgcttatggatattatgagttgggactgccctaagagtcaagttaatctgtgctggactttaaggcttagtcgttgcttagacaaatccatcatactctgctagattttagttgcacaaaaaggaagcatttttttacttgtttgtcaaatgttattcgtattgtattatgtatgcttaatcacggcaaaggaacacattaagcaagaaaaacgtgtgccgtaccatgttgatcaattgacacaagcggttgcttacttttggactcagccagtgtagtctctggctagcgtatcatttctcccttttcttctgatctacaatatagataagcaaatgaattactttagggaatgtgcaaatggattgctcactttgtattaagatggagaaagaaaagttacatcatcagcaattcggcatgcaaaaccagcagattgaccaaaacaaaaaaccaaatacaaccaggcgactatacttctgaattactgaagacacatttttctaatcaggttgctgtactagctgtgcggttcggataaagtcaggacaaataagacaacctgaagcacttggaatatctgctgaactaaaagataaggtgcatccatctttttatgctttgttgtcactattaattaagtatatcatgtttttactgtttctgctacagtttgcttgccacttgatccgcctcattcctcaatttactcagtggtttcaacagtgtctatgttctatccattagtaacacacgatcctacccagttagtattctttacaagtcaattgatgttcctgcaaggtttcatggccttcagcttcacaatttcttttattcgttacaaaagtatcacatttatttgtaatcaatagtttggatggtactatctaaaacaactgatttggagatgaattgttgacctgttaggatccttaaaggttcccttcgattttggtaagatagagttgtattgttttctttaattagtgtgtgaattaggtgttctagttgtgtgcctataaaacattcattattctgattcttctatttggcataacaaaaactgaaatggtgatatgttgcatgtcttattacttcctttttcagggctatgcattgttgtgtgttggttttccaacttctgatgttgaagttgaaacacaagatgaagatgaggcaagcattaagccaccttgttaatagtagtaactgtcttatctaaccatacagaaggaactagactgtattcttctgaattcttatgataagtcctacatgttccactaagcacataacacctcaatgtataggtctactggctccagtttggaagatatttcgcacgaggacctgttgtaagtattattaaatttgtatttcacaactcatagtttttatgcctaggaactcccgtgtagacaatttatagcataagcgcataactgttgatgttggctgtggttgtcaacaccactgttattccaattccactttaaacatgaaattatatcttctagcttttctcagacatagtggactgctcttttttttcaggaaagggatgattatgcactggagcttgcaatgggtgatgagtgagccgtgtctaaagaggtgacaccaccagaaatttcaatctctacattgtttaatctgttcatttttccccttatattctcatctaactctcagttctcgtccttcacagtggtgtttgcagtcgggagctcatgttgtcttaaggactttctttgaaagtggagaaaggggctttttcctcagctcacaattttccatcttcagtgctgttactctgttagcgattgtttggcatgtaaaaaagtgtgctttcttgtaaaaataccattttctagttcgcacctgacagacgaagaacaccatggattacatgtaaagttgtaaactgaacacctaatcttgagtgcgaataatgaataatgatcaccggagttatgagtttgggaatgatatgctgccatgaaaaccttgaattgagtgaatttgaatcttaaatttatattcaaagcaaatgtagtttcaaatacttccgttctatacaaccagtttgaaaatgagcttctagagttcgttgtagctgagaatttgtagtaaactagagtactgatgcagggcaagttggttttatgttcatgttgcctcaggttacaccgttgtccaattctgcgtggaaccaacctgagaatgctcaattctctgaaactggagtagccgagatgaattcagacaaatcctctgcccaattaggccggaaatcagccaacttgttattcttcaccgaattagtcccacgaatgaattcggcacacctcttcccatcaactaaatcagactgcttaattcatgtcagcaaatacggtccacaaatgaatttcccaaaccaaaatagcaaatacccacagaagtctacgattggatccactagtgaatttggcccaacacatccatcaacgagttcaacccaccctcaacgaattcagcacaccaacaaatttggtcccagttaactccatcagtgaaattggcccacgaaattcccgcaaacaaattcggcccgctaaaagatttggtccatctgctacccattagcgaattcagcccaagcataaattcggccgtcttattctcgacatcgtattcagcccatgagtagatttggcctcatagattctcgtctacaaattgagcccaagagtaaattaggccgactaaattctgtcaactaatttggcccaaaaataaatttggtccatctattttccgtaaactaattcggcccatgagtagatttggtctcatgggttcccgtcaacaaattgagcccgagagaaaatttgaccctctaaattccgtcaaccaactgggaaatttgggctactaatttcatttcaacgaattcgggccatgagtaaatttggcccactaattcccaataacgaaatttggcctactaattcccaataacgaattcagcccaccacggaatttgcaccactttattcttctaaaaaattttggcccgctactaaatttggcctgctaatttgtcatcaatgaattcggcccgtcaataaatttggccgactcaattcttgtcaacgaattaggccctcaatcgtattggaacgacgtaactcccacgaacaatttcggcccatcactaaatttggcccacttaattatcgttagcaaatgatttcggccacctaaatccagtcaacgaaatcgggccacaggtacatttggcccattaattttcccaaacagtttaggcccaataacgaattctttccgctaattaatttggcccaccgccgagtagataaggcgcgtattgcgatttgcgagggaagagacacgcgcctcgccgccgcccgccgcgatgctactggcgcgcgctccgccgccgccggcgatgccctcggcggtcagctcgccgccgcaacgggagagcatactccgcccatactgcgttccctggacccgcggctccgttgcgacggccgccgtggcgaaggctgctcctttccggggcgagcaaaaccacaagcaggtagcgagcgtggcgaaccccctggtgaagcactgcgttaggctcaggctctcctccgcgtaccgccgctcctgccgccgcattctcctcgtcggactcatccccatcctgtaaacttttctctattctaagctgcgaaattcccttattttgttttattctgagatgaatttttttcctaattctgcactcgtacgccttggtgcagggagatgtgtagcttcgaattctccaccatcgaaaccttgcttctcttggacggcatagagctaccggaggaattgtacgggttctctggcaatgtcgtgtatgtcagcgccgctgtgatgaagaaagtttctgggatgcaatcagttgattcaactgaggcaatcgctatcattcacatgcctaagtatttccgcgaccttgacagcgaccagggtggagctgttcttgatgagtggctcggctctgcaaagaggattttggttctggatgggattcaggtaaaaagaagtgtgcaatattccgttattatccatagtaaatggatgtcattttgtgcataagacggcacataatatgttgtttattgtttattttaagtttgaactagtccatttgattcctcttaagcaagggttctaaatttttactgtgtccataatggttctatcctgcaggaccctggtaaccttggaacattgataagatccgcttgtgctttcagatgggtatgtcatttactactaattgttgaagcgtctctgattgcatttctcaaaacttgatgtttcatggtctcatggatcacaccatcctattgtttcatataaagtagttatcacagcttgttttacttctcaataataaggtagaacttaagtgataaaaaagctaatactactggtagtatgtagaattattaggtttgcacttgtttttacatctaaggatgatagtgtaatgctattaatgacattttgaaagcaaaaggttagtacattctgggttagaaggctagaaaccccatacgtgttctacatttccacaaaaaattatgctcctattatacagcatcagatgaagtttagttagcagttagcacatgccaatatgccatcacacaaaaatatctgcatggtgtgtagcctaccagaaatttatactaactcttcaagtgctttcagtagtgttgttcggttagtctttaccaatttctatgcttctaacagcatttaaaaccaactaccaacaggatggggtatttcttcttccagcttgctgtgatcctttcaatgaaaaagctcttcgtgcagctcgtggagcctcattgcagcttccagttgtttctggtaactggtctgatctgcatgctttgatggctaaatctgatatgaagatgctggcaggtcatccagaaagcagcagtaatggatctgaaagaacacatgttctatctaaagaactagcggattcactgatgagtgaatcagtgtgcttagtgttaggaagtgagggcaatggcctttcggcagatacccttcaagcctgtgagcttgtaaacattcctatgcaaggtacatttgaatctcttaatgtttcagttgcaggtggtatcttcttatttatgctacaaaattaacagcaaaaaatggcagaacgttaactgtttaagtcatccttgattttttaataattttattgttcttgtccaatctgttacatttggttcttctttctgacatcattgctgatagcttgatatcaatccaaagtgaaggaacaaactgttaagaggaatgcaagatcttggttgacaaacaaaacaaaatgagaacattttattatataccctccctttaaattgaaatgaattgtttaccctcctgcgccgctgacatgtgggatcatctaagatcgctgacatgtggaccaggagggtaaatcctcaacttcaatctaaatggagggtatatgatcaaactttacctgttttgtcacaaggatcattggatggcactatatgaaacctagtaaatgatgatggaatgaactgccgaaagaattttaaaatgaactcattgttcagataaccaacacaactttgtgtaattcttgtagtatgtatttgtacaactgaagatcgctatgcaatttatgaaagggatccaccataatcactgcagccttgcctttggcccttgaatatagtagcttcaatcaaacacggtggtcctttatcaatacgagccttttggaacaggccagatcagtagtcctggtccacaagcttatgtaagttatctgtgaaattttgttgattgttacaggaatccttctatcagcccaagcatttactatgtagaattgaaatgttagagtacatttaacagtagtcagttgaatcattatgcaaattttgcggtaaaatgtccatttagacactggattagatcttccgtatctattgatataatcttccaaacttaaataatctaataggaagctttaagacttagtccagttgagatatgattcattgattgagtccaactttatgttctttcttgagctggaccgtccaaatgctataaatgactagcagctttcagtattgcttctcgctgctgtgggctgtggaatactcaaactgtaatctaattaatgatacataagatcagcagaaactcctggctttgtcagcaccgtaatgacaccttccacatatttattatgggatcttacatgtgatccaccattgctgactgaaaaaggtatcgtccttaatcgagacatcttgcacactggattttgcagcactacaacttatttcagccccaattagttggtttccagaggaaggtatgtcttttcaggtgaaagcttctttgtttagcctgtgagagcatcctgagtcatatctcatatgcatacttagttctttgattattgtactatacatgtcatctctgggaatgcacgtctgtcattcactgaaacggtggtgctccagtttccctgtttctcttgtagtgatacttacctgtactcctgtctatagctgatatgtggattcctctgacgacatacatgctggtgtaaaactgctcatcttaccgtgaattttgtattttctggaaaagtatcattggctccccaaacaatttttcgattgttgatggctaagttttcttaacccttggtaggtagtttatttcttctgcaatgcagtgccctatacattatggactgttagtgttcacttttcctgtactctgcaactgggacaaatatcatatcttctgtaggcaaagaggcattacattatgtataagttgtatgctgagaaaccaaccactaggtgcaaaatcaaacctgatggttctacatgagccagcacttcaatattttggcacccaagtgctagtggctgatgacaaatttaagatagaatacctgtgtcaacctaaaggagacacaaagaggcatactgatggaaataaagttgaatttgattcaccgacgcattgtttggcactgtggattgtagaatattaatttgttgaaaaaagcaatgaaatgacctttgcatttagtatttaaagaggcagtgctggaaacgtagttttctactgttttattattctattcatttgtcttgtgtttaatagataataacttgttatgttaggctgtgttcgttttcttgtgttgggaacttattccttccgcacagaaactgagtgactcattagcacttgattaattaagtattgatttatttattttttaaaaaataggttaatatgattttttaaaacaactttcatatagaaattttttacaaaacacacattgtttagtagtttgaaaagcgtgtgtgtggaaaatgaggaaggtaagttgggaaagatgggggaagaacacagcttaggagctttgggaaccaattaagaacatgggctgagaccctcaccaaaggagatatctgtatgatgacaaatcacctctgagttttgctcttttgaaaagaagttctgatgatctaggggcatttatattaattatggatttgggagctggtcagacttaaaatgacaggcagtggatattttcctacatgaagtggtggaacaacatttgtcaacttctattttattatctgctattctttggtaagcgattctttcgtcattctgcgttatacattcagtgtttttcctgtgacagtgattggttgatagctatactcatttcaaatgatgattgttttgggattactcacaaaacgaaacatcaccagctcattttagaactgaatgtggacagttttcaatcccagtagtcttctgctggccaattctctgccttgtactgtagcatgctctaaattactctacctgcaactattacaaccttgtgcccactgtattcttgttatataattgctaatttcacgcaatttgtgcatgtgtactttaatactggatctgtgctaactgctaagcatcactgaagtgatcatgtgcttctagcttggttttcacatgtctagttcagaagtgcaatcataaaccagttcgactaagtcctcaaaaaggagaaaaccagttctcgtaccagttcagaagaagaaaccagttctggactaatcatgttattaagatacatacagatagaatatttattgcatgttgggcatgctgttgtgtactcatctcactgtactcaacctcagtgcatacccaatcaaaagctatgatacctagatgtttcctttcatcatctatgtgtttagctcactaatcaacattatcgctttgtcagcatgccaatacaggcaagttgatttagtagtgtggccagcacatttcccaaacaatgttctctgttatgataaaggtcttaagacccatagatatatgcttttgttgaattgttgggtatgaatcatcaagagctggtgccatttggcatcaactcatttttttttgcagtttgttagaaagggattggtgtggttgtgtactgacaaatctatggtattcaataagaaattagcatagggtgatagggaggtcactgattggtgcatcatttgcttaattaagtactgccaggttggtgtgttagcctatctggagagagagagagagagagatcatgcaaatcaaagctttttggtagctcatgtcagtttgatacgtgtgcatgcatctgaatgtagatcggtatccttccatttgtctcttcctttgcagatttggggattatttgtgtcctcttttttttttgtcagaagagttcagggcattgccatgtggctggtatatatattcctgctttatcatttgctgaagtccccagaagccacaatacgttaaactctttatatatcagggaggaaagaagtagattaatttgtcggtgttgttaatacatttccctctagtttttcagctgtaaactcctgtgcctagaaaaaaaataaaaagggggtactatcacgtcattatgttaattcggtatacaactattttacttctgatcccacagatgtaactgtatcttgtatataattgttaattatgtttctccaaatacaattttctgttctatgcacagctatatcgatcaatcctcgctattaaaatttggactcatcatgatctactggtttacaaagttctctgtcttctattaatattgtaatttctaggcctttggaatgagtacagtggtttttttcaagtttgttttgataatataatagattgatgtcatcgacataaactttcgcataatagaacttggaatcgtgttactatttttctagagttattttttcaccgtagttttctgtagctagccatgggaatggtgcctacctcgactggcagggagctgttaggagcagacgagcagtgcaccagcctgagtttgaatccctttcagtgcatgttgttggtaacttttttggttacgccgtcaatcatgatgaaaacacctaatgttttgcggtgctacaaagtcgtcaaccatctcgatctagataaatctaaaccaaggtggtttatgtaattcaaaactgactagttgaagctggcttagatgaaatagggataaacatttgtctcgtgggtggaacggaaggtttttgggacagacctacaaagagattcgcacacccacatcgaggatggacggctttcagtgcaaaccgacaaagatggatgaaaactagaaagaaaaaaagtgattggctaattgtattgaaaagagattatgtgttcagttgaaccggccatagcctttataaagagactggtcttgtctcctacagaatcttctccacgtcttactcaaggtagataccaataaaaactcaaaaacctcaacccaagcaaggaagcctgagacccgacgaaattcgactcgaagtcggacttagacggtttgaccgtccatttgtcgccaatcagatcgatcagccacacaccggcgatcatactagccctatgtaggaaatcccgatcttattcaaatttgatcatattttcttatttcatgtctagatgtcaaatttggatgttaacacatgttttctcactactttatcagcaatggatgctaagatcctctttagtaacctaacacatttttttgtttttttttaaaaaaagttagccatgagtccatgacatcctaggacaagagtaaaaaaaaaatcaaaacagataaatcaaacttaaaagaacacccaaaattcataagatcgtcgatgtgctgcccaagttgccgtccacggcgacgtgacaagactacaagagaagggaaccaaaaggtggcaatggcaaaatccttggttctgctcgactgctcctactcatcagtcaccgaggcgaaaggcatggctgttcttgctccaaacccgtaggccatccactgcccattcgtctgcgctcacaagttgcagttaatgctaaacaccaaaggatgcatatacgcaagtatatattccctccgtactcataaataaagtcgtttaaaacaatatttaagtcgaaccttgaaaatatatattataaataactctcgagttgttgagtttgtaaatataaaaattatatgaatagatttgtcttgaaatttttttataaaattatatgaatataacttttccataaatattttttatagaaacaagaagttaaagttatattttgaaaactgtgtcgctgtagtccaaaacgactttctttacgagtatggaggaagtatgctttacaagtaggagtaggtcagatgaatctgatacagtaactatgagtaggattccatcatagagtttgcatgcactggcgtataagacaataccaacacgatcatatgagccaaaaaaaaggaagtccaataattaatccaactatccaagtagtactcgtttagattctcttaaaaaatcagtcgagtattgttaaaaaagaaaataaaatcagtcgagtaattaattcaagtactcgtttgggttctcttgaaaaatctctagctcccttcaaaggttggtgctgccgcttcgtcgtggcactttcctgctaacgaattcaaaaaagcgacaggggaaaaaacacttcatggctgtatttagttcacgctaaaattgaaagtttgtttgaaattgaaacgatgtgataaaaaagttggaagttcgtgtgtaggaaagttttgatgcgatgaaaaagttaaaagtttgaagaaatattttggaactaaacacggcgcaaattggataggaattgggaaaatcaaatcggtgcgttttttcaggtgaaaatgtcaagcagtcatgctgtgtcttgtgcatttcacggcacgatggtgaactcactcgagctattcaattgtgaaagctccaaatcttgtctcggtcatgtgagacatctccggcgacgacgatgggtaaattactctgtcggtttatttatcttttctttttttttaaaaaaaaagacatgtccagccacgtgactgaactatgggtaaattactctgtcggtttatttgtttatttcaaaaaatataaagatgaaatactaagaacatcgtgcccctactccattcccaatatagatttttggggatttcagtcggaaaaaaatacactaatagtttccctgctctctcacaaaaacgaaattcccttatctttcattctcactctccacaagttgaaaaccattctctcccaaatttcatcttttgagcgagactgcaactcaagagcaagcaggagaatgaccctgctagctaaatgggtggcatgatctgataatgcctaggtgaagggtgatcatcttttcattttagagagttaaatacagacatcaccttcctttctattttaagaagttaaatacagactatggaagcatatttttaataagaaaaacgggtcaaagttatacattaaaacaaaataaagtcaatagtgcattgaggtacaactgttaatatcctatatgacaaaagaaaacaaagactaattaatcacacttttaaaaaacaacgtccatggtgcaaattcagaagttgaaaacatacggcaacaaaaaaaattaaattcgaaggggaaaaaaaatgtcgaggaggagaacacggtcgaggaaacaagatggaaggaagcttcacctttaaaatatgcaaaatctccacaaagtcaactttccgcctccgcccgtagacttctttgaccgcatttccaccgcgcgtttgactttggcatctttgaccgccgccatgtcatcgagcctatcgcctcttgccacgtcagatcctcgcagctttcgtttcgcctcctccgctccgagacgaaggcacgaagcatgctgaaggccgccacgtggcacggctcgtccaaacagcagttagtttttaggctatcgctggtcttgcctaatcacgaagcaaattagttaagcgtgtgccagctaaattcacagtgtaaaccttcgtcattagctagcagaccttgtcattagctacataattaattatgtgttactcctaccatgcaagcttaaacagtaaaggctgtaaggctccgtttgaattcatggaggatgaagattaagtaaaaaatacataaaacaagaatattattattattattattattattattattattattattattattattattattattatttattaagttatttatctaatagtttaaaacaaaattaacttctatatagaatttttttcacgaaatatataggttagtaatttgaaaaatgtgttaacggaaacgagataaaatccatatcttaataaaaacaacgcgttacctggattaatatgctttgtcccattgtgtttacgcgataaattactggactaactaactcgccgcacaaacaaaggttgctacgcgtgggacgtgaccatgcgttgtcatcttttaattttcaattttttttcctccatgggcggcgcaccgtcgttgttcaattccatttccacggaataaaatgggagacgaaaacggtggttgatgccgtacagtggactaattaaaaattatttgaagctctttcgcttatcttttggcgtttttttagggatggagtgtaatttatggggcacttgacagttgacatcctaaaaagacaaggtgtgtatatcagtctctcgatcgatggtttgacaatattaattagcgaggtcctcgcacggccgaaaggtttagcaaatgtgaagattcatataggttgcctaattcctatttatttgcaatatatatatatatatatatatatatatatatatatatatatatacacacacactactatgctaccggtatttggtgattttcggtatgatgtattctaatttaaaaattttatgtatgatatattctttttttttagaaaaattcaggagtaaatttcactttgggtcattttttattactgatgttttgtttttaaccaccataaaaacaatgttttcactttgaatcggatacttttacctttgtggcactttgaaccatccttaattcttttatccatctatattaaacttataatatgctgaagaaatgatctcatatatagctgaggagttcattgacaagtagaaaactgacataatcgacataatcgagatcgttcagatgctctagaagtaggttgggtggtctaaaataaaacaaaaacaactttatccggtccaaagtaaaaacattggctaaatggtgatccaaagcgaaatattgataacaaaaggtggaccaaaatgaaatttactcatcaacttttgaccattgatttatcataaattatatttttaatagctataaatccaatatttttacacgttaatatatacttctaattgaactaccttgatcaaaacctataaagtcgattatttcgtatgagggcgtttataatttacaaatatgccatgtaatagggcctatttagatggtgaaatgaaaattttcgggtgtcacatcggacgtttgactggatgtcggaaggggttttcggacacgaatgaaaaaactaatttcataactcgcctggaaacgcgagacgaatcttttgaacctaatttagttgtcattagcacatataggttactatagcacttatagctattcatgaattaattagataaaaaaattcgtctcacgatttacatacaaagtgtgcgattaatttttctttgtatctatattttatactccatacatatgtcccaatattcaatgttatgtttttgcgaaaagtttttgggaactaaacagggccatagtgtttggcatgagaaaattatgaactcagagcccaagcaggagcaggaccgaaaacgcgtgactagtgcaaggtttgaaaatagtactccttaagagcgatactttcaaatctttatctggagaggctcaagtcttttttttattcattttttttagtttcatatttaaatgtcacgtggaacttatgaatcctaaacacaatgcctaactggcgtcacatcaccgatcacactccacccccattcaaagtttcaaacaaactccaccattttcgtatgaaattgggtgtgctcgcgcgcaacttgatccacacacgtacgcgttgcccatcgatctccaacagaattccgaattcaacaaactctaatcatcaccaaagcatggcccttgcccaatcccagctttcttccaaaaaaataaagaagaggtttccatggcttccaggcttagatcaccgaaattcaataaagtttatctgtcctttactttgtttcgccattgccatttatgcacggcggttttcaattaaaaagcagtgaatagtgtagccagatttaccaaagtgtggttgctaccgttttcatgtcaccagtagttgtctcgtcccaagatcacggccaggttcgatgaaccggccgcggcaacccaggttttgaggatgatgaattgatccgcatttgaatcaatgctaagctttgcgttttcgtatcacagatttggcgggtgatggacggaattggcgggaatggttaagtgtgtgcaccgttagctggaacccactaattaaatggatgcggttttgatcagcttaattgggacaggtgacaacggccggccgtttctgatgcagagatagaggtaagaggtatattcagctgatgaatctgttctccaaaaaaaaaaaaagatgatgagtcacctcactggctgatgctgatgctggcgtgtatccaacggatctctctcttgcttaaccgtctttttagctgaggtaggacagtgcctttgattccttggtcgagctaactgatggatcaatgacagctattagcaaaggctgtttggattgtaatttaagcaatgagaggcaagagaccaaaaaacagtactaccattattactactgctcgttcttgaagaacgatttaaattttagttttgctgttaggggttgttaatttgtatctcaggttttgttaaagctggtttaccttaatcatgttttagatcaaatcttgtttgtttggcataagagaattgtggatatatataaaaaaacataagttctctcaaagtaaaaaaaaatgttttattcccttcgctcttctgccttttctcttgtgggccaaacagaggatttggattttacataaatctacggtaacagaataataaccttaaacctaataattcgtataaaacttgtttttacttttcccatccaaacaaccactaaagacgtctgattagctcagtacttaaaatacagaaccttatgggattttatcttttttctttttgaaaaaaaaactactccctctatccttctctaaaagatcttatttttatctatacgtttggagtatcttttactccctccgtttcacaatgtaagactttctagcagcatctatatgaatatgggcaatgctagaaagtcttacattatgaaacggagaaagtaatacgtatctaaacaagtatttgcctagatgtataaccagaaataatgtcttttaggatagagttaatgtgcagttaattactccctccattccaataaatacatgaatatatccaaaatttatttaaacattgatttttttaggcgaagtgagtattaattaggggtaatctctaatacatgagtcattaatctctactgtttttaataaagaatcattaaagatgtccccttaaatctctataagggttcttctgcgcaataatagcatgtcctttaccatttgaaattacccctcaattgctgaccagatatttttaatggctcgtttaattgttaaggatcacagtggtgaaccattagatattaggctctgagtagaagtacgtgacttgaagatttgtgcgaacctttcaacatgttgaaattaatccactaggtaagggatttattggggtgccggacattaacagagggggagacgaccaataaccgatggtgcattaattggtgtggacggtagaaagagcattcacgtacgctgccactcggtaatgcttgaaggagggcaatgcatgggtctattccctcggtcgaaaaaaatgaacaaacatttgtattagaatatgacatatcctaatacaataaatctagacatactttatatttaaatttggtgtatcatatcctaatacttgattgatttattttacaccactagagaaaggggctttagtcccggttgggaacccctatactcctggttatacaactgggagcacaaatccaaaattaaagatgcccatctttagtctcaggtgaaataaccggagtaaaatggagccaggctaggtgcggttgctttttcttttcttttattttttttcattgcttttaacattgaatattgatttcactccatttccaaatcatcccaaattcgtgaaatcccaaatcgatcatcacatcacaaattaaaaggatcctctccaaatcctcaaatcgatcatttccaaatacatcacaaattcttaaaaaaaattacatcacaagttctaaaaaattcatcacaaatacataatatattcatcacatcacacacaaatcaaatacatctcagatatgaataaaaaattctcaaaaaaaaaccttagaggcgctgcccaccgctgccacgctggcctgccgccgtgccacccgcttcgctactacaagatgagaggagaggataagagcaagaaaagaggagaggataagatagagagagaagagggagagatgaggaagatggggagagagactttgcaatagtggatttgaggataagttttagggattatatacgacgggttgagttttagtctcgggactaaagatctaaataatctttactcccggttggttgggactaaagttgtgatctttagtaccgactaaagattctcggccccctgacaggcctctgataggagatgaaccatgactaaagatcatctttaatcccggttgatcaaaaaaattttaaccgggactaaaaataaattttagccccgattcttattagaatcgggactattgtggaaatcagccgacccagcaaagaccacttctctagtagtgttaggaccaagagagtatatttcaaagggggcaatgaaagagtgagatacacagattttatttgtcaatgaaagtttattgtctcaagttgatttattttgatatggaagtagcagttttggagttcggatataaatttgtagaatacatagatacatgccggtttgatgatatatatatatatatatagagagagagagagagagagagagagagagagagaaacttttaaggcttctgtgatttttttagagcaaaattcattgataaaaccttttcgtctccggataacattttgatatcaagaggaaagttttatttatctatagttgatagttttcatagactttttttaaggctccaacaaattttgcaggtatttccttagtgaacacatttgatgttcgaaataaagggtactaaattagtgcagtaactctgtgattttattttatttttttgacaaactaaccgtgtgatttcaagaagtcgaaatgttatggaaatttgttagggcatccacactatgctaaaaagtaggtagcaaggagtcatattacctggttcactattgtgagggtaggtagtaaggtggatactactattgtgagggtaggtagtaaggtggatagtagtatgatccagtagtaacactactaccaaataacaagcaatcaacaaatattaaaacactctcctttctcactcccactctcttattcacccatccattcctagtaataactaaaacaacaactcccttcattgtaaaatataacaacttaaaattggataggacatatctttctgtccagattcgtacaactaagatgtgtttcattcagtcatatgttgctacattttgggatggaaagagtacatgattttgtgttccatccttattacccacttgctattcccttcattcacaaatgatcagcatatatgatttgtgcacctatgccaatgcactcccacatgccacttaaatttacatcgattaacctgcaacaccgttttttcatatcctatgcatgcaacaagggaaatttgcaccaatgatatattgcttgcatgtatacatgcatgcacctcaaattacaattagttgaatagtacattgaactatgcatgcaaaagaccatttaataatacacagagaaacgaaaagccaggtataaaaagtactatcaaatatgcttaccatttctatataacgttgaaaaaaattatatgatgatcatttatgaatggagagtcttcctcctcattatagtccttctagaatccaaggtattttgtcgaaatatatcctgtctttgaacctttgtatccctaggagagtactacattataaggaggcccttagaagtaatcctctcttcaatgtcctgactagtcgatgcgatgtgcttacaggctacagcaaagaagggtacgtgcagctggttggaagtcgaaaccgcccgcagctgtactctctttatcacacgaaaacaaatctatgactagatgtgatatattttaataaaacgaatctagacattctagtacaataaatctggacagaaatatgtcttgaattcgttgcactaggatatgtcacatccaatcctagttttttttttattttttttacggagagagtagctagcgagagaagttcaaaccgcatggcatacacagatcacacgacacgaacatgctagctagatcaatttaccagttaatttgtctaatgctctattcatcttctagcgcttagactaacaaaagaaaattaaataagttgtacgaaatgtacaatccaacattactgggtgtgctcagtttcaaagtcatgaacaaccatttagacatacaaaacaggtggaaaaatgaaggcgatgcaagaaattttggtcaaggcgtatctagaaattccaagcccgaccggcctaacactctcgactcgtttcagaacattcagcaaaacaatactccctccgttgcttctttaacgtttgacatcattaacttttcaataaaaaattaacaatttctcttcttaaaagaagttactccctccatcccaaaagttactagagtacaatataagtattttttttactataaatctggataagccaaaagttattatattttgggacggaggtagtatataattattatttttttattgttatttgctttactattaaatatactttaatcaatttttttcatatttgtataatcttttaaaaaagaatggtcaaacgtacgtcttcaaatattaaaaaataggggcagtaattaattactgtacttttcctagcccgagctacttgtaaaaacaatatacagccggcatgtcacattagtgtacttgccttgagataaattaatatagagaaaaaaatagctcagctcagctctctgaatttctactactacaacgtggtggctcttctgaactctgaacctttaatatattttttccctcagcgaaagagaaaaaaaaatcaaggccggacgacgtactggcagagcaaagatccgaatcttggggcgtcacatgccgccacatgtggtccttagctcgtctcgttgttcttgcgtcgcatgtgcatggatggatggatcatgcatgtaagctagttgcacttgcaccacactgaccgcacgcagcagtggcacgcctcactcacgtcccgcgtattccctctccgttccttaagaaaagaatctaatacgaaaatatgatatatcctaaaactataaatctaaacagaccattatttagattgatagtactaagatgtactcactccgtcccaaaaaaaatccaatcctagattagaacctggacacatgtgtgtccaggttcatgtgtccaggttcaaacttaggattgggtttttttttttttgaacaaagggagtatgtcatttttagagacgaagggagcatatttctcttgcaaccaagcacaaacagcacaaatatttattatagacaaaacataccggacaatcctctctctctctatatatagagagagagagaggggcaaatataacgtcatcctgtctgtacttattttttccgtgtctgcaggacaaagatattcataccgaatgattcaatattaacgtggtaccatcaataatttgtacggtctttctctctctctctcacacacacacacacacatatatatatatatatatatatatatatatatatatatttgtgtgtggtgcaccagagctgtccttgatcctttatgatattgcttatgctattttaatatatgtatttcttttgagaatgatgaatatatagttgaaaatataatacatgcatataatatcatatgcgtagtagtatatgatttgacctaattaggttgtgcatacgtctttcacataatccatcaaacactagatagatcatatctaggacatccattgtcagtcaaagtcaccattttcgccaccacgacgaatctaattccatttcgtgccagaacgtactctcgtcgaatgtgagagcgaaagcagtatatccacactccatgactccatatccactagccctcctcatggatcaccaaattcccctcctcccttcacaatcagccaacgtgcagtgacacccaaaaatccttggagtccacccaggttcaacgaacctggacgcctttttctgcctccctaaacctctaaaacccgtcccagttcaaaaccatgtccaggtccatccaagagaggttcaaattacactggctgagccgcttaaaatcaaggtggcaaccggccggttgctaccgctttttgacctggtttgcattgtgaggttgttttttcttctccccgagataagaaaaagcgagcgtttgccgtttcggccggatcggcggcctcgggcaacgtgctcgagcaggcttgtgtgtgcgcacacgagtcagtcaagtcgccacatggccggaaaacacaatgcgttggatcgtttcgtggcagacaagttttttttttgagtgattccaaagaggagcaaccagggttcgtaattctgacaaaaaccggctgtattctatgaaatttcgaccttttgatatggctcggaattaatttttggttaaaattttgaaggttaaacattaagtttggtcgaaatttagtcgaaatttatcgaaaaccgatcaaaatttgtcgaaaaccgtgataccgacgggctcgaaatttagtggtcaaccggtaatataaaccctgggagcaactttggtgctcccttaatctcaaaagtatctctaccgatcttgcaatttcttgtgtcctataaaatacatagatatctttatattaggtataaatttggactatcttttcctatgaatttgagtaaaccaaattagacatgttcgcggtatagccgctatgtcacatctgctgacacaaagtgctattcgagctagctgtaccgtagtcgaatgagtgcagccgaattcataagtaaagatacctatatttttggtgacgagactaataaaagtttgcctataattttcctattttttagcacataaaatgtacaaattaagggtaaacatacaataagcacatcattgtattatatcaataaaatcgcacgatcacgctgacactattttgtttcctaaaatattgtgcattgaaattgcgatttttaacacatttgttgcaagacaggataagagaatggaaattgaatgaaatctactcggagcaattgagaattagagactccattttgaggagggaatgggcaaacaacacgccgaagataccgggagaaatgaatccgctatccaaaatcgagctaatatagcactgttactcatatgaatttctagatttttttcctacatatatagtgcaattctatcatacagttattattaatttgtaataggtgtatttcggtcttattaaactccgataataatggtttaacaattactccctccgtttcacaatgtaagtcattctagcattttttacattcatattgatgttaatatatctagacatataaatatggaaaatgcaagctagacttactttctccgtttcatcatgtaagtcattctagcattttccatattcatattgatattaataaatttagatagatatatatgtctagattcattaacatcactatgaatataagaaatactaaaatgacttacattatgaaacggaggaagtagatactaataaaaagggataaaatatacccaaacaatcgagccttgtatatgtattttatctaccttgatacgattgggatcaaagtaatacagtagtatattcttgctttcatgggaggatcaaaaaaatgataacggtataaaaaaagcagtgaagcaagctcgcagacaacacgccggatacaaaggggaaaccgaaataaaaccgccggagaaaaggaaatgaatatatatattttcaatttcgtaacgaaaaaagatatatatataaaaagaagccttgaactccgcctttaaatattcccacctcgcctcgctccccttccccatcatctcatctcacaccaaaaacgaatcagctcgtctccttcctccgcctccgcctccgcgagctcccattccattcccggattgcgccgccgccggtgttgcagcagccatggggatggggccactagagaacgccgtggtggacgcggcggcggaggccgtggcggcgaaggccgcggtcggcggcgtgggcgtggggggttcgtacgcggtgctgcagtgcggggaggactcggagtacgtgaggaaggcgtacgggggctacttcgaggtgttcagggcgctgctggcggaggacggcgagcggtggcgggtgtaccgcgccgtgcgcggggagctccccggggaggaggaggccgcggggatcgacgggttcgtcatctccgggagctgcagcgacgcccacgccgacgacccgtggatcgtcgccctcgtcgacctcatccgccgccagaacgccgccggcaagcgcatcctcggcgtctgcttcggccaccaggtgccacccccctcctcctcctcgtccgccatggatgtctccctctgttcgtctcggttgcgatttggtttggtttgctcgggggaggggtgaaatggtaaatttgctctttccgagatcggcgccgcttgcgattacctggttggagtggcgttgttctagcgacttcttatggattctttttttttcgtcttccttttgcttttttaaaaccatgcgcagtaaaaattcgaactaattgcattatcgcaggttaaacaggttgaatccgagtacaaaatttgtaaatagtaattcataaattggggggtaaacctgcaatggcaactgcagaagttcacaggaggtgagcttagcctttgcagtgatccgcacggactttttttttattttgaaaaagtacttcttctcaaataaataaaaattgcttaaacttaaaatatactctatccgtccaaaaaaaatcaacctcatactgaatattgaccatatccagatttataagatataatatatcttgagtttcttttggacggaaagaagtacaagtataaaatcgtttttaaaactagtagagctataatatttatggggcgtgaatcccgtgggcccacaccgaaccgcacccgtggccagaagaaattcccgtcttgtgcgttggacaggtgggccccactccctgtcacgccaacgcattagcctggccgcttaaataaaagaaaatgaatttttagctttcgctaaatctaattccggacacggttgatgacagcctggcacagtgcgccaaggcggttcacgtgagctgacgtggcggcaccggctgagctcacttgctgttgcacacacacaagacaatctagtaatctaattttatttaatatatattttttcttctctatatttggcggtaatcaactcctccgtggaattgctgccacggaagctgctcggtttgaacggcacacggttggcgtgatgcatctaaaccggtgaaggcggtcagcggtcgcttttcaaatcaaaccaccagcgacagcgcccaaagagtgtgatttttgtgttaggttggggtgggcttacatatacatgtttgaatccggtcgtttgtccgaacgagcgggaaccatggttacgtgaggactctgtatacgttttgttgtaaaaaaaaggatgagtgcgcgtattcaacttactataattgttttgatttttttttaaattttttttaagagattgcacagtctgatctgtgtctatagaaaggagatagaagtagccttgtccctaacttgatcgaagagacgagttgttcttgtttgtgcgagtagggaagcgcaacttgtgctgctgttcttgggggacattgatccccaacttgtcagcgggattggtttctttagtgattagtataatcgtaggatggagtcccgtaccgatcatagcttaatatccaagccaagcatcgtccgtgatttctgttcaaaagtcaaagctttgcaagaaccgtacagagctctgtcgaagaggtcagcgtgtccatggcagcaacagctgcgcaagaacagttataatttactcctacattcggtgtgccgcgttagatctcgcaagctgtctgaatccgaaaatggatcatgccagctcagctcgcatgtactccctctgtccaaaaaaaaaaaagacaaaccctggtttctgtgtttaacgtttgaccatccgttttatttgaaaaaattatgaaaaaaattaaaaagacaagtcacgcataaaatattaatcatattttatcatctaacaacaatgaaaatacgaattataaaaaaatttcatataaaatagacagttaaagttggacatagaaacctagggtttgcctttttttttttttttggacggagggagtactccactgtctgtctgtcggtgtgctctcctcctccacccacatggctgggctctgcgaagctctaccagttggaattagttgaaatgtttgtgatttgtgaacgagctggatgtgatgcgtcgccggccggccccggcatcggtcgatgatgaccccagtgtggcgaggatggaatcgatcgcctgtcagaaagaaacacgtttagctcttaaaaatgccagctttggtcttaattattcacgcacaggaccgagttggctgttgatctggtcccccttttgaagatctctgcatgtgattgactgcagtctgcaacatttgtttttatttttactggaaagtttcagatatgaagtaataatatagttttgccgtacaatggttcagtttcttgccgtttgaaaaaaaaaaaacaatctttacacaagtggctaacagaggcgtgatcactctgctgcaggtcctgtgccgagcgctgggcggcaagacgggccgatcgaagaagggctgggacatcggcgtgaactgcatccaccccaccgcggccatggcgaggctcttttcgccgatcaagctccccgtccacatgcccatcatcgagttccaccaagatgaggtacactttttcgccgtttcgttttcaaggtttgctctgatcaaagcttcagaaatggtcaatgacctgacataacttacatggcaaaatgcaggtgtgggagctgcctcctcaggccgaggtgctggcgcggtcggacatgaccggcgtcgagatgttccgtctcggcgaccgcgccatgggcgtccagggccacccggagtacagcaaggacatcctcatgagcatcgccgaccgtctcctccggaacgatctcatcctggtaagctacggaattgactgaactctctgtggtttcttctgtctactactgtagctggtctgaaaaactgaagatttgtgttgattacaggatcaccaggtggataaggcgaaggcgagcttcgacttgcggcaaccagacaaggatctgtggaagaaggtgtgcaggggttttctgaaggggaggcttcagtcatcgcagcagccgcagcagcagcaacatcagaagcagcagaaggcggcgcagctggtgctatagtaaacaagattagtgagtgagatcagatgggggcattggggagcctagattaatccttattttctgcttcagatttgtacaggaaaaaaactatttattcggagcaataataagagagtaattgggggtggcctaattagcaaaatcccatttgccaatcaattcccatcttccatcctacattttcgtcacgcggcacataacaaaacgtacttacatggatgctcgttcatgtatcgatcgtcagtactgtaggatgcttccaattgaaaccgagtcccttttcaacttttccaagaaacaaagctgtgtccatccacagcgcccaaacctgcaaagtacaaaaacactaactttctctttggcgtcatttcaaaagacccaaccaaccaaacaaaacaagccagtaccaagtccctctcatggctcaacagtgttgtgtttgttagttggaacgaacgaaggacattgtcatcatttgggctacagaatccgctcggtttcttggccgtcctcatcgcgcgagagagtctgccaagatccaagattccggcggctccccggccacgcacgcgcccatctctcgcgaacgtgacgccgttgcggcgttggtgaggacgaccacaacgcaacgcagcacaacacaaacgcggtagaaatgagttgaagagatgtggccagccatggccatatgtggggtgcggggggttagtgtagtatggacaatggaccaccggcggagcgccgttaagctggtggagacgcgcgagcgagacggatccacgcgcagccttctccgtaggcagagggattccgggaccggcggccggtggctcatgcttggcggagggggaccaattgatgcaattgaaatggagatagctacgtaacggtattccgtttaaacgggatgatacttcagaggtactccctcctctccgtctcataaaaattatatttctagctccaagtctttgtcctataaaaattatatttctagtcatgtggggcccaaccaattgattcatctatataagtttaatttgggctgctaatgcttgtaattttattaagtatgctaattatatgggttaattctctcaaacttccttttaatcatttgtatatatggaatgtgtgcatgcagtgggttcattaaataagttattgtggtcatttttcaatcctactattttatcctaaattagctagaaatgtaatttttatgggacggaggtagtatcatctgatgtgtggatatcagccgatacctaccaggtatctgacaatactttagaggtttcatctcttctgaacggaatatcgtcctgtagcatttttcattgaaatttactccgaactatttagttttttttagggggtggcaattaggatatttatagagtggaaataagattctatttgctttactactttatccctattttttctaagggaaaatctgctctaggacactttaggctttattttgttgccaattccaaccttacttaacttgatgccttacaaaatttagtagtatttttgagaggaaagtttcggaagtaacaaattttagtagaatgtcattggtaaggtaatgtttagttcgttaccctactaaaatttggtagcactacaatttaatacgtcgaaagtggtaacaacgtgaacatgccatctcactttgatgtgaagttgaacgagggttccatagcaatgccttcaaaaaggtgaacggcgctcgagggcattgttgtcgctccaccagcaagccgagtaagactttcacctcagagtccccatacaaccctagcatccacaacgaaagccaccaaatttcacatacacaccgaagctacctgcactatgcacactaccacctgcacaatggtcggactggtaccattgacaacctgctctgccacctagccagacccagggagccaggtcgtcggtgctactagatgactaccaactagacagtcccctcacagagaccaccatataacctggatgtggatctacagaaagagaggaggaggaggagggggggggggggggtagggagaaggaaagatggggaaaggaagagg

SEQ ID NO: 7871 - DNA, 1601 bp, Oryza sativa
ttcacttgttcttggggtgttcttgggtttagcaccgggggtttcttgggttttggaggatgatttttggcgtggttgtggtttcttgggatggatggatggttttttcagggtggcgagattggtttcggttcttgctgttctttggtttcaaggatttcagtttcagggtggcctcggtttgtggtagagatgattggtctctttcacgcgcttctgttgttcggagggatcttggtttctgcatgttcttggatttgatggatacccgtttgtttgttcttgcatgtgtgttagtagttcgtggagtcgagtcagagttcagaaaaatgcagattttttttgtgtgtgcgcgtgtgttcgaagttcttgtttggttggtgggctgtgcagcaaaatcggcatgaactagttgtttcttgtgaattccagaatgtcaggtgatattcttggaataaaggttcatttttttatattcggttactgttcttgtcactctctgatctctgattattatattcgacggtaggatatcgtctttcccccacatgcagatgttgactgcttgctttagttttctcgtgtgtgtgttttttttactcggttcatatcgttttatggttatttgcatttgaagattgattcttgtttattggaatctgttacagttcttggttccgtggaaattggaatcataggtctcatacttgaatgttgaaaacatattttattattggtagtcaaatctttattttgtttttcttgggttaccatcatgacaattgcgtgcaggttctggtaactttctttgtgccgatttttttaagaataaaaaaaaactaaaatttcaattatttacaggagaacatcccgatcgaagaagtattccagaatttgaaatgctgccgacaggggctcacttccgaagaggcgcagctgcgcctgcaactttttggtccgaacaagctcgaggagaaggaggttgagttccttcatctcatcttgccattgctatcaaagatttacctttttcttgttggaaagtaatactataattcagttcatttgcgttacgtttccgcttatgctgggtcattgatggttgcaggagagcaaattcctcaagttcttggggttcatgtggaatccgctgtcatgggtcatggaggctgcagctatcatggccattgcattagccaatggtggggtaagtacttaggagtcttagacataatgacaaaatctgttactcctatttagtacttggcttctgtccttttctctgttgatgaatgcagggcaactgtgtaagtggtcccgttccttttaacaatatatgtggtgttatcatcaggggaagccaccagattggcagggctttgttggtatcatcacactgctacttatcaggtcaaatatcagtttcattgaggaaaacaatgctggcaatgctgctgctgcgctcatggcgcgtcttgcgccaaaagccaaggtctttcttcaatctccacttttattatgagatatccactctattgtccatattgaggtggagcacttttgaatattgaaactcatgttgtgttggttgttaggtgctc

SEQ ID NO: 7872 - DNA, 8142 bp, Oryza sativa
agtgacatgccttagcctcagtttgcgaataatcatcactgtctccaaaccagtgctggctcctccatattatatccctgaaaaaaaaaagatacattggagagaacatgttacaagatcagatgtacacaactggagagtagtttcctagtgtgtttcataacaaaatcatgccatgtgcaccaaatttctcaccatcactcttggcttctctggccttgtttatgctgatgcttcccatccccatgcacattagcacatatactttcagaacccaacactttgtgggaaactagatatactctaaaatatgctaccaatattcagatggatttattgcccaaagtcacaatcgttctttcattttttttctatcctttgccttctgtctagctagtgtccacagttctttctcatgtttcattttggaagtttatataaggaagatggtgatcagacactgcaagggagatgtgctagagtctctcgctttgtgaatagccagctcagttaatttggtagtgctggctgttctatttcatatccctgaaaatgtagatgtatgggaagaaacatgtagttctctactttgtttggtcaaagaaatagatgtggaaaaaactgaatttctgaccacttgaacctaagtaatgcgtgtcactgcattaagatgaataaagtttggtacaaccaaaaacaaaaaggaggcagaacccaggaggacataagcctaatctagcgacattaggcagctaacctagcgacattaagctggcgtaagctggagcagcgcggcaccagctgcactccagagtgccgcctcttccgccattgatctaggcctgtagcatcctggtgccaagggagaaggttgtgatgtagacattgttaattagtacttctttccttccagattgagaagacccagtactgtgatggtacgtgtagagaactcttctaagctgtttaggcagttttaatctactttcacagtgccacaggggagagctgagggagggggaaaagatgcttcacctctttggttggtccacacgtctgtccttttacgtcctcccacaatttttgcaggtcgtgcctaaaaagttgatttttacaagcggggtcttaattaagagccctgcttgcaaaaatagaggtattttcgtaagtggatctaccagcgaaaataaaacccagtgttatgaaaaatcatttattaaatatgaagctgcagtgacatccttacaagtcttttttagattttcctcatgaactcattggctgccacatgcaatccaacaaagtaactccactcttgttagttcatggaaataaattgtacccacaacttctgtaaagctagcgcccacatattgactctgatcttttcggcttccccgaattgctaaagtcatctatggttttgctgtgtctaactattgttgaagaaccactaggattatctccactatgttgacacattatctattggtacattgtagtttggttcccatacctgaaaaatgatatatgtgaagtccacaaaataggacactgaacagatatattaaaactcagttggtttaaggaaaacacacacacgaaattttgaaagagaagaactaattttataatcatgtgtgttaatcgatttagcagctagcacgaagtgaaattctagaagaaaaaatgtcgtagagatgatcacctacgaacacaacttctacgtctgcattccttgctctcgatgtctctgattctcatggacacactagttcagatagcaaaactaaagaaaacatagaatacattttccagagctactactcgctatctactcctacatctcatttttgctcttctttaaacacaactgattcgatttgtctttattttttctcttcctggtttctatatatatatatatatatatatatatatatatatatatatatatatatatatatatatatatatatatatatatatataatactgactggactgccacgcgtacgccatgtagaccaaaactactacggattgggtcgaggggggtaattcgtccggtttgtatagttgggggtgaagaatgtcggttttatggttcagggggtaattcggacgaccgtgatagtttaggggggtaattcgtactttttcctttattatatatctaagttacttttatcatatatataaattactttttcgagttgattaaattacttattatacattcataatatttttgagttgtttattttattatcatttttagtcaattccattatttgtgttgattaaatttaatttctagatatactcacgcttttacctccataacggatctacttttaatgtcatgacaaagttacttcctttttgttttaagttacttctataatatatgtaaattaattttaagctttactgaaattacttttatatgtttaagaagtagtttagtgaaatctaaaagtaatttagatatactataaaagtaatttgtaatttttcatcaaaatataatcatatgagatcttgttagaaagatttaattcttacgaacataaccgtgtaatcggatgagtagtttaagagaaaattttatttgaaacataggtgataggaatatattttctatttacttgatgagaactagtactacagttaaagtatctagatagagactcgttagcactaaaacgagaggcctacacgtgaacagttacagacgaatgtcgtgcatgaatacacgtcatgctagagtattagaaacgcaaacgtttcccatgcatgcacgtaaattggttggagttcacgtcacaactaaaagttatactataacggagacatgcaacggtctaattctaccgccattagttattatagcacgatagggctaacataaatgcgattgttgtcatgtatgtacgtggaagatgagaagggctaatcacctgtcgacgaatttttatttcgctatttgtagcccgctagctctaaatttgttaagacaaacttactatatagttctcatgggacaatgtatttgtttaattatatatatttttatagtggtttactgttatcattaaaacaatactattttaaaagggtgtgccaactatgtattttcatatgtttttttcaatggtaataaagctgtggtacaagaatattgtttggttctgtccaaatagcaaggttatccacgtttgtctatcatgacgcgtgctaccagtaccaactaatgacttgctgctatataccgatcgggtttatttgatcgttctcgagtgattttaaattcaaaaataataatcaattattggagctaatttaacataaggtagacataatcatagccgatcatatactttttatattgaactagctggacactcctagtagttgctttttatggaactagctagacgctcctaattgatgaattgctttggacaggggatggaacaagaaatactggagttgttacattgaaagttgcttaattgcttcaaggcaggttttgagatgctttgatcagattagcgtaatcaacgctcctgatttcatccttagccaaccagcaatgcatcataatctccgaaatttaaaatgagaaaacgaaattacatgagtcattttgtagctactactacaaagcagagggcttggataataaccattgattccatttcataagtaaatactacttttgtgtcgtaataattctatttctgtgatttaaatttgtactaaaataattgtcacaatagaatactaatggtcctattaatcacatatcattcaaatgtctccatattttaccctcaactacctttttactcttacctatacatcatttaataaggggtatcatattttttttctttttaaatcttaatgtgtactaaataacttagaatcacaattattttatgacagaggtagtattaggtaatctacatacacatcactaattttctcttacaaatttagagagagaaaaaaaaagacaactcaacatgtatcccaccgccaacaccacctcacatacttgtttttttaaactgctataatgtggatagaagtattgaaacggctagttcgttaacatttttttactattttggtttactcggatttaacatactcgaatatagggatagcaatttcccccacagggccggggccgggtgaggtttttaccccgcagggagtcggggccggggccccgcaattaggcgagtgaggggccgggggaggcattccacccgcggggctccggaggaggtatatcggacttttaaatatagcgtcaatcctaaatatagcccattagacccaacccgacttgagaaaaaccctacccataacacaaccccaccacccatcactcatggcgtactctccccctcctcacctagccgccaccgccacgccactgcgccggcgcgcccctctatctcgccctctcccctccggccatcctctttccctccgcctccagtcgcacgcgggccgcagccacacgcccttctccctcctgtttccaggcaacggcgcgcgggttggcggcacaagggcggcgcatgggcggcaaacgaggagcgaacaagcgacgcgcgggctggcggtgggcggagcgagggcgacacgcgggcaacgcacagccacggcaagcccgacgactgacaagcaggcgacgcacgcgagcctcttcctccgccagtcctcccctggtgactgcgggtccccagtcgggttgcggggccccgtaggggccggggccgagggttgatttggccccgcaactccactcggggctagggccgggtggaggccggggtcgttccagcccaacccggccctgacccaccctattgccaaccctactcaaatgaattggttacttttcttagttactcctagttattgctaaaaaaacaggtggctaattatcgtaatcatctatcaacgaagaagaaagcaagtaaaacgctacaaaattacacatatttatatatatttttaagaaaagtctaattagacattgacaataaataacatttattcagcgtttgccttttcaattgagaagttttttaggtcttgtgtaactcacggagctgatcgaccatcagttctcggggactcgtagcagtttaacatatatttactggtatgatatatggttggatggcaacaggtggagcccaggtgaatgtgagatccgggatcgtagctttagttacattatctccatgtgggcccagaaggtctcttccatactccatccgtcctataatatattaatctattatcagatatgatatattctaatattatgaatctggataaagctttaggttgattttttatagcacaaaaggaatagcatattgttgacttattttagtctttgaattgtaaactagagaggtaatattcagtagtaatcactatggtctattcgctatgattcgggggttaagcactattttttttcacgaactcgtaaaaagattgtatgtcaatatattagaaaaaagagtgtttgtttacacaatgcaatcaaccataccggcttatgccaagggaaatgagaaaagacaaaaaaaaaacaaggaaaaatgaagagactgctacgacggctggacacagctccaatcagcggggagggggcagagccacactaccctctaaaaaaacccgaaagaagcaacgccagctaacgatcatagatggccctcagtgaggatggactctagaaccactgagaccgaagagagagtaaagtcgaaaaccctaaagtttcgttccttctacagttgccaagaaaccaggagggccagagagtcgaagccggcacagagatgatcaggtaagcatgtcctaaaagatggccaccaattctggagccaattgccacgaggaggagagagggcagcccaatcacaaggcgacaacaacggaaccaagacctgccaagcgaacacgcagtcaaggaggatgtggttcaccgtctcaagctcctgagcgtaaaagagatagattgagtggcgctgctgaaatacaaatcaaaggaataacttgcatttagcatcttcacgtggggggtaagcactaccattgttgatttgatccctttcacaataatcccactgtacaaaggaaataattaatacaggttccatctgtgaataatagtatatgcaacccttgtttttagggggatatatgccacccttaaaaaaaaaaaaggaagatgtacttatgcagtactactagattatactggtgcagtacagttatttccacatgagatcgttatagttgacttcttgtctataacctcagctccgtcataaaatatgtttaaatttatagttacaaattactatattttacaaaacagggagtagtatatgttcgtcccgaattcctcatggaatagaatatcttgaaacgaaagcaaaataaccttcacctaccctggctaaattgtaaaaccatcgtaatatcatactccctccgtcccataatataagggattttgagtttttttcttgcattgattgacactcgtcttattcaaaaaattttggaattatttttttgacttactttattatccaaaatactttaagcacaacttttcgttttttatatttgcacaaatttttttaataagacgagtggtcaaacaatacaaacgaaaaatcaaaatatcttatattatgggacggagggagtaatatataccaatgctgctattgtatatgtaactgatgtttcaaaaaagatgtttttagtaatgcctaaactagcacgattaaattaatgagcttgatattgatatgacttttgctcctgcaattttttggtcgcatgcgtaatctacatggaagtcaacaaaagatcaggtcaaaagtcacgcttttgtcaagtagaagtaaaactttccagtagagacttcacaagttgacatcaaagttttgtttagtactactgttaaagcgtcaatgaactaaaactaacagcgaccaaaccatttaccatctgtctgtaaagccaaactggcaaaattaatcacatcacgcagtgtgctggagtttggttccattccataaaagaagaagaggaaaattgaaaagaaaagaataattgcagggatcagtcatcactgtcctcgtttaattttggctgtgctgacatatactgatctttatcctcgatctgatggcgatcagatggttagagtactttctcaattattgggagaattaaatcgattttcctcgcagaaaattatatcggtttgtaagagaagccaaagcgaaagcgatgacacacacaaaacgatatatatgcacccgtggcgatcggtaggcatgcagttccatctcaatctctaagtgcgttatatataacggttagcattagctagttagctgtactaattaaaaaggtataagttactagcacattattacttaagtatttttgaagatgattacttaagtgttgtctattgtaaacttgaaaaataaatttattaaatattttagataaacttatatttagtatgaagcatacttatttaacagtttgtgctcgtgataaacgaggaattagtttagctcaaatccactttaactagaacacaacttaagacatgtttcgaaactttttctcatttaaattttctctaaaattttttacttccgatataatccagactctcatttaaactattttaagattacatatatagctataagtatagagaataagtagaactcacaagctaaaaaaaagatcatttttaaaaaataaatcttatgagctggttgctttctcgtaatctcacgagctcccagacatgacacaagctcgaacagctcgagcattctcggcgaccgtagctactactagtcggcagagagaaacaggcggttgtaaataaaacaagcaaacgacgtcggaaaagaacaaggctttgacgacagccaaactgttggtttctctgggcaatgtacagcagaaaacgccaagaaagctacgactactgctagcgtggagtcaggtagagcaagcagccagagaaactgacgtgccgccgccgcgtgt

SEQ ID NO: 7873 - DNA, 4305 bp, Oryza sativa
catctccccccgcgctctcgccgtcgccgtcgccgtcgccgtcgccgtcgcgtcggctgggcggtgggtgggagtgggagagcgggacacgcacgggtgcgagttgtgtttagctgccacggcgacgacgtgggccccacgctggcctcccgggtttctagggtgaggtcactgacatgtggggacaggtaatgctggagcccacgtgtcagtgactgttaggcaggcgggggtagtccgcgtgagaagcgtagatgccgcaagcgtggggagaagaagacgacgaggacgaggtgaggtggattagtttggagcgacctgattgggttggaattggattagtgtgtgtgctaatcttatcttaaaacaacctgcagctggctttactttcgaatatgctaaacaaaaccgatttaaaaaatttattggatacataccactacgatgtgaatattagagaatgagctaatatcaaatgattatacgagtgaggcttcgaattcaagtcggctagctcatcatcatgtggagctagctgaaacacctctagacgttttctcgatacataccattactatttaaaaaaatataattacaattcatatattcgtatccatgctatacgaatacgtacaaaataacaaccatgctatcgacgttacgttttctatcatatagaccaaaatacgctagacgtgagacccgcatgtcagttccatcttctttctctatccatcactcttctttcttcatatctctctccacctcgctgaaccaaaagtgtcaggaggcgagtaggacacgatgagggaggcgaatggagaagtggtgtccaacgcaccggtgaagcgttggtactattcaccttggttcgagaaggaaggaggaaactcgatgtgcccccactcgagctcgccgctaagctgccacccgtcccaagctcctcccaatggccccgcttgctcccggtgccgaagaagacggttctcgccagatctaggttgacaccctcctcgtcttcacaagttccactcgtcctcatcgtgtcgtcgtcttcacgactgccggtgggaggatgagagacccaagcccggcgccggagatttggcgactcaagaccgtttccttggggctaccatcaaaattggcggacagagctatgtgcatgaggcacctagtatcgcctgagttggcaagcactatcgtcatctgctccacaggagagagagagaggttggagatgtgggggtggcgatggaggttggcaccgttgccgtggcagaccaacatgaggggaagggagagaggggagaagaagaaaaaagaattgggaagaagatggaaaatgtgaccataattggctttatgtatttagatggtatggatcatggtaacaaagtttttgggtcgatgagaggttggagatgtggggtggcgatgaaggttggcatcgctgtcgtggctgagcaacatgaggggaagggagagaggggagaagaaggaaaaaaaaggggaagaagatggaaaatgtgaccataattggttttatgtatttggatggtatggattatagtaacaaagtttctaggtcgatgggatcgaggaactggactgaggaacgtggtacgctatttgtgagagggttttataaggtgggacgaaaataaccccgtgtttccgtgacggcctgacgggtataacgttcttgggtcgaggaacgctaccactgattccgttttacgtgactatggtgtggactcgaatagaatattttctaaaattacattattaaattcaaaaaattgaaaccaaatcaaccaaaatatgcactggcgagatgtgaaaacgtctcagtgtgatgcagcgaccaggaaatctagcgcggcaggttacgtccatctcacccgttcatcttccgatcggacggcccacgctccacggacgcgacggttggagccacttcaactgctctttcatctctccccgattttgtttcttcctcgacctgctctgcttctcctccgcacccaaaaatatcaaagaactcaaaagcggagagaggcgaagaacaggggggacgccatgaacgtggaggaggaggtggggaagctcaaggaggagatccagaggctcggccagaagcagcccgatggatcctacaaggtaaatcacttttttctcatctcctctcctctcctccgaaacgagcaccagatctggcgcctgcagcaagggccccgcattttcggtgatccctcgagttagaattgctttcctcttcgcgattcatacgccattgtgcagcttgggtgtcatcgtgtgcgcttttccaatctcaccgacatgagattcctccagaaatcatggcctggtctatttgtgtccattgcccaaaaaaaatggatttctaggtgaccattattggtaatgctggtatgtgtctctatggaaaattggcgatgcattgttcagaggaagagagcttttatctgctggtgtgtacattgaagatccctagttagtgcgtagctggtcatgaaacaaaatagagggatcagtgatgctattgatgatcttgaattcgtgattgaaaattttgagcttgatttggtattttgtaatgttcatatgcccccaagcctgtgaaattgcattttatatgttagatatcgtttgttgtatatgtccaacgtcctagtgacgagaaagatgcccactgtgactgtcaggcagttgaaagaaatgggaaacaataaaggaccaacaagtaagaactagaattgtgtatatattttttttcccagaattcttgatgtatatgcttcttgaaaaaaagaacactacatgtgcattctattttattttctgccatcattgttccattacgacatatactcatgtaaatgtataatcatatcatacaacaagtatgtggtgatgccattatccgtcttttcttctgatgcagcctacaatttccaatcatcatctcatattgtaattttgaatcacaaattttgtttcttagttgtgtgttctataaacagtgtgatgaccaactggtccttatcattttgatcagactttcattttcctctttggtggttacagcttttaccttgttaattgtctcattccttctctttttcctctttatttttatgttaggtacaaccaacgaaagctttgcaagtgatagttttgaccatttttaggcactttactcccttgagtacttcctaattattctcccattttctccaagctctttttccattgaatcgacaactccagctatccctggcattcgtctacctatatacgcaagatgtgttgctttgtcaatttatcctatgagttaaatatatcctactcctccctgttaattgttctgttcttcatcaaaacaattcctgtcaatttcacttgaaaaaaacattttttttctatatcttcatggacaggacttattccttgatccagactcatgtatgatggtttttgtattaatttttaatcattatacgctacattacaattaatttttgatacactgtataacactcacttttggattcagtcgtaaatgttaattgttcaaggcattatgaatgtgtgaagcagggttcaatttgaacagatgggtatcatagttcagggattgtttctattttttctgaatcatccaagttaaacaatttatgaaatactagcctggttttgcatgattcacatactgaaatagcatagggtaatgcaacaaataacaatcaaaactagtaaaagaaatggctgattttttagtaagttcctatccgagttgctgaccatcacatctgtaggagtaggagcagcagagcgcataaacttaaccttggaaacgtttttggcatagctatcctacgccttatgaatttctgaattactgagcttatgcaaatcatactggttcaccttacttaaatattgtgatctgcaggtaactttcggtgttatcttcaacgatgaccgttgtgcaaacatatttgaagcactagtcggcaccttgcgggctgccaagaagagaaaaattgttaagtatgatggtgagctgcttctacagggggctcatgacaatgttgagataaccctgttgcctcctccagcggtcgctgctgcctgaagagggaagcatctgcgagcctctggtgttaaggcgttgatatgcatataatctattgtgtctagattctcatgaaccatttgatattcgaagcggatgcctatcgcgtgatgtatgaactatgggtatgcagtttcttggac

SEQ ID NO: 7874 - DNA, 5436 bp, Oryza sativa
actttgcgcatgaaaaaaaagaaaaaacaggctgcaattccacccaataagttggaacaaatatataattccgtacataattgcaatgcagaagaagatgtgtgcaaggaagaagaaagaaaaatctatacctgcaactcccattgcaaaaggagatgagctgccgccgggaatcatccgcgacgacggccccgggaacccgccgctgccgctgctgctgccaacctcgaaaagtggcatggtaggcgagaactccccgaagtcggtcaccggcggcgacggcgacggcgcgggtaggcggaagaacggcgagagcataggtggtccagttccgccgccgccgccgccgccgctgcggacgggggaggcggcgtcccacgcggcgagcggcgcgccacgcagcgggcgcgggctccagcggaagggaccgaatccgggggcgcccatcgggggaggcggcggcggcggcgtgcgggactcgtcggtggagacggcgtcgtggtggtgctgcggctgccggagcggaggcgggggcgggggagggggcggctggtgggggaggaggtggaggcggcggatccagacggagttgagcgggtcggggtgctgctgctgcggcggcgggaggcggcggtggtggtggtaggacggcggcagcgcggagctgtggctcccgacggagctccgcagcgcgaggtgctccgacatggcggcggcggcggagggcgggatcgccggagaccgcgaggaggaccccgaaggcgaaggctagcttaagctagccctcgcacagctctggtcgtgtggctgggctcacctaggatggaggcgaggtggggaggaagcaagcaagcggggggaggaatataagctgccgggaggtcgccgtcgccggcgtcgtggtcgtcgtcgtcggcgtcgcggggagtggaggaagtgaagcgagagccgagagaagagggtgatgaggggataggggtggacacgaacacacgacccgctcatccgctggcgttgacacggcttccatagttgcatatgggatgctcacattgaagccaaaaattaggtaacatttgattataaggtctatattttcaatacggttttcagatttttattttattctatgatcctaataaatatgaaattagtatcacatgaaagtgcttcaatgtatgaatctagtgatatagcatgcataatacttagtatagatatagttagtatgattattagtcaaaagctacccagtttgattttccttaaaaaagggcgtcctataatttgggagtaatgtttttaaaattttgacaggatttcctatatatttattaaaatttgaaaaaaaaaactaaatggatgcgcaaatttagcaactctaccaaaagtgatatgatttaaagtggcatcattctgaacaagcccataggttttgtatgtctgttgaaaagccgcagctaattttcaacctttttttaaaaaaaacaaaatttagcgtgtttatggtttttacccttgctttttaaaatatagaataaaaattttagattatttgttttcatcggatctaattttctacttcctccatctcagaatgtaaccatttttttaggtacgcacgtgtattaagaaagtaggtagaaatgattggaagagggttgtgattggtggagaagagaaagtagacgaagagaatggttgtgatgggttgagaggagagggtaggtgaagaaatagctttattttaggacaagttactatgctagaaatagctatattttggacggggtagtatatatttccaatcagtctggcccaccaatcatgaatcactcgagtcatcttgggtgtgctctttcacaggtttaaccttatgatgtgaccattgtcagggttatggatactacatacctaatattagttgattaaatttcgacagaatccaccacataccatgtcttatacagatacaatcctcggatataggaggagttccggataaggaaagacaaccagagttctatatgaaaacgacaatgactactcggattgtatccatattgatttctctagttctacttagacaaggaggcatctatggatataaatacaaggccccctaggaggagaggggacacaatcaacatacacgaaacaatagatcaagatagaagatcaacatagaagccaacatacaccaagataagacaccggatatcgacttcagagataggcatggctagtccccgacggtgtctccggatactgataggagagacattgcgatgtctctgatctcgccggcacgaactcgaggaggaagactaccctgttgtcgactacgagtcagacctttagactgccatgtcaacaacagttagataggctaccccaaatattgtactggtgtgattatggtgaataagagcaataccggcttcggccaacaggatgtagggttattaactaacaattcaggggcccgaacctgtataaaaatcctcgtcactgtctcttttacctcagtctcgtatatatcctagtaccaacgatccccatactatgaaaatacccaaatcgcgacatcaaacgtcgacagtgccgcaccatagttgctattgatataaccgttgctcatatcatagcacagtagggagacaagctgcccacactctagaatccaattcggccaactgcagcaacgttgacttcaaacggccgccaaatatgcatacgatcttcgtttccgatccatgagtacttgatgaaaaactctcgaagtcctctttccaaaggatccagcctcatcaccaaattacatgttagtcatttgcaattgaagaaataaggtgatgcctacctatcttgggccattaggcttgtaacttcatttgggatcccggcccaactaggacccatgtagggtgcgcccaaacctaatggagcacgaccctacggaccctttggttgtccccccaccttcttaaatagctaggtaccatttagggtttttcgggttttgtatagattaaagtttagtcattgttactttcttacatcgcgcatgtcggctagtccgtttgtttgtcttcggaacccaacttatcatttgttttcaattcctatttgcaattcagattgcttttatcttgttattgcttgtttcttcgatttgcttgtagcaataaggttgatctgcatcggtgtatcaatcactaagacgcaacgcaacaacacctcgtacggctgtagttgggtcatcaacgtttctctcaaatcatagttatcttcaactcatcgaaaaatcgggccaatcatagccatgagtgtctcgagtggagcacagggtttgttaatgttatatcaatagcaactatgatcacatcaccttactagttaacagtttttaacaatgtacatatcaaagatactagtatgactgtatggatgcctctaatatccattatcaacatgagataaaactatgagctctctttctatcccaatccatgttctctgcagtactacttattggctgtagatccaaatatctgtggggtccacatatcagtgtgcagtaccgtggaggaccatcactctttccatccgtccgttggtaatgtacgggggacacatgtcacacatctacggttgttacacttacacacccacatagccggtcgtcggtcggtactactccattggaagcgtcagattccatagtgctaaactattacacatacacatgttttctttttgcttggagttgcatgcttcatgtctggaaaagaaggtgctcttcctccaggatcactatttggcttttttcaagatttgttttcttatgggaggggtcttcctctcattatttgcatgttattcaaatagttatgaaaatttttttaaaaaaattaagaagatatattaatatgtgatatatcactccacaaacatgcaagttcaaatttaatttctacatctcgcaacgaaaaaaataaattaaactacaatcaaatttgttttttccgttgcgagatgtaaaagttgaatttgtacttgcatgtttacagaatgacatatcacatgttaatacatcttctcaaatttttttaataaccatttaagtgacatataaacaataagtggatatcccctatagggatgtaaatagtttcccttttcttatttgttactcctacttatctgaacatgctacaatgggattccagtttcccttcgctgtttctctacaaccgaatgctgtataggacctgagctcctgcacagcattgggttgtatgctaaacatcataagttgtttgaagttcgacataccactctctaaaatcattttgtttcaaatattcatcaacctacttagttttattacaaaaagcatcccaatgcacacatgtttaaccaaatcaatatattttcataaagtgtgagctgttaatgtaatctttaccaaaattaaatactttgtattatcttgacaatttttttagatttcataaataaaattgatgataagaacttaaatgttatcacattcactaaatgagaaaaaaaaattcaatcaaacataaaaaaaaataaatctaattcaaacatttgaacaacattaattgactcaactaacttagtctgtggtgactttacatcaacgataacggactaatttggttaagcacgtgagcaaaaagatgatttttgcaacaaaattaagtaggggtgtatgtcggtaataaaataacctatatgatgaaattttaaactttaaatgatttatgggatgcttttttccttgcaatttctcatacttcgtgatattgaactgacgacacgcatcataaacacagtacagctgaatagctgatctgctgttcgagttgagaaattgcacgcaagtcgttaaccataacttattgcacggtcttgttcttttctatcaagatgctaaatatagtgtgtttcgtatgaaaactttttatataaaagttattttagaataaaaaaaatatcttctaaatttataataagagtaaattttagaaaactgcaactttagtgacaaatgtatcagtttgctgtaactttagcgatatgtttcagtttgctgcaacaataacacgagaaattatgataaaactgtaacttttatgttatatgttactacagttgtcacatatatgtactgtagcagcatataacgtaaaagttgcagttttgtgataatttttcatgctattgttgcagcaaactgaaatatgtcgctaatgttgcagtaaactgatagttttatcactaaacttgcagttttctaaaatttactcttataataattaaactcaattaataatatgctaatacttttttatttttgcgtgtcgtaatctaatcttcatgttcttcagattagcccgcaacgtt

SEQ ID NO: 7875 - DNA, 14337 bp, Oryza sativa
cacgtggcgtgccacgtaggcaaaaccacggtcaaaagtggctttggacctgaatgatacaataaatcaagtttaaggatctcgatgtgcgctttgcaagttcgtggacctaagtgaaatctcctgacaagtttaaggaccgttggtgcattttactcaaaattaattgatccatgacacataagccccctcatctagaggttcacaaactgcttaacattcagagacatccatcatatggagttgtttaatcagcatcaagaaccgcgtgtaacttattatgatggttatgcaccaaactttcattataatgtctatcagttccgaaggaaaaaaatatgttaatacgattttccatgttttgcacgagcagctacacgagaaaatagcacgagagttttggtagtacaaaattgggccaactcgctgccagccacactactagagataagataggtgtctaggttcgatgaaccacaagcggtaccgaccgtgaccggtccgtgttgtggatagacgtagccatcccaattgctgtggagctcccaaaagttgtggaccatccaagtcaaccacatcctgaatcaatggttcggttcacttctcaatcgacgatccaaagctctagtggagccaaggacgatggagcaccgttgtgcgaggttccagcccactactctcaccgccttacccctcttcttcctcccgctctcccttgccactctatacaagatacccctgtgggagcagcactagcccccatgaactagctacattggggcatggttgtcggtgatgctcctcagcggattgggaggagaagcagtgcagttgatgggagagtggaccggcgcggcggatggggaagaggcggcaggtgaaaggagaagcggcgcgacggatagaagagtgaagcggcacggtggataggaggcgaggcgatgcatcctgagagtaggactgagatacacttccttaccttggtcacatgcattgtaggctatgtgacctcaacaattactcaccctaatttaagctatgaaaaaagtaacgtgcaatggggcgttcgaggccttgggccaatttcttagtttcagaaggactagccacacccatagcgtatcttgcattgccgctgctcttatctactactaccagtagttgttgctatagaagaaacgcaccaacacagtgccaagtcgcagcgactattcatcattaacttacttgggatgacactgtgcacaagatgctgtgcaatacaggggttcaacattgacatatgcttgtaaacgtcgggaatggaagcatatcaagaagggttagaagacatgtcaacagctcaacatgacatagatgtttggttgtgtttagttcacgctaaaattaaaagtttggttgaaattggaacgatgtgatgaaaacgttgaaagtttgtgtgtaggaaagttttaatgtgatggaaaagttgaaaatttaaagaaaaagtttagaactaaactcggcctttatagtgacagatggtgtaatagacaactttccacgagggtaccagagcatatgaacattttctaatgtaggaatgtgggatcatataatttggttgttgatgttagaaacacacttaaaacggaacaacctagtacttgcatacgtaggccttgttcggaagacctacttaccacacggctgcagctgcacagcgcagccaaccaacggctgcaactagctaatagtagctacaacctatagatgttgaagctagcaagtgtagggagcagtagtttttgtgcagccgaacgaatgacggctgtaaaatttgggctaccgaacagacccgtaaaacgtaacgactcgttagaatataattaattaaatattagctattattttaacataaatatatcaatttatatattttaacataaatacattaacttttaagacaactttcgtataacggtttttccaaacatttatagtattttgataggctttgcatggaaaatgaattacaggttttttcaaaagtttagtattttgataagcgtgagaaattgagttagatagggtacagaaggcagcctcagttaccctttattactatctttttcatggttttacttcaatttctatcatagaaacgtacatgtcgcacttcttaaaatggttagttaccctaatgatttgccctcgtataaaaaataactcagtctgctctcaggcgagccacaattttgacactagtttgaatttccacaaaaatttaaacaagatataaacgcagcatgaaaccgtcagtaaagttataagtatgcaaaacccccaaccagccagaatatgggccagaaccagtgacagaagtgcagtggaacgcaaggagaaatccgtccaaagtgagctcacgaacttgtcaaatcaaaacaatatcgcatcaaaacaaggcggcaaacggagactgctgtgattccacgaaacatgaaacaacggagcgtttcgagaaataacgggtttaattccataatatttatgacacccagagcaatgtaggcagttctagcattttaggatagtagaatgtacctactcccagaagtagcataccacaaacccaagcgtaccaacgattatcagagtacagccataagcagtggcaccaagttcatgaatttgccaagttattcatgtataatcatgagagtaacgcgaggcccaattaataaaagttccaaaaggccaccagcctaagcagatgcaccaccacggcggcactcgttcagcatatccaggtagaattggcacttgctgatgtcacttccatagttgttgatgcactgcaatacaaaaaaaccaataattaggatttaggacaacctccatgctagtgcgtagactcttgttagttacaggtagtagcatgcatatacaaattaattcttatcaattcaatctatgttaacactatgaagaaatgaggatgctttcttctgttcacatagaattaatcagatgatggtaaccagagaatggtggggatcaacatgcaagccagaatgccagatagagttttaagagtaaaattaaaatagataaatgaagcatcatcaaattcattctcatggctgcatgggaaatgtaagcacgagtagatggaagcagccaggcaacaaaagataactaagccaaaatgggcaggaaaacatacgtcttggaaggccttggaatggatgctgcatgagtcagatggagtggcgttggccattggggtggcagaggcagcagcctcggagacaacagtctcatgctgaatggtacggggacccattacagcatcaacagccctatgtgccatggcactaccagtaccaaaagccatgcctgcatatatgtgcaaagaagtacttattagaaactgcattgttaatataatgctattcatttcaattaaaatgaagcaaaatgatgataccttgagcaatagtggaaccaattcctcccaggatagagccacctccgttctgggcaggagctggaggaggagcctgccttgctgcaatgaacaaattacagatgtcaatcaaagaacacaagacacaacttgacaagacaaaacactttaaaaccagtacagattatacaggtacaatgagaacataaggcacaacttgacaagacaaaacactttagaacagtaaagaataacacaaaatttgtgaaaccccaacatggacaaatcaatacctggctgcggagggttcctcacgggagcagcacgtggtgcagggcgagaccttgctgcaaaataaatgtcaaagcataaaaaagaatgaaatgggttgagatgtgtcacactaatctagagcatatgcatgtagaagggcataatacatacagttaacaacatcatagtcttcgtacataagaaaaaagaaaaaagaaacaccacttcatatcagaatctatctaagaagggatgaacagaaaatcaggccccttccctcaaaaaagattctatttgctatgtgccccagtctgaaccaaatgcaaatatactaagcagctggttattcatgaggcagtggtgccaagctgcatagaacattatagtacagtactaacttatacaagtggtctgcaaactaattttagtcattcagatcttttaatctttgaacactatatatatatatatatatatatatatataaaatcttaatattagtaaatctcacgaattttaaaggaaatggattgataagagagaaatgctggaatatgcaaggccgatcaatgaacaaacccagaaagaagggacttgcacttagagcagccaaagcagtcaataacatctctatatgccccataactaagccaagatagcatgaacaactacagtggctactcaaaaaggcaaacagtatttgcagcccaaagcaattgaaaaaaaaaagcttaatgcacaatgtgcaaggctgttcaacaatccctataaagaagggagttgtacttaaaacagctaaagcagtcaatagcctctctatatgccctctaactaagccaagatagcatgtataactagaatggctactcaaaaaggcaaatagcatgagctccccaaaggaaccgaattgaacaatcttaatgcatgttcaacaccactttctgatgaccaaatatgaaatagagatagttgtatggaactaaagactgcaggaacacgtagaagatgtacatctagaacatcttggtatcatttcttgttatagaagatgaggtacccaagcccaagcaaatttcaaaacttccacagctatgatggctactcattaagacagaatgaaattctacaatagtgatgaaataaacacaaacagttaactttaatgactaaggcaaaatgcaagggtgtagtttggattgtggatggaaaactgtagcaagaaatagtatgaacataagaatttgatggaatgtctagagctgcttggggagcaccgcatattatggtttacaaggcgctccctcaaaaggcccaagtgggcatcaaatgcccatctgtatgcacctcctaactaagccaggacagtatgcacaactgaagtggccactcaaagaggaacatggaatggaagccattggtttatcatagcacatgcacgatgcaattcgcaatgtatataaactaaagatatatatgttggtttatcatagcacatgcacgatgcaattcgcaatggaatataagacatatgtggagtccatctaagaaaggatcaatggaaatttcctttccctaatatattatggattcaaactttgttatatgcccctgtctgaaccgcctgcgcattttgccacaaaacaattcgcaaccggttattcaagaagcaatcttttccccgttcctgatctaaaaaaaaaaaagaaccccttcgataatcccccaaacacgggtagagtcctatgtatacaccgacgacagatctgaccaatctagcagctaaatacgccaatacaagagggagggcacttcctgatcctacatcccaccaaacgctaaacgtgagaccacgaatcgcccaatcgcgcggcgcagatcgatccgaatcgaaaatctacccaatccaaacgaaggccacagatccgaacaagaacaacaacgggcgcgttcaacgcgagaacccaatcccaaacgccgcatggctactggggctaggggggagagagaggatgggggttacctgagctgcggcgagccatggcggtcggcggcggaggagaagacgaaaccctagatggcggcgcggcgaggaggggagcgagcgaatgaagagggcagcaacgggtcgggaggttgaacggcagccacgcctagggttaggcttttatagccgcgagtccggatttttttttcttttttttttacccgttcttgctctctctctctctctctctccaacctcccaccttcttgcaagacacgccaagctgacatgtggggccagaaatctgcggtgacatgtggggccattacttgtggggtccacatgtcggcggcacgcaagctggctgggagcctttgaccgttggaggggatatgctcggaacactctggattcctccagatgaccggaagcagcacgaagccgtgaacggctacgttttcatttttcgtgctcccgtgatgataaggtgaaaaatgattcgtgattcttccgatttgtacaaaatgaattgagcaatttagtcaaaaatattaagctcaaattagcatgcatttataaatgccagatgaaatatctctaattaataatcttctagaaatctcaaactaatatccatattaaggtttggtccaaccagctagatcccacacacacaaccaaacgcatgttgcaattgcacacaccattggcattgaaaacaaaagagtatgctgcaaaacatcaggaaaatatgctattaatccatgccaaatgctcacacaaaaattgattcgacttgcagttgtaatcccctagacgagggtgtttaattgtacaactcgcagtggctccatgtataaaatctcaatcccctggcctataaccaaagtggctgaggagaccattgtacagttttgcgttggcttcatcatgtattggtaactactgctactatggtttcacttgaacatggaaatgtcgaagatgagggcagagccatccgtggacacggagacgatggagttgccatcagcagagacggcgagggactgcacgacgtcaccgtggccggcgaaggccctcacgcactccccggagaggctgtcccagattcgcaccatgccgtcgatgcaccccgacgccacgaacctggacgggcccagccatgccagggatgtcaccccctcctgtttgttgtccatcacacaggcagaacagatatactgtttgagtgcatatctaagaaatggaagtgacggtttttggcgcaggcagaatctaagaaatgggcgacggtttttggcgcttacatcgtggttgcaagtgcatcggatcgattggcgaccaaggtcccagatgatgagcttctgatccatgctccctgtagccacccaattgtaactgcagaaaatactccaggtcaatgtgagaaatgtgcggtgttcacgtgtttaccatactgctactctatggatccagtaccttggtgagatgccgacacactcaatagagccagtgtggccgtccagtgagccaacaacctgcaaaacgacagcgatgatgatggtaccaaaatgccagactgcatacattttcaaacaaaacaagaaaaaattccagcctatgtaccaacttacatgataaagacacactagcttgagtcataagaacacttacctggcctgagtttatgttcacaacacacacagaattatcctttgaaccactaacaattgtttgggaatccgaagtaactgataagcatgttaatccatccgtatgatagccatggcctggagacaaaaaagatcagaatttgatgttcacgactgattgagtatatatgaattcaatcatatggtaatttacctcgaacaacatgtctgctttgtgcagttcttgggtcccatattctcaatgatgcatcatctgatccagtacagataagtttaccttcagaagaaggtatgtgcattagcaaacaatattttcgttcaaaaactatgttgccactgtagaacttctatgtggacagctaaataaagatggtaggagaaaatttccatgctaaagcatcccaaacaacttgtttactcagggttaactaacaaaattaacataagcaaattgttattgatcaaggaaatatattggtaccatctggagtaaaatcaccacatgtcactgtgctactatggccagcaaaggtattcagaatggcattatggtcagcattccacatccacaaattacaatcttctgatcctgcaattatcaaatgccctcgtggatgccatttaagccactacaataccaaagacatacagttacaccacaggactaatcatgaagtattcatatattttgggagaggaaacaagagtttgtcagcggcaataagttcaactaacaaatgaaatggaacagaatcatctcacctcgaagccagatccagaaccctcaagggttccctgaagtgttcgtgtagctgtattccacacatttatgcgtccatcaaaacttccagaagccaaaagattcccatctgaactgaaagcaaccgtgcagacagtatctgtgtgccctgtattgcgaagctattgcataagttcaataaaataattccgagtatcaacactctgtgataataatgattatgtgatgactaattacaacaataatgtgcatgcagaaaaaaaagaaatccatgggccataggaaatctcaaaattctttgatacaaagtatcgagcacagaaagcttctgggttccattgctgatatgcatgataagagagagtaatttaacacaaaatggttaataaaaaaatgagtaaatgatttgtctgcataagatcaatatataacaattgaaatgctaatatgttgatttagagactacaggcagtataccaaaacattccattaacataaatgaatacatcaacttaataaataaaagaaatggaagtgaaagcatatacctgagagttaatattttttaaaggtggaaaggaacagagatgttcccatgaatattttagacacagcaaattaacactgtaatagtaattaataactaaatcataccggccagctccaaaacatcctctgctgatccaatcttccacaggaatcctctatcgtctttccctccagaagccacaagtgatgcatctgtaggactgcatgccacagcgaatatctcgtctgtgtagaacaagaacaggaagtatcagaatatgtataacaaaatctgcatggataagtataactggagactggagtacaaaaaaaaggagcaattgctgcctgagttatggatggtgtggctcagagaacagtgcatcaaagttacaccaatcaagtactatattgaccaatgatcagcaccaaaaaaatcataaattcattcttttcaaccaacttgcctgtatgagcacgaaatgcatattgggaatcatcctcttgcatatcacctgaaattgaaaggatagataattacaaaccaaatttcacaaatcacaagtaagacagttcagaatagttaaatgcttagcatgtaaatgagcaactgaagaacagattgcaactaaaattctagaaaagagaatgttcctctaggatctgacaggacagctgtagaaacataaatacacaaccattgcagttttctttataaatcaaattaaggctggacaaaatatgtccaactgtcatatttctcacaattgttccatcttttttaggacgcaataatattttcatttgcaagttagataaagaaagcagttagccgattgctaaatcatctaaatgcagttgcaccaaacgagattaccataatgcacctgaatgccaaatggagcataagataaacagtaaaacaggcaaaaagcataatactaaaacagaagtgcactcaaaataagttttccggatactaataaaacagaagtgcactcaagagaagtgatccagattgtagctttgcttaagagaaccaccaagacaccaacatcaacaaagcaaatgtcaaactacgccccatgtaactccaacaattatataggcagtataacagcataatagtaacacagaaatgcatccaaaataagtgttccagcttatgtagcccccaatctattgcccatgattgtaattctgcttaagagtcgaactcatgatattctacagaattccaacagtattggagaggaaaatgttatattctacaaagcatattgagccttagcatgcaacatacccatcccatcgtcatcctcatcatcatcccggtcagggagatctgaaaaacacaaccaataatagtaagcaccaagcaaagcagaaaacagatagatggatagtactactactagtagtaatacaaaccttcctcgtcgatgggtatctcgtgtatgatgtcctcctcattgatgaacacctcctctccatcagagccttcgccggcggggacctcgcccgagatgctcatcgtgacttcacctgagttgggggcgactcctcggccgcaagaaacgagaggggagaagggaggaggaggagcggcgcctgtgtcggcggaggtgtgcccgcgccgccgcgatgcttgcctgcgacgagccgggctggggcagactagggttctggacttctcggcttctcccgcctagtgtcactcgtgtagtaggatggcaatggggcgggtcggggccgggttggtctggaacggccccgcccccggcccaggagtggagggcgggtcgaaatcgatccccggccccggcccctccggggccccgctgcacccgcaggtgaggacgcttggaggaggcggcgcggcgacgggcagaggcggagcggagacggcggcgacgagcggaggcggagcggagacggtgcggcgacgggtcgaggcggagcgaagatggcggcggcgcggcgacgagcggaggcggcgatgggccttgggctttgatccgtgggctgtgggtaggttttcccccataggcccaatcccacgagaagatggaacatcaaaaggtaaaaaaaaaagccgtggcaaacccgtaattattcgcaggaagcatcacttcgccgcaagacggcggcgaccaccgctcctcggctggagggagccctcgtcgccggcgaagcccgcgcggccacctcccctgccggagttggccatggtgagctccacctctctctctgcgtgtggctgcgcgcctcgctccatgttccggtcggcttattccttactcgcttcctctctctcgcgcgcgcgtctccgcggcgctcgcagttctccatcgcggccatcaacgagagcgacaccggcgggcagtgggagccgctcgcgcctaccaaggaagctcaggcaagtctcctccccccttgtcgccccgagcattctctcttcctgcgtatctatctaatgcttcgcctccgtagcttgtgattttgggccccgttagggttttcggttcttcgagcgcaatgtgatggattgattggttttaagtgggtaaacgcagcttaatgttgtggcaagcagactctaggagatgtagaattcgatcaccctgttctttgatgtgatgtgatgtaaggtaccatgtgttctttagcttgtgttttcgacaatttgggagcttgaagtggggtttttactatctatggtttcttccgattctgcgacttgcgaattcaaaataactgttttttgttcctttgatttgatgtttgcttatcccctaataaaaggataatgtaagatttcggttttcattatcggttgtaggtgtaggagggcactcaggttagacctttcaggttaaggggcagtattcttgatgttgagctatacatgctcaattgctcatgatgtagacgaatgcgtgatagcatagtactacattttttttccaaaaaataaaattgttaggaggttaaggtcgttttgaaagctagctgttggtaaagattttggtgtcatctttagttatgctaggaaccgatttaattgaaatacggaataaatatcttctaaactgctttacgagaatcggaagattaacacagacaattattataagtaaataactttgggatggaaatttttaggattactagctaattaccaatcctccttgacatattttgaattaacataagttataaactttatgaaaagttgtatatgtttctcagaaggaaaacacgtatatctatatcatgtgcctagattatctattatctagaaaacatctcaccaactcaatccataggagccttttgatttagatgttctaatgctccttctctattcggaaggagagatatgcccccccccccaacccaaaaaagaaaaaaaaaaccctgaactaaacttggtttggtgcaagtctttttcatttttaattaaatggttaagaaggatatctcagggaaattccaagttattattgttaatagccctttattgaacatgctgccatctgattatatatgtggaactttgtttagttagaggcatgatcataaaaaggtgctccaacggaacaaaagggaatcttccaggggcagatttctactttattttactcttttttaatccttgaataacattggttctattatgtaaacattaatttaggatgattcattgaccactctgattgtcttgatgttgctctgctggtcctggattacaatggaatgcatgtattaatttatagtttgataggtaatatacttgttcatctgcccttttattgatgtgttgatgtgttgggatttgggattggggatggtgttctctgtgctggatttttatggacggatacatgattggtaatttaatgcattatgtatacatatctactccctccttccacaaaagttagacctgttacttttttcaccaagaccaagagaaattaactcatttgcatgtaacaaagatcaaggagtatatgcacgcatgcaaccaatgaacattaagatggctcatcgggttctgattaaacatcaaatttacctctccgtttaagtcttggatgcatagagactataaataggaacaacttatttggattttggaaaaactaaaatatgaaataggtcgaactcttgtggatggagagagttctggctggtacacatttttatttaattttagatttgaagataattatttcggtatctttaaaattagaatatgtgatctgtattgtttcgagaattgttgcgatgcacagtcagtcagtcactgtgctagtacttcctccatatcaatataaggacttttagagttgggcacagttattaaggagaaatgtaaaataaaatggatggttgtgattggttcagatgaggaagtaggtggagaaattaaatgggagatggttgtgattggttgagaggtggaaaggtagctatattttgggacaaattttgaatgctaaatgtgctatgttttgggacggagggagtatatcataatataccagttctgatgtagttttacctgcaccaactagatgtgcgtggctatcatatcatgtctgtccaaggaattgattctgccagtcttgtgcaataggtaggtcactgtaattgatctgagaacacgtttagtagttaattaacagtatttaactgaaggattcttttgtaaatctcttcctgtgctaaggtcattttttttagttttacaacttacaagctctcaattttgttgccgcaatattactgtgttattgaaattacttttcaaaatgcttcaggaatcagcactctctcagaagtaccacgaggggctcctcaagttgcaagaaaaaaattatgtaaaagctcgtgaacttctggaggatgtcttaaaggacccactaatatcaaaaattcaggcaatctctataagaacatttcagatatcagtttgtttagacctgtgctctctataacaccaagttgtttattttaaacaggctgataacattgtcagtgatcagcatttgctgcagctaaggttcttttctccatacctcatttgtaatgttcatgatgtaattccatttttatttgttggttaaaatcattgacatagcgcgaagaattataccaagtggaataaacactcataaaataatgaaatttcttagaactacaacagctcttaatttaagaaagatgcatttgtgtcatggggtaaccacacccccatcatctaattcaccatgttgcaatgattcataaaattccaaaagagaaacaaactcatgtgtagtacacataaagttatacaagcctgcaaaaattcattccagatatcgaggaacaaaaaagagaagcaatcaattggaactattcatcatgtgctagcattacaacttctcttttttggatctcagctctcttttttggatctcaacttgtaggatgaatctgtcattaaatttgtgcagatttataaacattatgtttatattaatttgtgaagcataggaatgtgttggattcaacatatatttgccgtggagatggtcgttccttaggacaccatattttttagaaccatattttttggtgggacaattctctctcatataaggaagcataatttgag

SEQ ID NO: 7876 - DNA, 4739 bp, Oryza sativa
tgcaccccaacacatgggtattcaactagtaactgcataaatgaatatcttctatactacctgtagatgaatctgccaagaatgtcaactggctcactaacattttattttatcttccaaaaatgtcaagtgattcactgacaccttggtaaacaccccacgcagagcaacaacagaatttttttttatctagcaggggaaaccccataacacaatttattgaaactataaatatgacaggagtgcctatcggagctctggaaaatccacttttaagtaaagacactttgagagcagtaatgctaaactgaaactcttaataggtcaatgctagtatgctgttccaacatagataacaagatcacttctcacagaggttaaagataaaacatatatatttattctaggagtgtacgtaatcagagaataaagatcatgtgttttactgagcgcaagagaagacactatgaatgccatggaaatacctcatatacttttctgcggtcgtgaagtaggtgttgtggctccaattcattcactaaaaaaggcctgacatttatagaggataagactgctgttacaaaatgcaagacaactgggagatatgggcaaactaaaatcaccaaatgtaacagaaaaggtaacctctattcacttcaaggaaaaaaaaaatcaccctcaataaggtgagctggtgagggtgtgaggcggttcttactttaacattttatttaaagtaattaacagcaaagaaattccagtggttgtaagaaacagtaaaagttttccactttctcaatgctctcttgatcaactcatgtccagtgagatatctggtatactacacagatcaatagcaatgttccaatatctagatgcatataagaagcttgttgataagagttggtgatggaagatggtgatgatgtgcagtgtgctccacactacactgattttctgtggatgggtctttgcaggcaagggtgaacctttctagggttgtagaaaataattgcatcgtgtacacatgtgtatatatggatgaatagtccatatggttgtatttagtttacatttaaatataactatttgggcattttttgaatgagaatgcatgacatttatatgaaaaccagtgcaacgtatggtactacactagcaaaagcttaaaataagacgtaagataatattgaagaggaacaaacagaacttcaaaaataaaaggaacacttccttgacgccggcctagttgtctaaatgttgtataagaatcatcatgtacattccaagaaaaatgatacgacaaattataataaaaattttgagaagtgctctataaatcattttagaaacagggatgtatttgctaaatcataatagaatttatgccaacataacaatgtagaaggaaacagttcataccttcgtaaagcagcataagcctcagcttttttaagagggaaaccagatgaatagaaggcaatcaagcaatcgcattttggccaactggacataaaatgcagataagtgagacattactcgtaaacttacagccaagcatgcactacatttatgccataaaaaaatactacagaagtagtgtggataaacctatacttgaaaagaacaatgattaagttatcaataacctgagttgtcattacatacatctcaataggatcctcgagaataactttatccccaaatattataatctgcaagacaaataaataatgctgaatgacaattgatctgaaacatttcaactttctgcacataacttaaacatcaattaataaaatgaagttcagatagagtaattaataatgagattaagtatgcctgagataaaaaatagagaaatttgaagcgtaaaataataagtacagtccaggtttatcaacaggtttgataaaatatatgaagtatggaacataaaacaaaagaagcaacatgatgaattaatggaagcaaggagtaattagtgacatgtgatgtagctcgaactacggtaatgcataaagaatgacgaagtggtcagtggtcccgagtagaatgcaaagaacaacatgcaaatggattaatatatgcatgccgtggaccaaatccgatgccttatcgtctgcagaaagttaagatttccattgcatttcacaccattgtttaattgatagggaatcccggttcatattaaagcaccgctcaatagcttatatacttaaaaggagtcaacattggtgcataaaaaatgggggatatggagtactcaagtgctaacattcaaatatttaattgacaatagtggctaaattatcggtaaagcaaagtaggcgaacttaagtccacccaaaaagaatattgcaaagaaactgagagatcactcgtgtccagtacagattaagggacctagttgctataagacaaaacatttggggacaaaccgcaaaagcaaccacatgatggggacctcaagtactggtatccacaaagaaaagatgcagaataaattggtatccacaaagattcacggatgtctcgccataaaatatttcgaaaaagcaattttttttaccaaaaagaagaaaatttatcgtatgcaattccatccacccatccactgatccacatgacaagcttcaatcgcacacccgtttccacttttgcaaattgatcgaacaaagaaagagaaacggcttggaaaaaaaaatctcgcgtacctcgaattctccaaatgcacggagcctctcaagaatctgctccataggagagcagaacacctgcagagaaaaacaaaaaaaaaatcaagagattgattagaccatatcataatcatagtcaagaaccagcggcgcgactagaaacctcattcctcaagaaccggccaaatcaatcaataggcagccgcagtaacggcaacaaggcgaatcaaatcaagaaccagaaacgcacggcaacagcacgaatcgatcaaggaaccagagacgtccaaaagaaagaacagataagtgattagtgaacacaggagagatcgaaaaggaaaaaaaacgaaaggaaaaccaaatcaaacagccatatccatgcgttcgcggatcacgtgaaccacccaaaaaaaaagaagagaagaagaagaaaaagaaaagaaaacgagagtcctagaaccaaagggcggcaagatccccccgaccttcttctccatgacgcagacgccaatggtgatcgagtcggcgcggccattcccctccaccaccattacgtccccctccccgctcccgatccgcgtccacggagcgtgcgcgcgaatctggaaagattcccacgcggacgcggggggcctgactcgagaggccaagatttgatctcctcctcgggtggaaactttggaagagaccggagacgctctccacctctccgtgttccacacagctttctcctctccgccgccgccgccgccgccgggttggtagccgcgggctcccgctcgcagtcgcaggaaggaggaaggaggagaaggccgaggctggctcttatcggttgcacagtggagggtggaggcggtgctgtgggggattgccttggttttaatgctgtggccacccccgttaggttaatgaatcccgtttgctttcaaaaggacgtgactattcagagaccgcaatctatactgtcttaactgagactcatcttgcctactaggacactaaataatacatgtattttttcttcttcttacagatttttcttttaaattatttatctgatttataatccgattacactattatgttcgttgcaattaaatctttataacaagatattacatgactatattttaataaaagaaatatctatgttataaattacttttattataggaaaaagtacgaattacccacatgaactatcgcggtcgtccgaattaccccctgaaccacaaaaccggacattcttcaccctcagttatataaaccggacgaattacccctccttacccaatccacggtagttttggtctacgtggcgtacacatggcagttcagtcagcattatatatatgtatatatatatatatatatatatatatatatatatatatatatatatatataattgtaggacccacctgtcatacactcttcctctctctctcactcttcccctctctctctcacggtcatctgcaggctggggcggcagcctcggcacggagctacggcggcgtcggacggtgacacggaggcggcgactgagggaggcggcctccgcgcggagctgcgacggcggtggtgacgcggaggcggaggcggcggcctcggcgcggagctgcgcgttggcgaggcggacgaggcccgcgcggccgcgggcggcgtgccgtcctcagcctcagcgcggagctacgcgttggcgagctcgcagttgcagcgcttccagccgccgccctctctctcctccctttggcgcgccctctctctcctccctccccttgctgcagttgtaggggttggccgggaaccggggagccttgaagaggtcctcgtctttctctgcttgtgtggcaaacaacaaaggcaacgaaatgcatagcatatatctccatgaccgacctccataacacggtgacagaaaagaatcagatcgcgaggagacgaagaagacgattgatgaccaactatttcaggagacaggagagagagggcgcgccaaagggaggagagagagagggagggaggagagagagggtg

SEQ ID NO: 7877 - DNA, 25846 bp, Oryza sativa
ccctccccaaccctaaccctagcccccgcctccgctcctcgccgacgcctcgtcctcctcgccgccgcggcgccgcaccaccaccatcaccaccgccgccgccgcgtctaccgtcgccagcgcgcggcgccgacgcagacgcgggcgccgaggaggacgttgtcggcgtccaatgcggcccgcggggaggaggacctcgaggaggcgatctacgagttcatgcggcggtccgacaagccgggggcgttccccacccgcgccgagctcgtcgccgcggggagggccgacctcgccgccgccgtggacgcctgcggcggctggctctcgctcgggtggtcctccggtggcgcggaggcaggcagggcctcctcgtcggtcggcgtgcaccctgactaccctcccgaggcgggggcggcggcggcggcggggggcgcctccgacctagcgcagggagccgtgtgggcgtcgtccaggtggggttttgctattcccttctactggggtattttcttccttgcccccctctcccgtatgaattccagctgaaattcccgtgcgtttcagggaggcggaagcttcgccgtccgggcgccagccggagacggaggaggaggagacgtgggtttctgctcggcatcgttgctctgtttgctcccttggggtgttcgtttcttcctgattgtgttcgtttgcttgcgcggtggtttgcagggagacgaaatttgggactgggttggacgggatgcttaccaggctgcagagggaaagggagagggtccggccgccgctcccacggagcagcgatggagcgggaggggaacgcgacaatgttggtgcgttgggttttcaattcccagcatattcttcagaaacatcaattgttttcaattgtgcatcatatatacttgcttcgcaaaaatagttttacgtgtccctagggaagcattaatctgactacatttgagatgatagcattgatctgactacatttgagatgatagcattaatctgactacatttgagatgattagtccgtgtatcagtgcacttgttgcccccatggttacagcttgtggaatcgtggctggctcctattcagtgcagtactgcagttccttgctggcaaaaagaggcattcatgtcagtttatccaagccgtctgatttttgcggatgacggtcttgtccacaaaccttccctacttctgcctccagtagggaatttcctaaatcaaccattacaattcttcactcttgagtactccctccgtactcataaaggaagtcgtttaggacaatgtttaagttaaaccttgggaatataaatcataaataattctcaagttgttgagtttgaaaatctaaaaattatatgaatagatttgtcttgaaaaatactttcataaaagtatacatatatcacttttcaataaatatttttatagaaacaagacgtcaaagttgtgttttgtagaccgtgtcgctgtcctaaacgacttcctttatgagtatggagggagtacctagtaaaatagttgcttatcagttgtccacatatagctgcacagggggccaaaagttgcctttttcacagtgatgtgtctttctgattttaacaccagttacaatcaagagtaatagtaaaacaaacatcatatgattaaacttcaaatgtagtgtgtgcatgtatgttatattctaagattgaccatgttttaggtattttatcgattatcgcacattcatggtagtcttagttcacttttagtatcatcgaacgacagttatgtcacccactagaaacttataaataggagaagtgaaattgaatgtttgactactgatatcactgattaaatcatgcattgtaattggcaatattgtaaatgaagtaaaacgaaatatgaagtgattatacaccccacaatttacaatattattaatgaacttttggtttgtcgttattggataacttgtttgtacatatttgtggtgttccttttggatgtattatctacttccttttctagtttgtatttgcatataatgtgtataactgaaatcatccttctgtgttgcatatatgcagctttaatgggtcagagtggagcacccagtcactctgcaactggtggcaggtacactccaaaggtacctgataatggaaatatacatagttatcatcctcaaaatggagcactagaacataacaaaagctcaaagagtttgactaatgatgcatggcgaacatggtcccttgacaagggtggtttttcagattttcaaggtcatatgactaactttcttccgtactgcatcccatttgtttgatgattatttgttgacaaggtcaattgttgcagctgctgaaatccattcaactaacagcaggaaatcatttagacatgatggcctagacattcttgcacaagatgacgtgcacgggccatctaatggtgtggctgtacatgattatgatattaatgatgtagactctgaaagagacgatatacatgcacgccttcaaaatttggagttggatcttactgccgctcttcatacattaagatcaagattcgacaaggttatatcagatatggtgtgtatatttcccctaacatcatcaattttgctttcatttgttgtgaattactagtggactataattttttgtgcacgaagtgttttttctgcatctgtaaagctgttagttttacgtaaaaattctgctgccacacaaacaaaagaagaaagatagttccatttatttaattaaacttttgtatgtctaatactccatctgctttatgctctcgggaagtgtgcaataaaaaaatgtattttgagtttttaacttgcagtttcctgattaaaatgcagattagagacgtggaaatgatatgacttgattttccattgaaatttcgttcataatattgtaatttttaactataatgtatatttagcaacacttccatctggcagctacttttgtattgcaatatggcagttacagggcatacaaatacatgaaacactagtggatgaagttgtgctttgtgcctctcaccttgatcttgccagaggcactgtactcattgttctaagcatccaactttgttgtttttttccagtccgaaggtgacggagcaaaagcaccaaatgggctctccgacgattgggaatttgaagagaccaaagtaatgcaagctcaggaagagctgcggtcaatccgtgcaaaaatagcagtattagaaggaaagatggcactggagataatgtatgtccacctaatatctgattacctatgctttaaattttgtatgttcccttttagtaattgtataccatgtcatcagtgagaagaacaaaataattgaagagaaacaaagaaggcttgatgaagctgagaaggccttgagtgagctccgtactgtttatattgtgtggtctaatcctgcttcagaggttctattgactggatcttttgatggctggacaagccaggtgaacatttcaaccagctctcgattacctttcgtaatatttgaacttcgctaaggcttaggatgattgttctgccatgtggtgctaattttgaaagataatatgaaaaataactatcatgcgtctatgtggctagtaggtttagaatcctcatatggatatcattgattttgcccatttaagtatttgaagttcagtgggaatggcttgaacaattcagattgtcctgcacttgcttaaagtagatttggtccagaaggcataactgcatcatacctgactggttctggttttgaatcgtaattggcaattcgatgtaacaagcacttgtatttcatataatataattttaatgttaatgaagccaatctgacactctacatagctctgtacttccatgcttgataacattcgcattgttaccttgttatgcttattattatggggcaattgcaaatttaccactactttgaatcattattgcaaaactgccactagaaaattgcaaaaatgccactagaactgtcattcgagtggtatccttgcaatattcaaaaaaccggtggcaaatttgcaaatgcccctattattatatgttcaaattggaaagttttttaaataagtgttgtgtgtacatttttttatcatctgaaatctgatgataatctaattccataacattgttgactttgtgcagagaagaatggaaagatcagaaagaggcaccttttccttaaacctgaggttgtatcctggtagatatgaggtaatggtctgtcttattatgcttccaggcattattattttcatctcatctgatagcccctctgcctattctccagattaaatttattgttgatggtgtttggaggaatgatcctctgcgcccccttgtgagcaataacgggcatgaaaacaaccttctgactgtcacttgacttgaagctccatttgtcaatcctggtagcatttttgtagattgttatctagatctttatcaacatgattaggccaatccatccagaatggaaacaaaaaaaatgagtgagctggttagctctgttccaccctgtaattatctgcttcgccttaagtcgtcgttctttttctttggtagagattcttacaatttaaacagtgtaagggtgttgtcagaatgcctcaccctgttagataggagaagagaatagttgtgtattcttttcttccccgtcttttgcccggagaagtatagttgtgtgatgggtatccaggtgtctggttgtacaccttcatggaatgtggttgtacatctcttttgtggtgacaaaaactccccccgccggtaactttgcacttgcagaagctttaggttttaaaggtggtcgcctcacttgcgagttgttactacgccttaattacgcaatcttcttatgccagcacagaggatctgatatcacagaggattgaattgtgtgctatgcaagaagagagctctgttgaaattgtgattttctgacgctttgagtatgaaattattgtatctgagaccaggttgaactctgatggagtgtggctgcatgaagaggaaaaggcaaacaaagtcatacaagtgcaaacagcaaacctgaaggttcattcaaaactatttcatttacttccttgtgaatcagtcaaacagcaagtagcgatttactaggattgaagattcatttatctttgaattttaaccacttacaagaaaccaacccttttgtttctttccttctctttcctcacccacttaatcctatagattttataattcaagacaccacagatacaaaaatacaagagagaaatgatgaggcagaaaaaaaaaacccagctaaaagcactccaccaattaattatctgccattgacataattaattaaccacccaaacgaacaaacttcacttcacttgcatctcagttggcggctgcccccttgaacctgtaccacttggcgcagatcatgaagtagatgatgttgaagatgccgatgccggcgatcatccagtagaagaggtcgagcctccccttgttgaggtcctgcgccagccagttgctcccggcgccggtggtccggtgcacgatggtgacgaggaacccactgaggtagttccccagcgccaggttgcagaaggcgagcgcgccggccacgctccgcatgtgctccgggatctccttgtagtagaactcgatctggctgatgaggttgaacgcctccgagagccccagcaccatgagctgcggcaccatccacaggctggacatggccgagatggcgcccccggtgatggtcgtccccagcgtcggctgcgtcagcgcgatgtgccgcctccggtcctccaccacggccgacatcaccatcgccaccgtcgacagcgcgatcccgatcccctgccgctgcaggagggtgaggccctcgtccttgcccgtgaccctgcggaggcgcggcacgaggaggcggtcgtagatggggatccacagcgtctgcgccagcatggcgaacaccgtgaacgacgccgcggggatctggaagctccggccgaggtgtcggtcggactgcagcgcggacaacaccacgtaggtcgactgctgcacgacggcgacgtagtagatgatccccgtggaccagacgggcacgatgcggatgaggcacttcacctcctccacctgctgcacgctgcacagcctccacgggttcgacggcgcggcgcccccggcgcgcacgtcgtcggggccggacacgatggccgccttgtcgaggcaccggaactggtccgtgtgcgccagcttggtgacgatggcgctggtgtgcggcgggtcgaacaggtcctgcttggggtccttgggctgcttgagcgaccgcttcctcgccgcggcggcgaacacctggacgatgctggtgaagggggagccctcgggggtgacgcggacgtagagcctggtgcccatgaagaagaggacgcaggcgaggagcatgagcgcggtggggatgccgaggccgatgggccagctgacgttgctctggacgtagatgatgacggtggcggagacgagcatggcggaggtgaaggtgaagtagtaccagttgaagaagctgttgatgccgcgcttgccggactccgtgtgggggtcgaactggtcggcgccgaacggcatgctgcacggccggatccccgccgaccccagcaccaggaacgcgaacgacatgaacagcaccgcgaactgccccgacgtcgccttcgagcacgtctcccccaccccgcactccgccgggtgcagcccgtccgcggcggccgtcatcgtcagcaagaacatgccctgtccgtccatcattggaaggaaaccatgcgttagtacattggagccatcgttattttgcaaacgaaaagtaatttgtgaataaaacttttatatacttgttcttagcgatttaaaagcaaaggttgaaaaataaacttcgatgagaaaacctcaaaatcagcttcaaatttaagattgaaaattcaaattttagttgataagttataagcataagcgaaaaacgagggcctttgaattggatgattatgggctttgagtttcgtgtaataacccatgtgaacttaaatgggccattagttgggccgagttctgtctgcacaaccagtcggcccaaaacaacagatgcatgcgagcacagcacacaaaccgggaaaactgtttaaattaaatttgtaatctgatgatttgaacactcttatggctgattatcagctgtgtgatcctttttttacttaaataataacataaaatttgaaaaaattatccaatataaaattatgttaccgttccaatagaagtgaccttcagaatcaagcagctggcccaccgcccccacgagcaccagcggcgcaagcatcattcgtcagaagtggctctcgctatcaaaccatactattacacgcttagtactactacctaaatggggctcatgattacactacgtcattagtactagtacgtggttggtgatagtcaggttggttatggttagggaggtggtgtgacattgatgccgcgacgtgggcagctcactagtcaattcctggagctttggatggcagcactgactctcacttgggagcatatcgttttcgtgcgagcaagtgcgagaaactaattgatttttttgtacaggtgtaccgaaatgcaagcgcagctaagtactaatggtgtacagtaatgctgatatattccaggaattgggggtgagctagctagctggtcaatgtcgatggccacaccaggacactaccccacttgcgcagttagttggcagtcacctccatacagattgtccggataagatggccggatccccaacctcacttcagcctcaatggctgccactgttcatcatctcattgcactttgcacttggcagcacagcacagagcagaaagttcttatgcttagcctaggccccccaagattctagcacttgtactcctactagatgaaccgtacaaaattactgcaaatccaaacaaaacgcaagagatttccccgttctaactaatagtgtcttgatagtctaatcaggtactattatcagtgtgaaaacatgacataatgtaaccaggttggatcttgggatttcagtgctacggccttccagagtttggccttagaaaaagacaccgttcaagtcaaaacacaactacaaattgaactggacagtggacactgcatctcaccaaccaagcccctgtactacgtagtactattattgttgaacagagttaattaaaacttgaaaattatccgtgttgcatgcctggcaagccaaggcaccgtttggtccccatgttatttttgtactgaaattaatacaggcgaaaggttaaacaaactgaggagaggaagcgagtccacttcaggattcagcacagatcgagatgatccactaacccaatccaaatgctcaacaagttcccttacaaacacagtttcctatgtttaaaacttaaaattagcgacgtgagatccacaaataatacagacccagccaactgcctcgactcctaaataatgcattttttttgcaaaagttcttttttagaaaaagagctttaaaaatcatattattccttttttagaaaaatactaataaatcatatgctaataactaataaaaagagttaacttaactaatcatatgctaataaaccactctgttttccgtgcacgggagattaactctcaaccccatctaacgaacacaacctaagtgactatttggtagagctcaaacttataaatttagcttcaggagttgggtctgaagtggagttgtggatcggtctaaacccagctccacttctttagatcattttgtgagagcgctctacccaaccccactcctattttagatggagctgaaactttagctgggctccaactacaatagaggtgtagctgaagctattcaaaacagaactaggtgtactactcctatatatttgtacatataattgtaaatatgtccacgtcaaataggccataccttttttcttttacaagaaaactagggtgagcatgcaacaactactagcttagactgatgatgtgttgttgttgtacatgggttatcagaaaaagaaaaccagctgctagtgtgggcagaattaatactgctgcccacaaagatagataaaagtggattatagggcatataatacggattagaagagcgctaatcatgagccactgcgccgctgcaaagtgccgctttggcaaaaggggagcagataatgcagggcacgaggctaaccgatgtaggccgccgcctctttgggaaagctactactagtattggcagattaacccattatttccagcaaaaatttggatataaatttcaccacagaactaaattatactaatgtcgtttcaatttaccgcccaaataattaaggattgaactcttctaatccacattcgccgtgaattaattaattaaaaataatcacgagcgcacaagcgcacgtggttcctcgctcactttgccgcccatttccatcgcagagaaaagaaaaataaaaataagaataacaaaaaagaggccaactcgaaagtccaacacccaaccgagctactgacaagccagaggccaccaactcccgattttctttttttttttaaaaaaaaaaacaaatctgaatccgagaagcgaaatcgcgccgcccccaaatcgcagcgacatccgcctcaaaattcgaagcccggcctcgaattgggaggcgaatgcgtggcggcggcggcggaggaggaggggaggtgggcttacgatgagggaggcgacggaggcgatggcgagggcgaggtagcggccgaggtaggcgtcggagaggaaggcgccgatgatgggggcgaggctggtggtgccgttgaggccgttgagcagcgtcgccgcgtccacgctccgcatgtggaacacctgcgtcaggtacaccagcaggttcgccgacgtccccagcgtccccagcttctcgaacgtctcgttccctgcacacccaaaccccccacacctccatcagccgccgatcgccgctcgccggcgccgccggagggggaaaacgatcgaatcggcgatctcgccgtacctatgatgaagggcatggccctccagccgtggtacttgagggcgggcttgtcgccgccgttctccagcttgtcgacgtccatgctcttcagcttctggccggcctcctcgccgccgccgccgccgccgccgccgccgccgcgcatcctctctcaccaaccaccacctctgctctcctccagtagaagcgaagcgaccgacgcgggggaggagacagagtgagagtatactgactgcctcgccgagccgagttgccggtttataaaagggaaggaggaggagacgcgcgattcgtactagtcgtcagtcgtcacggggggaagggccttttttttgcttcaaacaacctagacttttcgtttattgcaacaaggtccctgctgccaaacttttttcttctttcttctttgctagttagttaatgctctcccttcacactgcgtcatgatatttttgctatatcttcgtcgccactgacttgcacgcgctttttttgttgagacaaaatgtcttaagggcacgtttgcgaagggtgaaaacggagcgaattcgaacggatagtggtcatactatatcctaacccatattttttttgagtggattcggagcagatgcaaataatgtacggatgcggatgcggagcggattgtttcagatgtcagaaatggtgcggagtcagtgtggaatcagttcggaaacagattaaatttatcggatgctacgtgtatatgcgatcaatgcaacatccagttagaaatccaaggaacaacgatacaataatcaataaatgatccatcgtaataattatatgattaagtgctaaacaacataaacacatgatgttcataatataaaaaatatagctacgtgagtgtgacatgagacgataaaaaccttagactaaaaaatctttgttaattgatgaattagggtattggatgtaccaacttatgttatatgcaatagatagagtggttatatatgttgataatttcggattattcggcaaacagcttattggataatccgataaaaatgtcggataatccgcatccgccggattttagagatatcatatccgcatccatatccgccggatttctaaaagcccatactatatcctcgtttcggacggattcgatatccgccggatttctaaaagcccatactatatcctcgtttcggacggattcgatatccgccggatttctaaaagcccatactatatcctcgtttcggacggattcgaagcggatcagatcagatattatccgaatcgttttcaccgctaacgtttgccatgtacaagttttgtacgatctttttgttttatgaattggttcattttaggcctggtgccaaaaggtttgaaatttggttcaaaagttcaatgttgttgaaggttgagatttatggctatatctattgtactaaaaaataatctagctttatataatgcaagttaaatttttacctcaaaatatctgctcctacatctatatagaagtttctttaaaaaattaaataaatacaattttaatgttataatatttaattaatcatgtactattgactcaaatcgttttttataatgtctatcatctcagccaaactactgaatcgaacgaaaccgtaatgttggaggacagagctgaaaccgatggaaatcactagttccaagtcaattgggtgacttcgcatggttgaaaaatttgaaaatggacaaatggaatgatcttgagctacctaactcaaggtcctaaagcatctccaacagcctccacatcccactcttcaagccaaattttagttattctagcttaaaaagcgctccaacagcctctccaaccagatggctaagccttccagctggccaaaaccctccttccactagccaaatttgaccactctatttggctagccaatggtgggcccacacagccaatctcctccatccccacacggcaaccgaggagaggcacgggaggagcacgagcatgaggacgagcacggcgaccgccggcctcttttcgccgccgcaccaagccagtcgccagcctccacgtggcgccgcctgccgccttcgctcgccacggccgccggcctccacgcggcgccacccgccgcctccgcgcggcgaggctcggcgccaccgccgctcgctgttctccgtcggcccgtcgtcgcttcacgtgcccgctgtccgccgtcgccgtatcaaagaagatgatgtggggatgatgcaatagtccagtaggaggaagggaaatatatgtgtggggaaaatgggttggaagaggaggaagaagagtagtagagactgacatatgggtcctatttgtaatagacttgtaatagagagggtagatggagagactgttgaagtgaataactagtttaactagccaaatcagatggagagttgactatatgagtgtttggagagtttgatttggagagactattggagatgctcttactactaccacactccctcactcaatcttcctaaaacaccctatccatcatccatattacatatttcgtaacttatatctctctttttcacgcgcatattttccaaactgctaaacggattttatttcaaaaaagttctatacaaaagttacttaaaaaaattatattaatccacttttttaaataatagctaatatttatattaatcatatgtgcaaatgaattactccgttttgcgtttgcaagaggttagttctcaaactcaataaaaaaaactcagcctgataaactgtaacaattatttaaaaacgaagacggcgttttctgacaacacgataaacatcggggagtcaagtagtttaggagctagctggccgtggtcctcccctgagatcgctgtcgagttaggacggactaattgaacgaacgaacgaacgatcgatcgatcgagttttgcctttgagtccaccgcacggcggcattccggtgagcagtgcaagctgctgctgtctctgtcgccgtcgttgcctgccgcgacaaagtccattgctgttggacccttgtgcaaaaatttccaagcgagtctgttcagtgatgcacacagctcgtgtcctcttcctttgtgtgtatcgatctctagtgatctgataacgtagcgtcgtcgttgagtccgagtttgtttttacacccgaaaacctgccaaatttcagctgaatcttgcactccatgctaattagcgtcatcgtctgtccctactacatctttttccaattttgttaaagtttctgaggttacaatagtaattgctggattatctggttttattttttaggttatttgagggttttaacgaatgaattaacagtttgtacgaaatattttatgaaagcattgataaacagtttggaaaacatgtgaacgaaaaaccataatcatgaaagtacagggccttggagtagtacctaaatgatgtgctaaaccaaccggttggcctctcttaattagctttccggtgagacgtgaggggcatgttgaaacgtttgacctttccagctgctagtccaagaaatgagaagcagaaacagagccgagcagaaagagtgatggttaggtcagttaggtgcccttgagagaagagaagaccaagaagatcagtgcaggacaggatcagcgtgtggtatttgggggggttgttgaggggtgcttaaaccgattgataattgcattgtttagctaccaaagcatgcatcatccatcgatcaagagttgttagcatggcagcatcccggtgactagtacgctactgtcatcgagtgagtgagtgagtgagtgagagcaaaatgcaaacctcctccttttcctctctctctctctctctctctctctctctctctctagctttgccatgtttgcaatggccaattggccattattgagctcatgaggttccttaccacatgcacaacaacacgcaaagcgacgccattttctttctttccttccttcctcctttctttcttcccttttgggcccatggccatggccaatggatgatgtatggggcatgcacatcaacatcgaatgacacacaaaactttctcctttctgttactagggtgcttgtagtgtgcaattgattgttgtgtccaatgtgtgacctacgttagggacggacatgggagaggaatccgagttgccagtcctaggattgcctgcccttgtgtatgcatacaaggtccttttgctttgaaatggtaaaggaaagtaacatgtactataatttgtaaaagtaacactccctctgttcctctttacttgtcaccattgaccaatcatgtagaacactaatctttctaagcatttataattaaatattttttgcccaaaagacgatctttcaatgtttaattataaattgtatatggtgacaggtacatataaaaagaatgagtatttttttataataaaaaaggtaattttatcataaggtaccaggagatactatatttttttataaaatttgataccttcaactaattaagtacctcgagatgcctagcgtaaaattttgatacctactaacactttcttaatgatcctgaaatttacatcttcagtctccaccatttagatacatagccagagttgtttgcatctttatttacctgtcattgttgtttagttgactggcatctgtcattggtccgttttgttaatcacgctgtggaatgcaagcaattgacctctcatctgaatctcgttagctctcaggaattccttatttcaaaattcatttttttctctgtccagagatgcatccttttctattgtgcatgatgcatgaaccattttggttaactgatgattggtcgcctcaaaaaagtttctcaaagattcgtcaaaatgagtgggcgtgtccgtccttttgcatcgcattggattttaaacaagtgaaccaaacaaaacactaccactactgtacctaccttgatcgatcgatcacatggttgttcactaactaaataataattcaaaaatgattcttcacatgcacgaagcttcagctatgcttgaaattatatttatatacaggccgtgtacatccattcatgtatgcatgatgcattttgttaattgctagttggtgcttgcttttggtcgttatggatcgacctacccactaaatatctgtattattagtactaatctgtaaactaaatcaaggaaaatatattattggtatacatggttgtctcctggatctaagggtgtgagtgtgtgactgatatgtgtggagaagcaaggttgactagctggaagctggttaactgtaccagtattagatagactatgggcatgttcactttgatgttatttttaactttaccaaattttggtaaagttgccaaaaaaagtggctacatttagtttgttactaatttttggtaactatataagaaatcatgtcaaaattttggcacaactatactaatatcaaaatttagtaaggtttttttttttgccattaaagtgaataggccctatcatactctagtaccatgcatgcaacatcatgaacagtggttgagaacaatgcaatgcagtgcaatgcaatggcttgaagaattaattgagacaagatagtctctgacgtggacttggtttggattaattgtagtactaacaatacttgatcagtcaggctttgggggtgaaagaatctcttatgggttaaactaagggtgtgtttagttcacgctaattttaaaaatttgattgaaattggaacgatgtgatggaaaagttgaaagtttatatgtatagaaaagttttgatgtgatgaaaaagttaaaagtttaaagaaaaagttggaaactaatccagacctaagagttaacaagtgaggagttaaggagtactttactgacacgaacattattacccttatcaccaatccgattgcgacgtactgacatgtgatacagccagtgagtgccactgctcattggagaatttttcttatcctgttgacagagatggagtagtttcagtacagtaccgtctaaccttcagagaagaagaacctgaatgcatgtttatgagggcatccgatggcgatcacaagttgaaaaacagtctaatcacccttctaaaatgtgcacgcgattaagcagcaaccatggactatgtgctacagaaaccactagtacagtaggactagtggactactagtaattgacactgtcaaatagtaacatgacaaaacttagactgatcgggcacgtgacggtgacacaccaacatgccgtccttgtgttgcgtttgtgtactactccatccgttctaaaacaaattaatctaattacaaaatatataacacattataatataacgaattagattattatatcttgtcctaatcgtgattggttgattttgagacggacgactggagacctgagtatcatctgtggggcccacattttcggggtgtagcggtcgctgttttgggctgcttgtgtaccctgcaatccatgcattgcagatttgcaatcgccaatttggccttccattcgtcattgtcagagttacagtaggcaggtcagagtcaaggcgagagagaaaagacacggggattcgtgtctattcctttgtagcgctgtgtttagatccaaactttggatctaaattttcaactttttccatcacattacatacacacacaattttttggtcacatcgtatcaatatcaacccaaactttcaactttggaagaaactaaacaggctgcaggaatactagtacaagccaggatcagaggaggttggtagccacgaagaactcgttcggttgttgcttgctgcgttgaattgaatgcagatatacggctcgaatgatttcttccatccatgtacggtgcatgcacgcacaaagcttttggtacagctttggacagatttatgccaaagctagcaccaaatttacactgtagatttgctacccacccagaggatatctcatattctcatgtttccaactaaaacagaggcttaacggatcaccttatcgtagtcggttcatacacaaccagcggcggccaaccgacattaatcgatgttaccgggtaattcttgttataggacatgttattgagttacagtataaaagtattatgctgctgactttagaatacatatttgatcatttgtcttattaaaaatgttatgtaaatatataagatataaatcatgtttaaagtactttgaacgataaaacaactcacaacaaaataaattgtaattatgtaaatttttagaataaaataaattatcaaacgtgtgacaaaaaatcagtggcgtcatctattaaaagacagaggcagtaagatataccgaacatgaccatatactgaaatcagatcactgtatttttttaaagtagtgtcaagaaggctaattgacacattttctttcaatatatgtttatcctttatgatccaagcaattaggctattattttacatacgatgatagcagcatgtggagactggagagttgttgtgcatgcatgtccaactgatcaagcgtttgattcattccaggaaaaaaagaagcttctgtcacccaagaccggggaagaacctgatgcgtgcacgcgatgctacttatattattggtgctatctacagataatattggcacaaatcattatgatcgttataataacttcgttatagctatgcttaactacccagaattgacgtctccaatatatatatatatatatatatatatatatatatatatatatatatatatatatatatatgtactttagcatatatttgttgctatatgctgcattgcaatcagtacaggcgatgaaaaaaaaaagtgtacagacacacacaagaaagttggcagctataaagtgtaggagagccttgtctgttcttctgtctctcgcaataagatagaacttgctgctgtacaccaccgaacgcccagcccatttaagggctctttggaacaagtaatcttggaattttcgaagaaatttaatataaagttttttcctatataatcatttagattaaaggaatggctatctaaaacttataagaatatatacatttggattggcttaaaccataatttttttgaagggattctaacatgaactttaacctcttagctagaaaaaaaaatcatcctacgtttttctatttatatatatgtatttcaaagaagtcctaattgagtaataacacatataatagaccatttctgatcgttggatttgaactatgcatatatattactatacttttccctattaaattaactcgatatgcactactaccttgggagaaaaatgcgaccgatattgatcattcattcatttctagcagcaacaaccaaattcctaaccgttctcgttggtaggctgtgcgtccttggtactccagcttgagtggccatatgcatgcagattgcagaggcagaggccaggcaccacggttaggggtgtgtttagatcacaccaaaattaaaagtttggttgaaattggaacgatgtgatgaaaaagttagaagtttatgtgtatagaaaagttttgatgtgatagaaaagttaaaagtttaaagaaaaaatttggaactaaacaaggcctagatacatcgaaatatggaatgagctaaaagatagaggcaagacaaggacgtgcactgatggacgcacgcaccaccacaacaacctaaagctaaaactaaaggtgtgaagcactcctatgctccctcaatcgcccactctatctatacatgactacatatatatatctcacctgatctttttttcatatacatgtatgaaagatgctgaagctttatctaatttattcatccctctactatttctatcaggatccatccctggtagtcatggaatcgatcatcttgcttctgtgaaatcaatttgttgatttagccttgatgatgaacaattgtcaaaggtaaccaaaaaaaatggttgagttgatgtttgtaaaattgtggtgaaattggtaaagtgtcagaacactggggttcttactaatacagggtaagttcgatttataccatagcagtgagtattgtctgcagtactacacgttcagtagcaaccgctgatatgtgggattgggtccacctatcagccactgctactgtagatgcagtactaaggcctttcacagtgcaacaccgtggaccggtgctccagctcgacacgtcggattcgagcttgtgtggcgtcagggtccgctccccagcagaggagctcgctcccacgaagggatgcgcgattccactttgccgtgagcccacgcgaggcgaggaaacgacggcttttttgcgctgtggagcacctcgccccgctcgctcgtgccctcgcgccgcctgtggaagggttttccccaagatcaccctccaaaatcgcggcaacaaatcaacaaatcgacagcagccgtcctcctgcttctgctcctccttctcgcggcggcggcggcggcggcagtggctgtcacacgagtaggtggtagccggtgctgcgcggctcctccgcggggtctggaggcatgggaggagcaagcggcgtgggtggcgcggctcctccgaaggccgttgtcgaagaagagagcgccacctcgccagtgcaagcaccccaacccggtgctcacctcgcccgcttcctcctcgccggccattcttgagccgctgccgccacgcacgccgagcccgtcgacgccgtgttccgccgctttggccaggttgatgctgagctccactgccacacgtgttgagcccgtcgacgctgagctccgccgcggcagccggggacgccacccgccaccgaccgcgccgaccaaagccgccacggcatgggaggcacggcggcatgggaggagaggagaaagatgcacgacggcggaccgggaggaggagcggcagttgaggcggagtgggaggaggcgaggcgcgagctcgcgaccgggaggaggagagttcgagagaagctaagggtaggtggggaaattttatcgccccactaccccatgtccacgcgcccgaggtcacgcgcaccgtggatttggaccgaatcattcggttacctcccacactacattaatccaattaaccctttcggctaactttttaagttaaaagtacggatctcatagcttgcactgtgaaaggtctagagaggatccatgtccataccataggtgtttgaacgatcactcagaggggccggataacggcgatctgacttcgatcctacagcttcgatcgatcagcagccttggatgcgatgcgatgcgtggatggatcgatcaggtggcatatcgctttcgtaccgacgagacgacgaccaaagtgcatgcaggctatagctttggatcgattcgtcgtcggttgggcttttgttggggcacctgcaaggtagctaggctaaggtaggcgcttgcttgcattgcacacacactcgcattatattgttggatcgttccgttccaacgcgtccggagtaacaaaagttggttggttggttgggttgggttgggttagttagttgacaagtagtagtactaatttgatttagacgtgaaacgattatatatatattggtggttcgttggttgcctgggtcgtggaggccatgaattcagaagcttaattagcagctgcgtttaattattattagcggatgcaacactggtggattcgctagtctctccttactatatatacatacatatgatctactgttctaagtatatatatacacgacctaactactttgctcggccgctatcatctctgtttttttttcttttcactctgcatatcatttccaaactccaattctgcttcatttgtttttttcagcttgattctgccggcttcatgttggttagttatagtatcttattaggggctaattttaaagtagaatggggcttttgagtccaccaaattaacacctcttttccttcggtagtcaaacctcgcttggatgggccgtccgtctgcagcccacggggatcacctgctacagcaccaaaccagagcaatgtggatacaacatgttcgtctcgtcgaaatggggctgattgatgcttgcttcgttttaccaaagttctatagctaaagtgtggcataccgcaatttatgtggctacgaaattcttggccataagttagacaaatgttggcaaagatatgtgactatgacaaatagggtcacaaaatcaaaaagtgtgacatgacaaagatgtggcaactaagcaaacactaggctaagttggccaaaatagcttgccaaagttgtggcaaagtatggtcaccatccaaacaaccccggaatgcttcaactggaacagcctttttatggccatttgctgttatgagattatgacctcaataacatgggctgtgtttagttcgcgtgccaaattttttgaaactatacggacacacatttgaagtattaaacgtacaaaacaaattacagattccacctgtaaactgtgagacgaatttattaagcctaattaatctatcattagtaaatatttactgtagcgtcacattgtcaaatcatggtgtaattaggctcaaaagattcgtcttgcgattatatgcaaactgtgcaattggtttttttcgtccacatttaatgctctatgcatgtgtccaaacatttgatgtgacgaaaaaattagaagtttgaagaaaaatttttgaatctaaacacggccatgttttcagggtgtgtttagtttatgttaaaattaaaagtttgattaaaattgaaatgattgatggagaagttgaaaatttatatgtgtagaaaaattttagtgtgatgaaaaagttaaaagtctaaagaaaaagttacgaactaaacctggcctcggttagattgctgagaattcatttcacgaaatgtcacagccaaccctaagctcaatcatgtacagagaccgaagaggattttaactcttgcacgcaataaaaccttgtgccatctcagtcaaagtctacttcctaattggacacatcatataaattaaataccttctgttctgtactgtgtgtcctactccctccgtatcattttaagtgcaaccataaattttcatagccaactttgatattccgtcttattttttaaaaaatatgattagtatttttattgttattagatgataaaacatgaataatattttatgcgtgacttatacttttattttttttaataaaacaaactattaaagttagacacgaaaaattatgactatacttaaattaggaccgagggagtgctttagattcagttgagctagctcgatcacatccacgatgaccagttaatcagagtccacttaatttcaaggtcagcatgtggccatgggctccattgattcttctactcctaccttgtcaacatgagattgagacttgacttgagagagtgtgtaaagtgacgacatgaacccccaaaaaaaaaacaacaacaaaaaaaaaactgtagttgaaacagagaggaaagagtgtggactgaaatggacagaaggccaggaatctaggcaaacgtatgtacggcttatggatagatagcaagaccgacacttgtaatggcgtcgaaactattcaccgtccttttctgacctgtcgagtagcaaaattaatttgtgtggactgttgttagcgcatccccatcaagagccgtcagtgttctatctttgtgtgatgaatgccaacagcttagaaaaacaatgagtagaacgagattttaaaggggaactaacattgttagtttagtaaaatatgcaaagcatccggatgcatatatatgaattgaacttcatggttatagctaagtaccaatatatatagtacatgaagttgctaaatgctaagtgaggagcatttcagaatggaggtagcaagactaacctttgttattcaactggttattagcaacactctagtcggtatcatcaaacgttccatctttcaatccggcaaatctgcaaattttgggttactatcaaggatgggcctatgtggttgccctgtttttggttgggctagtggacaactttgctccatccatctttctctgtcggctgagcccatgcaaccttcgcctcctcctctgttcaacttcgtttataaccatcttgccttctactaatctgcacttctgcagttaacaggtcaaaaatagcactccctccagttccatgattcttgtcattttgtacaatatcacgatctcttcatcaaagttctaatagtttaaccacaactttatccaaaacaagaagaattacagaaccggagagagtattaatcaagtcgattacatcataaatacaagaggggcaaacaaaaaatgttcagcaacatagagcctttctcatggcaaaactgttgtataagtgcacgcaatgctttatttccgaggtatacaagcatcgtgagagatgtggcacattgcatctccctatctatacggctatatatggtgccaccagattctacaaacatgcaggttagtagtggcacccagcaccaatgaccaaacacatcggtgtgttggatttggataccatgcaacggatatggggcaaatttacaatttacaggttgccccaaaaatgccgccagctccagcctccttaagctatagtattacgttgtgaattgagttactgcatgctattccagagagcagagaatttatgccctcaatgatgcattggccggctgtcaagttgccccgctcattttcctgaacttcagagggaggaaattgcttgaatcggcgttcctcttcttgccaaaactgctaggtgtgacaccagtcggtgagaccaaggaagtggtggtgtttcgccgaaacctccccatgttccaatatgagaatccatcatgttggcttccagaactaggagaacgcatagcaaaatttcttggtatcacactttgctgtcggtcatggatatcctgcaagagatcaagagttaatctgcagtaatacaacatgtaaagttgtaaacaaacaaatgaatccagccttggactactacaattcaattggtagttattggtatcctacagtttctgtttatgataagatctctatatgttatcctggaacaaatcaccaaccaacaattcaacatacaattatggcaactagcatggcctgccatcccttcagccaggaaaaaacaactcaagagtaacaatcacaggcactgacgttagaaagatccaaggtgaatctgctgttcacttagatggttcaattaatttaagattaagacttgagtatggaccatgaataagagttggttgctgacaatggaaaattatgagctcttgctagcaagattactcttagacaacatgcttctaggaaatgtcaccttataagttgagtgccactagttactaggtactccctccattccaaaatataaggcataaccacccctaacccaaagaccaagaaacaattattatcatcttgtagtttggatcatcctaatcatatcttactataaagttatcccgcactaactccttaagcttaacatgcaaagatgccacatcatcatccactaacaagatgccacatcatcatccactaattaacaagatgtcacatcatcatccactaacaatcatcacatttaaacatcatgcaaacatgctatatctttatagtttttataatttaagagcttttcaaatacaaacatgttaaattatcatccaacataattcacataatgtttcaatgtatatcttcatgcaaagatgccacatcatcatccactaattaacaagatgccacatcatcatccactaacaatcatcacatttggacatcatgcaaacatgctatatctttatagtttttataatttaagagcttttcaaacacaaacatgttaaattatcatccgacataattcaaataatgtttcaatgtatatcttcatactaaattcccgcagcaatacgcggagtttcacctagtaaatacaatgcatgcatccaatagaattagagaacatgagagtgtaggatttaaaaaagtaataatttaatggagaatggatcatagttaattgcctacatgtatgcatgccttatattatggaacatctaaaaaaaaagtggttgtgccttatattatggaatggagggagtaatgattagcaagatacaattgaagacatgggagaatgaagacgtgtggtgtctaggaaactgaacttttgaaagaacgacacgagttaaagccaaaaatatttaactttttatggtaccatgtcaacgattagacctattttctttattttcgtctattcggattttagttaccgcttgaagcactgaacatcttcaattcaccacatatagatcttgcacaccttccttttgatctaacttgatataactcacctacaatcacgcacaatcactatgtaaataaatttctatgggtaatgcacttgtgcagcactccagctttacggcattctaattaacttgatagctggcaaaacctgacagaaatttactcatcccttcaacattaatgatgtttgatatctagtaagctgaattgtgtaaacttaagtga

SEQ ID NO: 7878 - DNA, 23667 bp, Oryza sativa
attcctgcagcccctgcttctccgcggggggggaaacgcgatgggttgggcgggaggggggaggcgacgacacgagaaagatgaggaggagggggggagcgagacggccagccactgctgccaccagtggcgactggcgactggcgagcgatccctctgacgcatggggccctgggcaacccaacccctgttgctcctcccttcttggacctttctgcactgcagagtgcagatcccaatttggcaatttgcaaccttagcaccgcgacctgctcaggtggctacagctagtagcctgcgtttatgcctgctattgtacaactctatccgtctcattttaagtgcagccgtgaatttatttgtttaatgtttgaccgttcatcttattttaatattatcattattatcagataaaaaatatgaataatactttatactccctccgtcccgaaatatagcaacctatgactagatgggacatcacctagtacgacctatgactagataggacatcacctagtacgacttatgtccagatacatcgtactagatgatgtctcatctagtcataggttgttatattttgggacagagggagtacattacttaaattttaaactttttcataaatttttcaaataagacggacagtagaacgttggatttagaaatacacagatttaaaatgggacggagggagtagtagtaacagagtagatatgcgcaaacaaggagcatgtgactgatggttggtcctttgatgcgacttgggattttgtggatatggaggagactgtacaatgtgccatcgtggcgttctctccctattttgatagggaacgagatcatatatgctacattatttggatttgagtcactaatatatggtttatttattatgatttatgtgtaagtgatctagagtcacctggcatcatggtagagaatccgtgtctatttgattgagctaaatatggtgatggcggtgactatggcaatgaaaaatgatgtcggtggtgaactggtgatggtaataaatagaactgcctgtgtttgtaatttaatgacatgacgtgcaaatttgtattgttgggttgttttgttccagttgtgtgaatgtaaatagcgttgatggagaaaatataatagtgtagtaaaaaagatttcatttcgaaattgatttggactacattgaaaaggctcatttgtgacatgtgaaagggaacacgggtggttgctatatccgagagatagacacaaacacctatgggtatgtccatacctctcacatccttgtcatcgtacgcccgacaaatataggacaacatcaacctcacatcatcgattcgttgataacttatcgtaaacatttgagaaatttttcagtgagcataaaaatgcacatctccgatgatattcaacattctccgcggcttgtctgattggattgccacgcaattcgttcaagcagaaaacggtgacagctttgacagtgaggagcatatgacaaaaaggccaagaggcagacacttccgttttgttattatgggctgaagagagaatagagaaagctggaaaatcacagctatggaggatagccggtgccaattatttcatcgttggtcgagacggttactggttactggatgcatgagaggccatgaagttatttccactgaactgattgtgtgagctggatggttgatgagcaaacaaacagcaaaattaaattttgagtttatgagtgatggcatggggtgtagacagctgcggttcaatgttaccatcggattctccgttcatcattaagcagttcttccatttcaaaattttgccaaaatttaagctggactttttcctcgggccgatttgagagacggctactccttgccaagccaacctgggattttccttaccttcgcatgctttagttcaatatagttcatgctgcgagagtacgccgtgccaaattgtcgatacacagattttgaaggcgtacctgcatatatatggattgagatcctctgacttcaagttagagaggcgtgatcattgacatgtggatccgattgccagtgacaatgacttcgactaccattagatgacatgttaacatcatcttccgcgagcacatcgtctctggccatcatgtccaaatgatttcctgctgttggttgaatgaatgtcagcggctgcaacaatattaaccatgtcaacaaatgtttatccaacaaatgggatgcaagtatagaagaatgttaagttctaatatgacctcgaaaatctgaaaaaacaacccttgtcaagacattccgaaaatctgaaacttttacggcagcttcggttctaacaaaaaaaaaaaagggaagctattgcagtagttccgaatcaaaggcaccatatcccgtatcttgaatttaagtagacatatcctataatatttccataactacaggcggtttcccatttaagtgactaaacaataatccatctgccacaaacatgccaaatcttgttgcgtgcgcaggatttataaccatttactagatgtgtagcctctttaacgtatcatgtttggctagtgctacatgaatagagacaccaaacgaacacatcatgaatttaaatataacggaattccgcaacagtatcagttaatctgtatgatgatacatcggttgacacaccccttgttcctgggtcaccacggggatcttctcgaacgagaagagggaggacaccagctgagctccaagctttggatacagaatcacttgcatcacccaaaatcaatgaggaaactgcatcaaaactgcatgcagcaagtcaagatctcgtgcagctgcactgtcactagaaagttcacccaaacataaaaggctaacagctccaagatagtgaagaagagctgcaactattgatgtcgtcatggcagctgatgacccaagtccagttttggcaacttcaggtttgctccagtcattgttccataattccattagcaacttctgaattaaatgtaattggacagaatggaggcagcgaaagcaatacttctggtctggagttagagggaggccacgtgcttcaatctggagaaacggtggaaaaagacaagttaattatttaacagcggcacaatgctccaaaagtgagttatattcagacataagttaatcatggaaagagagtatatttgcagtttataaaaccatgcaacccatccgcattgatttttaatttttatttttgcagctggttcatccttcacagttccattgaatatttatttgtggacacaatagaggatatcatatcatgaccacacagagtacaatacaaaaacttttcaactttataaagtacataagagaaaggatagacctcaaagcaatgccattacattataaccaatcgtgttcaatttattgcagttacagataggtgaaatgtaaacatttgccaatggaatgataattcaattagcagagaatctaacatcaccaggtatcagatatacagagagaaaatacttattacaaagcataaagcatatcttctcccttatggttctgcctgagccaccccttttcagtaaattatccgagtagtcatgaaaaattaccaaaagttttgttcagacatctatccaggaaaaaaaaatcagctgaaaattactacagattgtcaggagggaaagaatagaaggctttttcttaaatccttaattaggcactggcaagtggcaaccgtgtttgttagtgcttttcgtgggatgcgaagaaaatatatgttcaagattaggtggtcagcaaagctgaaagaatcaactagggccacgttcagattaagtcacacttctttgttaaattctaacctgggattggtgagttaagctcttggctaaaggaaagcaaatgcgtgacaacgcaagctaattcagaaaagaagctttacctgttctctataggaataaaaaatcgttgcaacctacaaaaaatagagatgagaatttaacaacgatacgaaatcaaattatagcgtggtattcaaaatgattcggacaggagcaaaacttgagactaaaatcgcaaaaccttgcaaaagcaaagcttgtccagtgcatccttcccctctttgtcagcgactgtcacttccgcagctgccaccgagaattgcactgtcttgttccacaaaagggtttgcagattccctgcaacatcaagtcattaaccactatcaccaaacatgattacatgaggtccaagtctccaatgacaactacagagcagagttctgctgcgcaaatggtacaatcccagcaaatgatcatggactacttaccttgaggacgtcgatttcttcggggagagcttgtaggtggcctcccgggagagctgaggagatgtcactttcacattcgtccacgcctagtagcaatttaccatatgggacaggtaccacacagagtaaggattagttctccctgatggtgatggctactaaattgtgtgagaaataatctggggtttcgggggctcacccatgcccaggattcgtcgtgggtgagctggtcgcggggcgggaggacgacggcgtagaagcgagcggtggtgatgaggacgaggccggcgttggggcgctccagcacctaggaaacctcccgcgacgagcaccttccccggcgccgacgccgacgccgcccccctgccctgccctgccacagggatcggtcgaacggtcagacctggatcgagggctaggcaatcgaggtcaagtagagaaagagaaacactcacacttccattctcggcttcggcggcgaggggggacgcgatccggagctcacggccggcggcgggaaatgccgggtagcgcgcgcggcgcggcgcaagcacgacgacgcacgccgcctttcgaggtcgctccgcttacggcggggcggggcataggaagcgaggggcatcgcgagcgcgcgggcgcacgcggtggccggggggaaggacgacgacggcggcggcggcgccggcggcgagatggccttttgcagttacgcgggctcgaggactgggcttggtgaaatggcctcctgggccatgaggcccgctactcttagcttcaatataaaaattttatcctcttttttgtttcttttttgtttaggacaaaaggattcctccgtttccattcatgaaggattcgaattttatcctaaaatataaggaatttgcatgtctaacgtgtactcctgatgactctttatatatataacgactttgtagatattaacatgcatgtcgtgtttaggcgcatttagattttagggcctgttcactttgctgccaaaaaaaaccttaccaaaaatgttggcaagatttcttatatagttaccaaaatttggcaacaaactaaatgtagccactttttttagcaactttactaaaatttagtaaggttgaaaatggcaccaaagtgaacaggcctttagaacacatgatgagtatagcacgatctagtttctatgtgcacaaaattactttaaataaaaatcatatgctacacatggtgtaaaccgtctttattctcccagtcttgtttggcactcggaaaaaaaaaggaattggctgatgttttccctcgttatgcatgctcacacacttttatatcctgtgcgaatgcaaaaaatcatgcttgaagtgtttatactttatagtgataaaaacaaattttaaaaattaattaattaatcttttaagtataacaaatagttaaatgtgtctctaaaattaacgatgtcaattatttattagtagtactatgcaacatatcgtaccatccaatatataaaccactccaatagtaaatcttttggaccagatattaatttcaaggtcatgtggaggtttaattgcatatatgctagtactatagaaatctaagcattagatctggggttgctaaccaatccaattaacaaaagacagccattttgctggctaattctcctgcagcacgtgcccaacaccgaacccgacatcccatttacttttaagcaattttcacaaaactcatatattatactcccttcgtcctaaattacaatgtataaatttttacacatgttttaatgacatactttaaccaataatttattatattttatattcctagcagatataaaattaacatcacattaaagcactttaaaatatgaatctagttttttactgaaagttaaactatgaatctagtgatataacatacataatatttagcataaatatatggttaatatgcttattagtcaaaaactaccaagtttgatcttcctaaaaagaaataggacatcctataatttaggatggagggagtagtccaatttgttttataaccattataaccttatagagtcataaaccacaacattaaacattttttctttgactagtaaggtgcccgtgcgttgcaacgggaaatgctatatatcaatttcaaattatattaagtgaaaagatattaaataatcattgagtgaaaatttattgaacacggaaaaaaaatctggcaatccaaaaaaactacaaatcataattgttctatagattactttcaaagcaagaaatatgttatcattatagaagtatagtgcaaactttctgccacatatataaaacaatctcatggtgtttattaaattataaaaagacaacatagatagaagactttcttatggatgatcacctcaaaattaaattactacatataggtaaataactattctaatgttgtgcacttgcgatacacttaaaaaatcccgtgcaccgctagggtgttgctttcacactcattttgttggtacatcagtagatttagcaaaaaaaaaattgccttagctcgtcaccatcctggacatgttaaatatttataattataaaatatagttacaagcccgcgctagcgctatggtgacgatttatatcgtaaatgaaacaatcataagattggctattaagtatgtcgacgtttgatgtcacgactacagtatttggacagtatggggatcgttggtgctaggatatatgcgagactgaggtaaaagagatggtgacagggatttttatacaggttcaggcccctgagctatcaggtaatagccctacatcctgttggccggagccgatgttgctttttattcaccataatcacaccaatacaatatgtggggtagcctatctaactattgtcgacatggcggtctgaaggtctgactcgtagttgacaacagggtagccttcctcctcgagctcgtgcccgacggaatcagagacagtgctagatccctacggccggcctctgaaggtaccggatagggtcgatccaggcgtatctctgatgtcgatatccgacggcttgtcttggcgtatgtaggcttctatgttgattgaggtggccgtgtctcttcccttcctagggggtcttgtatttatacccatagatgttccattatccaagtagaactagggaaaccaatatggatacaatccgagtagtccttgtcgtttccatgtagaactctggttgtctttccttaccggaactcctcctatatctgaaggttgtttccgtataggacatgatatgtggtgggtcctgccgagatttagtcaacttctattaagtatgtggtatccataaccatgacaaagtatatattcaagacattaattaagacttaagtatcagatagttcaagcaggcaggtttaatgagctgagtacagaagctctttgtcaaaatataatataatacgcaattcttttaaagaatagaccacgctaaacttattgcaataagtttcggtccatttttgcaataagattttagcacgatctattcttcaaataaaattttcaaaatggtcaaattgtcaaaatttcagaaaatactctttgtcacaatataatgcaatatgcaattctttataccataaatactgcttaaacagacaaaacgctaattttagcgaagttacattaagaaggttttcacttcacgtcagaccagcacaaagagcctattacaaggtccttagttttactatagtgtaataaaccagcagccaaagaaactacatccaagacaaggtccatgattcagtcgacgatgttttatcaactccatgttatgcttgatgtcttcagcgtctttctcccacgtctcacgccagtaaccaaagaacgaaagtctgaaccaatttcaggacacatccaatcaatttgttcgaatacataattcatggcttttcaacgttaattaaagcatcacattcatatatcagtacatgacatggcaaaccacaaagccaaggttgccataatctaagctacgaccaaattacagaaatctttgcatttgcgaataaatgaccaagagagaatagattaaatcgcatgcactatttcagacacgtttggtattcacttccaaatatgagagtatgtactaaaccttaggagatatatgattgcgtccatattctaatacagaagtatatgatacttgcttcagataaaatctgacaaggagaacaaaagttcaaactcgtcataaaaaaatgtgtgcgtgttgagaagtaaaattataaaggtaccattttgccatcgttctgaaggagctaactctgttattgaatatctgatcctttttttcataaactcactaatacgtatgagctagctttgattgatcatcatcagctagaagtgaaattgtaagtcaatagtgaagataaatgatggtttagagagagagagagagagagagagagagagagaggggagagggtggggtggggaagggggatgaactcaccaaaatatcccaactgcatacaaccatcaagggtcacgcattcgtgtgtgatagagagctagctaaagggctggcacaggcaacaaaatcaaggcagcaagtgccagaataatgggacatgatcacattcaacgacaagaaatatatagtattttccgagaattgcccatcctctgctagaaaaattcccatgttgagctattttgatctgaatccaaagaaactattaatcaaaaaagagaaggtgcagatttgcagttcactgggtacaaaagttagatgcacctctttaacatttagcagattgctctcgacatatgacaacaacttcccagtcaattgagctattgtcctttagaccctcaaacagctcctccttttgtgtatatatgccttcattatatatatgtctgaaaaaaaccaaacaaaagggggaaatttatgaacatccctgctagttggttattttacaaggcattggaaaaaataagaaaaaaaatatgatctactccatagtaatgacaccctgaaacaaacagatacaagaacaccaataaccgagcacatgggaaatcctaataattaaattgacaacacaaaaaagaaactaccaagaccacaggcagcaagcatgacttggagtgaagaaagctgctaacaacatagggcaggctcccatctgccaccagccggctcagattgcaccagcagcaagcatgttggagtatgcagcaacaatcatgaagcaggataggcttagttggtgatcttggggttggtgtggttgttcatcttgagctgaacaatacaaccataaaatgttagtcctactgctaggtatgaaaactcagttcaaatttttaagaaggtatcagatctatcacaactgagggttattaatagtagaaaatgtaagcagtgtcaactgtagagcagatttacaacatattaattcttgggctagctttaacatatgttatgcagatttacagagatgtagttcactaattaataacctgcaaatttttgtatttgtgcaatggccatctatgagaatttcaggatcgatatatcacgaacattgcttacataatcttcactgcatcgttccattttttattttcatccactctgaaacaatcaaggaccagattagttttgagactgcaagatccaaattagtttgctccaacatataatttgaatctttctgcttggtagcaacactctcaacttcccagcagttcatagccctagagtctatacatagtaattggatatttcattacattagcataaataacaacagagagaatcctgcaatcattagtataaataacaacataggggacatgacaatatgacattctcacttacagagaaatcaatttctggtaatacattggctaagcagcatttcgttgaacaccttttgggcaaaaaagagcattagtgatcctgcaatctgtaataaccctcgacactcacagtgatgattcttgacaaatgaatgggttgcaacgtaaagagaacgaaccaattaaccatgcgtcccttctccggcagaagttctgccggagggatcgtgctcggatggtaccgggggcatggagcgctggaggcgggcacaggtgtcacctctcccatggagcgggcgaggcggctgggaagcagattggcgaacctcgcccttggcaccgacctgggcgaggggcgagtgagggatcggcggcggcgttgatctgggcaaggacgaacaaccccgtcgcaccttgcacttcattctctccctcaacgcctggtagtgtcaccgcgcgcagccgtcgttggagtgaggtcttcaacatctcccatctgtcggctgttgtggcgtcgatgcagggtcagcgtccggtccccaatcggcggggtgtcgggcgacgagcggtggcgacgagcgtgtgaccttgagaggcggaggcgtgcgatggcgatctgcagtggatggatggaagcgggggtgcggccgacggcgagacgcggcggatggatggaggcggtgccgggggggggagtgttggggcgatagggcgggagggaccgggagagcaggcggcagaggaggaatggatcggtggtgcgaccggcggcgagacgcggcggatggatggaggcagtgccggcggggaggagtgcgataggaggagcggcgatgtcgacccgcgacgacggcggcgtcgattcgggcgagcaggagtggcggtcggtgaaggcgtggtgggggcgcggcgaaggatgaggggagcggcgtcgacggttggatagcgagcgcgatccggcctgtgggggagaaaagtgtgattcgcggaggggaggagtgcgtgcgatgggatcctcagcaccgtccgatctgccaatcccacggttaataagtcgcgtgtctgctagggttggagtgactgtcaccactacagaattttaaaaagtagtagagatacaccatgcatgcatatgatatcctgcaaattatatccaaaacatatgttttattaattcaaccgtagtaattttaagttattgttttttattttttacaaaattaagatatggttaacattgtggttctataaaaccttatgaccaaaatacccatgattatacgaacatgcctaacctcctatgtagggatggtaattgtgcccgtttgcccgtttatccgtgggtaaaaaccctattagggttggttttgttcgctattttatacccatgggttttttattgggtcaaaggctatgtccgatgggtaaatgggcataggtattgtcagggttacggatagggtataccctctacccttagatatacgttgtatactgatacggtatacccgcgcgtatacggatatttcccgtgtacattaaggaaattcatcacaagatagatgcggaatccacagatagaaggagtcctactcggacagaactgggtcgttcctgtatcgtgtggggtccgatgtctccgagttctacttagagaccaactgacctgcggtataaaagtgaccccccgggaggacctaaggcattgaatcttactgccaacacatccaccacagcctacgaagtcggagcctacaagagccaagttgccgggtgatctagtcgaaccaactcgactacggtctcgtcggtatcatcgagttctgctattccatttgtaatctgtggattccattatataatcccatatcaactggattagggctattacctattaaggagcctgaaccagtataatccttgtttcctgtttgcttgatgtcgtactacgtagatcctcgtaccagcgtaccccaataccctctatatccggtctacgggtatcccccgtcgacaggtatgggtaacactacgtatgcccgctttgcccatttacccgtgaaatctaacttatattgtaggctagaagcaaaatccactagaatacatcactactacaaaatcaatttttcatggcgtcactctatttttttctctggcggccatacgcataaaccgccattaaaaatatattgaggggtgaggggctaagtaccaccagcgaaaatagattttcactagcggccgagttaacttaaaatcgctcccaacctcacacttctccccaaccttatccgctcctctcccatccccatcccatcgctcctacccatctctgtctccgtgagcccttcctcctccgctcctctcctttccgccgccgccaccgcgcgctcttcctcctccgctcctctctcgcccaccaccgcgcgccctttcctcctccgctccactcccacccgtcgccgccaccgcgtgcccttcctcctgcactccgctcccacccgccaccaccgcgcgccgtcgacactcggcgaccacgacgacgacgccggccgagagagcggatccaccgccaactcaggatccggaggctcctcccctccctctgtaccctctccttctcccagatctagctggaagggagtggttggcgcagaggaggtgatgacgcggtggaggaagaggatgaaggggaggcgcggtggaggaaagggtggggtgtgccgatcagcgacgggggtacacgagagctctggatctgtcgggcggcggcggtgctcggcagtgcacgggtgtcagcggtggtcggcggtgcacgggcggagagacgtgcgagcagcagagctcggtgcgggaggcagatggcggatccggcggcgactcgttcaagtcctgcattggcaagttctccatcggcaagccattaggcaatccggcagccccaagtcctcggatcgacgacggcgtggagctccttcctccgtgacgagctgccgccgtggagctccgtcctccaccgccgtggagctccttccttcgcatcgagccgctgccgggagctcggagccttgggttcagcaaccgctgctgttcttctcgtggtgaggcaatgggtgatgcatgctgggattgaaacattttttttgttccgcaggatcgacagcatggttggcaaaattaattttgatttttgtgatggtgaaattgcactgtgaggccaacatatttgaatcgatgcttgaatttgtgattgtggacttgtatttgtgatttggtgagaagaagaggatgcttgaatttgtaattgagggcatatctgaatcggtttgaatttgagtttttgtatttttgcaccggagaatattttcgcaggcgatcctcttaagaatgcgcctgtgaaaattggttttcgcaggcggccttcttaagaacgcgcttgcgaaaaattgattttcgtaggcggctcttttaataacgcccttaaaaaattggttttcgcaggtggccctcttaagaacgcgcttgcaaaaattgattttcgcaagcggtattatgaccgcttgtgaaaaccaatgattctctggcctttacttactggcggggctgctcagccgccagcacaaacctctttttaccgccagcataaatgtttttttaagtagtgcataagctacgttctttgttttatgtggttttctttttatttcccttattatttttctcccacttcctctatcaccgccagaggagagaccccacaccaaggcagagaatatttaatgttttcagttcgattcaaacttagaagcttgtagacttttgtttcactgattttgttgtagccggtaaacgggcacgcccgcgagcgatgggcatgggcaacaatctttgcccgtcatgtagtaacgggcatacctacgggcaagggtatgggtaggcactgcccgtgcccgtcgcacccgattgccatccctactcctatggttttttgcaacttaaggtttgtttgtatgactaccgtcaagtgttgggtagtaccaaattaaacataggcaagtttggcactaccaattgtttgattgggtaattttgtatttagtttatagtgaagaaagttctagactgctaccaaaattagtatgggtgctaccaaaagtattggcttcaatccaaattaaccaatagtagaacaaattttggtagcaattcaaaactgcccttaaagcataatactggggttttgtaaaaattatttatttcttattttcaccctcgacttaacaagaaataacgaagcggtgacgataacaagtcaaacaggatagcaatttgcttagcttggtgtggcccagtagtttagtttggagttgaaacgatgatagcgaagtgtaaaaggcggtttggatttctcggattttccttctgtgcagcttagcccttttaattagaacaggtcaagcaaaactttgagcctttcgttctgtgagactgatagactacgaccctgtttggatcagggcacatcgaatgcttaacactaattaaaaatattaaacatatactaatgataaaacccaggactaattcgcgagacgaatctattaagcctaattaatctatgattagcctatgtaatactacagtaaacatgtgttggctatggattaattaggcttaaaaaatttatctcgcgaattagctctcatttatataattttattattatacttctaattagtatttaaacattcgatgtgacagcgactaaaatttaattcctagatccaaacaccacctaactacgccatgatttggatttcatgacatgcaccaaggacacacattggtggatccatgtacatgattccgcacgtgtagaaactatagaacagattttctgagctaaacgtagcatccatgattttcacatatatagaccagcaagttaatgttacttgtcaatttcatgaaacttcaataccagttattatgattcttttgctaatttatttttgagataatccaagaaatatcattgacaaacatccaaatccaagaaatatcattgacaagtgtaagttttaagatatgctatcgtacaaacgactttgtctaaaaatgccatcgccgttaggttccgttcattccgcgccgttaaatactataggatgaacaatgcatttaacgacgtggattggatggaaccctaacggtgatggtatttttaggataaagtcgtatgtacgatggtattttttggaactcacacttgtcgatgacgttttctagatttggacgcttgttaattatatttctttattaatttataaaaccaataatctgggatgatggcgtgggtcccttcctcttccccttcagatgttgattcaatcttccacttcccctttatacgttgattcagcagtaacattttatgatttaatttctgtgatttgtttttagtttttggaggctgcgtttgtttcagcctgttactaatctctctccctcgttttccacgtacatgattttcaaaccgctaaacagtgtattttttaaaaaaaagtttctatacgaagattgcttaaaaaatcaaattaatctatttttaaaaaaatagtaatacttaattaatcacgcgccaaagaactagtctgttttccgtacagaggagatgggttactaacccagtaacgaacacagcctaagacttgaatggagtgtgtagaccggatgatgggggtcggcgccatgcaaattggctccaaagtttaagagcaaggataacaatagatctgacggcttattattagccaatcttaaaaccaatatatataatagattagctataagattggctacaattttcttctcccatctctatcttttacttatacatttattgtatttgtcttggagtttgtgttaagctagctcttgcattagagccaacacctttgatttttttatctctcctccatataagcttagagcaagtttaataatatagcccactactagctacaaatcatctatagccaatgtaatagccaattcatacaatagttactcactatactattaatatctagtcccacctatcatacacacattatgtcttggagtctgtgctgcagctggctacagatctgtagcccgctgatcttctctctcttcctttatctcttgaaaatatgtttatagctagcttatagcctgctattgtacctgctcttacagtaggtttgttcccaactccctactctcgttttccgcgcgcacgcttttcaaactgctaaacggtatatttttttaaaaaaagtttatatacgaaagttgcttaaaaaatcatattatctattttttaaaaaaaatagcaaatacttaattaatcatattttaatggaccgctctgttttccgtgtttactgtttgtgttgagaacatgttcgtgtgaacacaccctaaagactcagtgccaagttttgatcaatttatataataagcatgtgtttggtttggggacgaagtgggatgtgttgggttcatccctattttctggaatatgatggttctattttttgtttggttagagggatggagcgcaccctattttttgttttgttagagggatggagtgagatggaatggtcccatcacctgtttggatagagggataaggtgggatatctggataaaaatacttcctcaactagaattggtgaggttacttctcacatgaacaatatatttttagcacctacaaaaatttaataaactctcacacaaaaaatacattcgtagcagccccaaaaatttaacaaaaagataaatatgttgccatatcatgctcaagcactaattaatcatctcatcacaaattacttgcacacatcacaaactaattcttgctcacatgaaaaaaatgtctactgaaagaacatgtacagatctgaaacgaaatccccatccaatgctgtcgttgggattctaggaggattggagaaggaacatcacgcatgctgctgacattggaggccgacggcggatggaggctggttggacaccgccgtggccgccgacggctcacccctgctcgcgtgctcctgtcaaatgagtttccgcaaaaggtctcgaataaaaaaaatccagagtcagcagtcagcactcgggtaacgcaatcgacaagggttgagctagttccaagcaagtgtttccttcaacttctctcttcttttttttttttgaactgctgagattgtgttttcttgcacggatcctggtactatttggacagacgcaggcaggggaaccttgaagtcttccccggcacagaggatcgggtgtgtttcggggggcaacaaggtggcgtggcgtggcccccacatccagcctagaagtagaaggccgcgagacatcctggcctgacctcaaaagcagctccccccctccccagtctctcatccgctctaccgtgcgcgagcgagaattttaaaataacataactttaataaaaaaaatataaaaatacattttgattgattaaaaaaacacaaatttagcaccttatcaaataatcaatatctattgaacaatcattattcgatttgtatttatcaaacaacgattgttcaacaggttagggtggtctaccgaactcgataggacccacagcccacacgcatgcatgcacacacatcgaattctctatttttttaaactctatcgaacaatgtttgtttgacacggttattcgataaggtgttaaatttatgattttagttaataaacatttatttttataatcttccattaaagatgtactatttcaaaaagaaagaaagttccgagcgtgatgcggctctcgtgtggctggactgggacggcaggcagcggctggccacacgagctccgccacacgatgccgcggaccggaggggcagtctcgtccactcggtggacgggcggtgcgctctcgcgcgtcacgccgcgaaaaaccaacgctgcacgctatatagactatagccggttgctgacggcggctggtggtgtggccgaaagcgtgccggccacacgggcaaatagccatattacaataggggaggaggaggaaaaaaaaagaaactatatgctctgctttgagctttctggtggttgatggtcagttggtcacacaagaaaaaattgcaacttgagtcctcccatctctaaccgtttttcctttttcttccttttttctgcgtttcatttgctgtcatgagtcctgacaccctcctatatggaaaaaataagaagagtcttgacaccctggtcctatgaagctgtgctcgtactcctgtggcgtagacatgcaggtgcatgtggtaatgtgggataaagggcctgttcggctgtctggtacagccactgtacgtagctgttgctgctacagcagcagactcaacttactgtttgggttggctgcacaacaataaagttaagtgcagccgaataggcccataatccttgagaacgttagaaaccatgcaggaagcccattaaaaaaataatgaggtttcctataatttcgtatgttttgtttaagttccacacaaccccaagatcctatggccctctttgaaatggaaggattgtcaaaataattttagaggatttatttttctaaggatttttttaataaaatcctttgattcataggaagatgatatgaaaattttcgtaggattgttttcaccaattctttagggaaatgagcaagtgactagacctcttgtgatatttttatttggttgatttttttctatggtacaatcaactggctcatctttccgattattgtgttctcaattactataggattataaaacatacttcctccgttttatattataagactttctagcattattctcattcgtatgtctagattaattaacatctactccttccgtcccacaatataagggattttgagtttttgcttgcaacatttaaccactcgtcttattcaaatttttttctccaaatataaaaaacaaaaagttatgcttaaaatactgtagataataaagtaagtcacaaataaaataaataataatttcaaatttttttgaataagacgagtggtcaaacattcaagcaaaaactcaaaatcccttatattatgggacggagggagtatatgaatatgagcaatgttagaaagtcttatagtaatatgaaagggaggaagtattattttaattcaaatgttttttctgttcctatgtgttttttcacctgtgtttcaaaaggggacttaaattactttttatggcaacctatgttattgaaatgtcgggcacagaacattttcagtgtaggagaaaataaccattttttcttgaggaccaataccaggggagtgaaacttgatatagttattgaagttcagagtcatcattactgaccggtcatctttatgattttgaattttatatggataatgaaaaagactagaagggcaatactaatatatatagagttaaaaaaagagaacaaaatattggaacatcactttgaattctacacaaacctatattttgtgcttaacataacattaatatcgagtgcatctttttctcttcacatgctagtgttttgtgagcgggcaaacgttgttccgaggaagtaacgcttaagccatcaataaaaactattttcacatacaatgttttaactgttaatccctctctttttaatcaccatcacatattatattatacatccccctcctatttgaagaagaagtacatacctacaaaaatgtttagtaaccttccgattgacaccctttatttattttcttttcaatcataaggactaaaacgaaaatgccaagaggaaaaaaagtgaaattccgagaagtacaagcccttgaagcgaaaagcgcaggtattttagctgccttgctccaagagagcagaattcctcggttctttcaaaacgcaagggaactaaaaacgaaacaacctgtaattaccatttctgtccctttcccctcccctccacgactccgccgccgccgccgccgccgccgccgccgtcatcgccgccgtcgccgacgacgaagccgacacagagccacacggcggcgcgctcgaagcaatcgaaccaacaagcagccgcgtcgaatcgcataggaggaagagagaagttgggggcagcaaccaacagctaggggtgggtaggtggtggtggcaaagcagcgggggtagcgggaggagaccggggcggcgggcgcgcgcggtgccctcgggagctagcccttggccccgccgcctgcgccgtcgcgccgatctccatcgccaccggcgagcagcggcgccgggggcgtcccgctgctgcttccgccgcgtgctctgagcgtctgattcccctcggccccgcggctcccgtctcctcgcgagctcgtctgcccgccgcctgcgccgatctccatccatcgcgagcagcggtgccgccgccgtcgtcatggtgagcaccccgtaccgacgcgcatcctcttcctttctcatctccatctcgttctacgcacacttttctcgaattcgcgttatccatatcttctcttctagatctgggactggaagctaggttttctatttgtcttaactttagtacgaaaacagcattttttccccaaaacaaaaagttaggggttcaactgaaattgctcatagtagttccatcattacttggtactactacacaatttttcattgctctcactgtagtgtagttacaaattgtttagctgcctagtttgccaccttacgagaaacctggactcatgcaaaattgggatagagcaacttggtttggagctttggatagtagtaacttggtaggtgaaatggctcctgcgagtgacatggatgacaacaatggttagctattatttgcggagaaattgattgtgcaataatgtgaaggacgcggaataagatgtttgcttatagcttcgtgtgaagcatggtattgtgttttacttttggtgtgcttgttgaagtttgctaggtgatgtttgaaatggaaccgtgccctttcatatgcattatgagcagtttttaggtcccgagtcctgacacaactttctgaactcgaatatttattcgaaaagctctaactaaaacaatttgaggagactgatattttcatgtttttgaaccaactagctaggattaagcttaaatattactgaaactctgcaaaacttaaatactaaggttttgaagcaactagtaaggaaatgctattatactttgcaaaacttataaatactgaggttttgaaagaactagtaaggaaacactattatactttgcaaaacttaaataccaaggtttttatatcatgaattcatgatactctgataccgcaaaagacaaatactaaggttttcaagccttaacaagtttgcacatcacaaaactgattttgacatattgcatggtaagtggactagtggagtgaatgttagcctgatgttttagtgctctgatttttgaatcttatcaatcttctagatgagaccccgtgtttttgctgtgggaaaattgcatgataaaatggtaggcataatgagcgaagtcggaattttcttgttaccaaatggtttatttcatgtgctttgtacgataagaacctttaatcatttctccaaaggctatacataattgatatgcatggtgtggaaaagagagacaatttgtaccttagacaatcacctaaaatactatgaaaacaattgaggtaatgtgtctacatgagagatgagagaattagcacttactacagttagtgggaggcaactatgtaagtataggatacaatcattggaggaattgttaactaaaattcacctgcgagatctactatgaatccacctatgacctacacgttggaggaaaaaaaaagaagaggacatcgaatcactcattccactaaagcaaatcctgtgtttacctttcggctaaaatccctatttcttgaaaagccttttaatgatatgtcatatgacgtattcgtcaaccctgagtgtctgatgcttggtaaagttggcagcgatacgtcatggacgtctcctttttatcctctgtcatgtccaacatacttatgcatattctcagttgtcagttatatatgacaatttcgcaagatgtaacacaaccctctgcatgagaatgagggaggagtattagatcatccatcaaagccttaaattattcttagttctgttttatctaggcatctgtttgattactgcaccatgtgttttgcaggggactcctgttaatattattgttggttctcatgtttgggtcgaggacccaattctagcctggatagatggagaggttgttagcataaaagacaatgaagttcatgtgcagacttcaaatgggaaaaaggtacagtttgcagtttcttatcttgcattctgcagatcatctctttctagttcttagtatttccttaaaatccttcaatggatctattttgctctgttttaatgtacaaggagaacttcgcaatactgtttgtttagttatttatatgtggcttcattgtaaccatggattgtatcattttgacataaaatggattacgagtttcatcacaagtaatgcttttgcacaggttaagacaaataaatcaaaagttttccccaaggatatggaagctccaccaggaggagtggacgatatgacaagattatcatacttacatgaacctggtgttctacagaatcttgctacccgttatgagctaaatgaaatatatgtgagtgccttatcatttctgcccaaaatcttactttagatgcactacatgactagcgcatgattatcattctgttgcattcccagacttacactggcagcattttgattgcggtaaacccatttcaaagattgccacatctctatgatacccatatgatggaacaatacaaaggtgcagattttggggagctgagtcctcatgtcttcgcagttgcagatgttgcttacaggtgaactgttgtataatattgatattgccatatatatgatcctgtcagcagattgtactttttatatacctacatttccctgatatgacctattaatgcgagcaaccagagcaatgataaatgaagggaaaagcaactctatattggtcagtggtgaaagtggtgctggcaagaccgaaacaacaaagatgcttatgagatatctggcacacttaggtgggcgatcaggagtagaaggaagaactgtagaacagcaagttctagaggcaattcattagccttctctttgtctgcatagtaatttatttttcaaataaaaaaaattccgttggctgattacctaataactgatataatttcagtcaaacccagttcttg

SEQ ID NO: 7879 - DNA, 21720 bp, Oryza sativa
tttctgtcaccgtgttatggaggtgagtcatggagatatatgctttgcatttcgttgcctttgttctttgcaacacaagcagagaaagacgaggacctcttcaaggctccccggttcccggccaacccctacaactgcagcaaggggagggaggagagagaggcgcgccaaagggaggagagagagggcggcggctggaagcgctgcaactgcgagctcgccaacgcgtagctccgcgctgaggctgaggacggcacgccgcccgcggccgcgcgggcctcgtccgcctcgccaacgcgcagctccgcgccgaggccgccgcctccgcctccgcgtcaccaccgccgtcgcagctccgcgcggaggccgcctccctcagtcgccgcctctgtgtcaccgtccaacgccgcagcagctccgcaccgaggccgccgcccccgcctgccgatgaccgagagagagagaagggaagagtgagagagagagaggaaggctctatgacaggtgggtcccaatattatatatatatatatatatatatatatatatatatatatatatatatatatatatatatatatatataatactgactggactgccacgcgtacgccatgtagaccaaaactactacggattgggtcgaggggggtaattcgtccggtttgtatagttgggggtgaagaatgtcggttttatggttcagggggtaattcggacgaccgtgatagtttaggggggtaattcgtactttttcctttattatatatctaagttacttttatcatatatataaattactttttcgagttgattaaattacttattatacattcataatatttttgagttgtttattttattatcatttttagtcaattccattatttgtgttgattaaatttaatttctagatatactcacgcttttacctccataacggatctacttttaatgtcatgacaaagttacttcctttttgttttaagttacttctataatatatgtaaattaattttaagctttactgaaattacttttatatgtttaagaagtagtttagtgaaatctaaaagtaatttagatatactataaaagtaatttgtaatttttcatcaaaatataatcatatgagatcttgttagaaagatttaattcttacgaacataaccgtgtaatcggatgagtagtttaagagaaaattttatttgaaacataggtgataggaatatattttctatttacttgatgagaactagtactacagttaaagtatctagatagagactcgttagcactaaaacgagaggcctacacgtgaacagttacagacgaatgtcgtgcatgaatacacgtcatgctagagtattagaaacgcaaacgtttcccatgcatgcacgtaaattggttggagttcacgtcacaactaaaagttatactataacggagacatgcaacggtctaattctaccgccattagttattatagcacgatagggctaacataaatgcgattgttgtcatgtatgtacgtggaagatgagaagggctaatcacctgtcgacgaatttttatttcgctatttgtagcccgctagctctaaatttgttaagacaaacttactatatagttctcatgggacaatgtatttgtttaattatatatatttttatagtggtttactgttatcattaaaacaatactattttaaaagggtgtgccaactatgtattttcatatgtttttttcaatggtaataaagctgtggtacaagaatattgtttggttctgtccaaatagcaaggttatccacgtttgtctatcatgacgcgtgctaccagtaccaactaatgacttgctgctatataccgatcgggtttatttgatcgttctcgagtgattttaaattcaaaaataataatcaattattggagctaatttaacataaggtagacataatcatagccgatcatatactttttatattgaactagctggacactcctagtagttgctttttatggaactagctagacgctcctaattgatgaattgctttggacaggggatggaacaagaaatactggagttgttacattgaaagttgcttaattgcttcaaggcaggttttgagatgctttgatcagattagcgtaatcaacgctcctgatttcatccttagccaaccagcaatgcatcataatctccgaaatttaaaatgagaaaacgaaattacatgagtcattttgtagctactactacaaagcagagggcttggataataaccattgattccatttcataagtaaatactacttttgtgtcgtaataattctatttctgtgatttaaatttgtactaaaataattgtcacaatagaatactaatggtcctattaatcacatatcattcaaatgtctccatattttaccctcaactacctttttactcttacctatacatcatttaataaggggtatcatattttttttctttttaaatcttaatgtgtactaaataacttagaatcacaattattttatgacagaggtagtattaggtaatctacatacacatcactaattttctcttacaaatttagagagagaaaaaaaaagacaactcaacatgtatcccaccgccaacaccacctcacatacttgtttttttaaactgctataatgtggatagaagtattgaaacggctagttcgttaacatttttttactattttggtttactcggatttaacatactcgaatatagggatagcaatttcccccacagggccggggccgggtgaggtttttaccccgcagggagtcggggccggggccccgcaattaggcgagtgaggggccgggggaggcattccacccgcggggctccggaggaggtatatcggacttttaaatatagcgtcaatcctaaatatagcccattagacccaacccgacttgagaaaaaccctacccataacacaaccccaccacccatcactcatggcgtactctccccctcctcacctagccgccaccgccacgccactgcgccggcgcgcccctctatctcgccctctcccctccggccatcctctttccctccgcctccagtcgcacgcgggccgcagccacacgcccttctccctcctgtttccaggcaacggcgcgcgggttggcggcacaagggcggcgcatgggcggcaaacgaggagcgaacaagcgacgcgcgggctggcggtgggcggagcgagggcgacacgcgggcaacgcacagccacggcaagcccgacgactgacaagcaggcgacgcacgcgagcctcttcctccgccagtcctcccctggtgactgcgggtccccagtcgggttgcggggccccgtaggggccggggccgagggttgatttggccccgcaactccactcggggctagggccgggtggaggccggggtcgttccagcccaacccggccctgacccaccctattgccaaccctactcaaatgaattggttacttttcttagttactcctagttattgctaaaaaaacaggtggctaattatcgtaatcatctatcaacgaagaagaaagcaagtaaaacgctacaaaattacacatatttatatatatttttaagaaaagtctaattagacattgacaataaataacatttattcagcgtttgccttttcaattgagaagttttttaggtcttgtgtaactcacggagctgatcgaccatcagttctcggggactcgtagcagtttaacatatatttactggtatgatatatggttggatggcaacaggtggagcccaggtgaatgtgagatccgggatcgtagctttagttacattatctccatgtgggcccagaaggtctcttccatactccatccgtcctataatatattaatctattatcagatatgatatattctaatattatgaatctggataaagctttaggttgattttttatagcacaaaaggaatagcatattgttgacttattttagtctttgaattgtaaactagagaggtaatattcagtagtaatcactatggtctattcgctatgattcgggggttaagcactattttttttcacgaactcgtaaaaagattgtatgtcaatatattagaaaaaagagtgtttgtttacacaatgcaatcaaccataccggcttatgccaagggaaatgagaaaagacaaaaaaaaaacaaggaaaaatgaagagactgctacgacggctggacacagctccaatcagcggggagggggcagagccacactaccctctaaaaaaacccgaaagaagcaacgccagctaacgatcatagatggccctcagtgaggatggactctagaaccactgagaccgaagagagagtaaagtcgaaaaccctaaagtttcgttccttctacagttgccaagaaaccaggagggccagagagtcgaagccggcacagagatgatcaggtaagcatgtcctaaaagatggccaccaattctggagccaattgccacgaggaggagagagggcagcccaatcacaaggcgacaacaacggaaccaagacctgccaagcgaacacgcagtcaaggaggatgtggttcaccgtctcaagctcctgagcgtaaaagagatagattgagtggcgctgctgaaatacaaatcaaaggaataacttgcatttagcatcttcacgtggggggtaagcactaccattgttgatttgatccctttcacaataatcccactgtacaaaggaaataattaatacaggttccatctgtgaataatagtatatgcaacccttgtttttagggggatatatgccacccttaaaaaaaaaaaaggaagatgtacttatgcagtactactagattatactggtgcagtacagttatttccacatgagatcgttatagttgacttcttgtctataacctcagctccgtcataaaatatgtttaaatttatagttacaaattactatattttacaaaacagggagtagtatatgttcgtcccgaattcctcatggaatagaatatcttgaaacgaaagcaaaataaccttcacctaccctggctaaattgtaaaaccatcgtaatatcatactccctccgtcccataatataagggattttgagtttttttcttgcattgattgacactcgtcttattcaaaaaattttggaattatttttttgacttactttattatccaaaatactttaagcacaacttttcgttttttatatttgcacaaatttttttaataagacgagtggtcaaacaatacaaacgaaaaatcaaaatatcttatattatgggacggagggagtaatatataccaatgctgctattgtatatgtaactgatgtttcaaaaaagatgtttttagtaatgcctaaactagcacgattaaattaatgagcttgatattgatatgacttttgctcctgcaattttttggtcgcatgcgtaatctacatggaagtcaacaaaagatcaggtcaaaagtcacgcttttgtcaagtagaagtaaaactttccagtagagacttcacaagttgacatcaaagttttgtttagtactactgttaaagcgtcaatgaactaaaactaacagcgaccaaaccatttaccatctgtctgtaaagccaaactggcaaaattaatcacatcacgcagtgtgctggagtttggttccattccataaaagaagaagaggaaaattgaaaagaaaagaataattgcagggatcagtcatcactgtcctcgtttaattttggctgtgctgacatatactgatctttatcctcgatctgatggcgatcagatggttagagtactttctcaattattgggagaattaaatcgattttcctcgcagaaaattatatcggtttgtaagagaagccaaagcgaaagcgatgacacacacaaaacgatatatatgcacccgtggcgatcggtaggcatgcagttccatctcaatctctaagtgcgttatatataacggttagcattagctagttagctgtactaattaaaaaggtataagttactagcacattattacttaagtatttttgaagatgattacttaagtgttgtctattgtaaacttgaaaaataaatttattaaatattttagataaacttatatttagtatgaagcatacttatttaacagtttgtgctcgtgataaacgaggaattagtttagctcaaatccactttaactagaacacaacttaagacatgtttcgaaactttttctcatttaaattttctctaaaattttttacttccgatataatccagactctcatttaaactattttaagattacatatatagctataagtatagagaataagtagaactcacaagctaaaaaaaagatcatttttaaaaaataaatcttatgagctggttgctttctcgtaatctcacgagctcccagacatgacacaagctcgaacagctcgagcattctcggcgaccgtagctactactagtcggcagagagaaacaggcggttgtaaataaaacaagcaaacgacgtcggaaaagaacaaggctttgacgacagccaaactgttggtttctctgggcaatgtacagcagaaaacgccaagaaagctacgactactgctagcgtggagtcaggtagagcaagcagccagagaaactgacgtgccgccgccgcgtgttcgttctcatcgcgacgcgcatccgccgcttggtccgtagctgcgatcaggattcccaaaccgtttaaaataagatgatcgtcatctcataatttaacggccaccacgataattacgtagttacggtataaatcgtacaattaccatgagatatatcgtggtttaaaaattaaaaatgttaccgtacatggataaccgtgtgataactaaccggttttttaaaacttgcctgggatatctcagcccacaacatttaccgtgagatatgtcgtggtttgaaaatttaaaatgttactgttcgttgataaccgcgagataaataaccggtttattaaaacctgcctgcgatatcccagccggcgacatgcatgtgctcgcgccaatacagcaatttatctacgccctcttgcccaacctcgcaaaaggaaaagaaaaaaacaactactgtagtaatctcagttcagattcgtcgtcagttgttactaataatcagttaattaactaatcccgaaaagagtgtcagctactcttttgagatattgcaactggccaactacatctcgctaaaacttgggttggttttatatatgcaggattaggacaaatgcgaataaatgaagcaaaatcaattagcgataagcactgcacgttaattattggatgaatagccaatacgtccctaaaatttcgctttggctcaatttagttcttaatgtttcaaatcgtctaaacaagtcctccaaattaatcatttgggttaatataatacttgaacccacaaaaaataccacgtgagcatgccaagtcatcctcgcatacagcggtatgaatgaaattaccattctacccttatataccatatagaaaaaaaagaaaagacaaataaaaaaacaggccagcccatgtcagcattgttgcgaatgggtggctgacaaagaaatttacgtgatcagtgcttggctgcagcaatcgtaagtgacaattctaaaacaatcatacatgcgtgaaccatttatcttcttcttttctttcttttctatatggtatataagggtataatggtcatttcattcatagcactgcatgcgaagatgacttggtatactcacgtgacactttttttttcaaggactatattaatctaaatgattaatttagatgacttgtttggacaatttaaaacctcaaggactaaaataaactcgaagcgatacttcaggataattcggatcctctgcattagaggtactaatgcagaggatgaacagtaccacgcattagaataactgtggaccgtcggatcaagagtgaaaggaccagattgtgtgctacagtaaattcggaacagtaccaaatagtgtactacagtgttttgaatcctgtagctacagtaaaatagacactgttcatggcattagctgctgttcccctcacatgaacagtgctcttctgcattacggcagacgatccggatccacttcaggactgtattaactatttgcccttaattattaaccattcccattccccgaataaggcgccaatcgccatgtgtttgtgcagcagtgggcctcgtgataattctcgtatcatcgttgtcacctttacggagagtaatggacacgtagagatcaaagatgattctccttgcttctttctttcatgtatttgtcacgttgtgccatgaaaggaaccaccgctggattccatctctgcgtgcatgtggctagctggataatgtgacattattaagaaattatgagaattatttttatgaaattgtttcacctgtttttttttctacttatatacatgcagagtacagtgagttttagtgtgcttataataatattgttttagttataaaaagtccatttcatcatatacgtatattccaggctatttagttcaagatcttcccgtcataataacaaatgaacacaatagagataaatggcgaacatatgttgattattcataacttatgaatcggacaaaacttatatataatatgtgtgtgtacattacgatttaaaaactaatggtaaaaaattaactttgatgacaaaaaaaatcaaaatcatattttataaaagttaaattttagcagcgtcttataagctgagcaaaagatgctgagccttaacaaatcgagaatacaattgaacggtcaaaaacagagtaggacccggcgaaaaaaagtaatgcagcgctgtgtacctcagcaaagcctctagcgcacagaatttatgttcctgacgatattcttaattcagtgtgccaattactccctccgtttctaaatatttaataccgttgtctttttagcatatgtttgattcaaaaactttcatgaaatatgtaaagctatatgtatacatataattatatttaataatgaatcaaatgataagaaaagaattaataattactttttttaataagatgaacagtcaaacatatttaaaaaaattaaatatttagaaacggatggagtattaatcaagtcagggccatcgaggaatgagatcacgcgcgccggaggtgatcggtgaacaggaggtagcttgccggcggcgggcgtctcgccgtcgccggagcttgctctgatcagtgccacccacctaatcccggacttgtgaattccggcccatccacagggcatggcctgggaagcctcaagccgctccgtgacggcccaccaggctctcgttgatagtcttcggtgcttcaccggcacggccagagcacgatcggacccgggctgaaatcagtcgggttggcacgacccgacctacacggtgggccgggccatgcccacctacttgctgcaccatcagcccaagcacgatccaataagactcgggtcgtgccggaccgacccgaagacacgaaaacccaccgtgctcctccttaaataaagtatatcttgcctccctaatctcgttgggtcatctcttataggaaaaagtacaccgaaggtctctcaacttgtcatcgagttacaaaatcgtcctcgaaccacaaaaccagatacaacgtatccctcaacttataaaaaccaatgcaaaatagatccctcgacggttttgatccggtttgtccgatgtagcagctgactcagcgtgggacccacacgggtcctgcatgtcagcctctcattcccctcccttctccacctctcttcctctctgctcttcttttctctcactgggcactggcagcgcagccgacgggtgggaggaggctggtgggggaggcgggagtccgacggcaaggaggcggcggtggaagcggccgcgcgacgaggcgacgacgcggaagcaggagagcctcccccatgctgccgccaccgccgccgccgacggcacgggcgccagatcccgccgccgcgggtgaccatgccgtcgccgtggaggccttccgcgccatggtccggcgaaggcgcgctcctgaatgcctgcacctacactgtcgtcatcgagcacctcgcctccgcgggattcgtggaccaggtggtcgacgactcgatgtgttccgcctcctcctgtcgctgcgcgcgcggcggaccacccggcagtacaacgtgctcgccgtggcgcttgcatcggcggggaagttttagctgctccggtggctcgttcgcgagatgaggtaaggggaataagaggttgacatgtgggatccacgtgtgtcccgcactgagtcagctgccacatcggataaaatcagagttaaaaaccaccaggagatctagtttgcactggttttgtaagttgagagatacgttgtatctggttttgtggttcaaggacgattttgtaactcgatgacaagttgagggaccttcggtgtactttttcctctcttatatggctgaaaataagtctattttgtatcctcgtctctgtcggccatgtcttgaatgggaacatggcgtgatctcaaaaacaacagggactcgaacacagtaaaattaagatatcgtctgttcggaatggaaacacgaaacacacacgaagtcagtaaccgaacgctgagacactactactagtacagtcagggcggaacttgagcatacgaaggggtgccgagtgaccaggttttttttaacctatagctagtatattttgtacatccactcaatacaaacttaaacatccgtaccagtttaaacaagatccatgataaagtaaattaaacaagtaacacactcctcaatttcattctagctccgcaccggatacactactacactagagatacgtttattcagagaaacagcaggtatgcagcaacgcagccacgcaccacgatcaataaagcaaagcaaagcagcaaccagagtaatttcgagaatcctaattctcgcgcgcgccggtagcgtgcactcccggcccacgcggcacgcgcgcgcaattttttcttcggtaaccaccgccgttttccttttttttcgctttctttttttccgtgattttttttcgctttcctttttttttttgcgttttttcctgattactttttaatcttccagcagcaagtgtttttaattttttttaaagtttttaattcttaacttgaaaatttttaaatcttaatttaaaaattctcaaatctcgaattgaaagttttcaaattttgagttgaaagtttttaatcccgagttgaaagttttcaatcttgagttgaaagttttcaaatctcgagttgaaagtttttaaaaccgagttgaaagtttttaaatccgagttaaaagttttcaaatctaggttgaaagttttcaaatttgacttaaaaaatttaaatttcgagttgaaagttttcaaatctaggtttaaaattttgaaactgtaacttcacatgtagatttctttttaatttgttagttaaaaaaatctcacagaaaaaataaaatcttatctactaccatcattatcctaaactgttattatctaatatactaatagattagtataactacttagctcgaaaaaacgagcaccgccgacgctcacgcgccagctagcgatgcccgagtaatttagcatcaggcgccgtggctgtgagcccgcagcagctgcacgaagctcttgttcgcgatcacacggaccacggcgagcgcctcgccggcacgcctcctcagcagctcagtgaacgggctgtcccacctcccggtgcgcctccaccagaggacctcgaacgacatggtgtaccagtgctcgatgtacggcaggtgctccgccgccacgcgcgcctcaccgctctcccacctgctcgacacggtctccccgactggccttagccgcagggcttgggtcagcaccatcgacagtgttgccacgccacgcctcatcgcctcctcgccggtggcaccggcgtcgtaggaggacagtgccccgatggcgcgcagcgaggccgccctcctgagcggcaggccggggatgttctcgaggccgccaataaggtcgcggtaggtgttgcggaacgggagacgcctggcgttgtcggggaggacgtcctcattaccggggaagacgtgccaatggccgcttcggttggcgaagccagcgaaggagtagtcgtgtttgtgcacggccaggtgcacggtgcaccacgtcgccgtcggcgcctttcatgctgacaccgtacttctccaccaccaggtggtggtctcgcccggccacggccgagaggaggaagaagaggaggaggagagcggcatggaagctcgccgccatggtgaaccaggacgccgagcaaaaacaaagctacgtgcaatgcaagaatattagtggtggatctagcatttaggatatgggtggtccgacctaatttttttttctaaacacagtaaatctaacgatactaatatatacaatgcaagtatagataatagaatagaccaaattgtaaaaaaattaccatgatatatcacaatgcataagagtttaataagattttaaaactaaaaattgaaaaacgtatacacatagaaaacctaaaattgttgccttgttggcgcgggcggctgatcagctcgacgacggctcctcgcggcggcacacgcacagcaggtcagcaccaatgtagtgccagccagacgcagcacagcagcggccaaggcggcagagtgcgggactcgcgcgtggcggcgtggccgtgggggcgccgggcgcgggcgctggccgctgggtcgcgcgtgccggcgtgggctggccgctggcgccgtggccctgccctgtgattggttgtctggctgctgatcgcgtcgcgtcacgtctgacgtggagtgatcagatgagatcgcggcgaagggcgaggaggactcgcgtcgcgtgatcgcgtgtgggcctgtgggcgccgcgagtcgggactcgggaacgacgggaggaagaggattagatcgctttttttccttttcaaaaatcgctattttcatttttcttaatatatacgggtccatcgccgtttttccccggaccaccctctatatccgcctacgatgaatatgaaacttcgcactgtcttgtgtgtggtcgttaaaaaaaaaaagctatgtgcagcgtgatattatagtgaaactgtccaacgaggagattatttcggcggcgccatgaaaaaagagcgtgtcctccctaccgccgacgagaaaagctgacaagagattttgtgtgaataacctgatgtttcatatgcatattagtacagatcatcacaatgaatttgctgtaaatttgcttgattaccaccgttaccacataattacacccgacgcaatttcaaacacgtacaacgaatgctgaaacaatcccagcgttcactaacacatcctacacaaagaaggttcagatagacgaccgatcgatctacagtagattgtacaaaagaaaaattggacgaaatggaaaacccaaattcaaattcgaatgaagtatgcatcaaaaaaaaaaaattcgagcattgcatcgacctcatattctcaatgaattctcaagcctgaatcgactgaattcgtcgagctagctagcgcgccatggtgatcgagccgtccttgatgaggctgttgctgagcgtcttgaaccgctccctcgagtattgccgcgacgccttcctccaatccgtcccggatttcatcatcgccacgaactcctcgtagctgatccgcccatcctgcatgcaaattcagagattgatcagtttcagagtttatttgggagagctctaacgcctaaatttaactccgagagccgagtttgaagtggagttgtggaggaggctaaacccagttacatttctccagttcattttgtaagagcgcttcaactaatttcactctaattctgagtggagttcaaactatctggctaggcttcaaaagagatagagctgaattgaagaacatttttgttgcaaatggagtagtggaagggaagcgtgtgtgtttaccttgtcggtgtcgacttctctaaggatgtggtcgagcacggcgtcgtcggcgtggccggagtcgtcggcgagggcgtcggcgagctcggcgcggtcgatgtagccgctgccgtccttgtcgaagaagaggaaggccgtgcggaggtggttgtcgttggagaggcgctgcaggtggatggtcaccgccacgaactcgccgtagtccaggtacccattgccatccacatccgcctgccaatgcaaaatcaagaactcgccattgccgccattgctatcttgaagaagggtaaagaagcttacggcctccatgagaagctccatctcgggctcggcgagcttggagccgaccttggtgaggccgtccttgagctcctggagcgtgaccctgccgttgttgtcggtgtccatgagcgcgaacatgtccttgatcacctccacctcctctaccgacaggtgttccgcgatcacctgcgtgcatcgctgggcggtcagacacagaaacgggctcgccgtcgccggagacgacatcaagagcagagcacgcacgccacgtacccgcatggccttcttcttgaggcggttcatgagggagaactgcttgaggcgggcgcggacgacgtcgccgagggggacgttgggggcgcgggcggcgtggtggagccaggggtggtcgagcacctgctgcgccgtggggcggcggcgcgggtccacgtcgagcatctggcggacgagggacttggcggcgcgggagatgcgcggccatggctcccggtcgaagtcggcggcgccgcggaggatggcgcgcgccacgccctgctccgtctcggcccagaacggcgggacgccgcacaggaggatgtagaggatgacgccggcggaccagatgtccacctccgggccgtagtctcgccggagcacctccggcgccatgtagtacgggctccccacgatctccctgaacctctcccctgtttcctttcacttgccaagtcagttttttttctcttttttttctgtatatttatcggcaaattttctcataaaaatttaacaaatgtaaatatgtgtaatcacacatgtaactataatgtaatttgtacgtaactttcacatacttttaaaccgttcgattttgctttaaaattcatgcaaggtagataagaaaaaatcacattgcacacgcatgtaagggaattcggttccattacctccatttcatggaaataacatgtcgcctattgatttttgaaagttacttacaagttacatgatactaaattataatatagttacaacacaattgtgctataattacatctttgacaacaaatgtataactagttttttggtgaggttgaagaaaaggctggatttgaaacatgggccgtatgaaatctactgggcctatctgcacagattgcatgtaggccggcccatctcagagtcacactctcactaggctctatctcgtcacaaatattgtactgtggttagtacaaatttatccacaaatgtatacttaaccccatattttgatgctttagatatgcatttagacttaaggtataaataaaaatccattttaaacgttcaagatggataagcaaaatacactggaattttatcactgtatatattatgatgcaaagtgatggtcaatattatgtttgaaagatcatgtcaatgtgcaaaatgtcttttttttttgcttgaacatgaatgtgcaaaatggagagcctctgtttataacaaaggacttgtcaaggagttttgtagaattcaaatctttccatttatttgaggaaaggattggagatctaaaaatctcatgaaattcctttggactgctcaatgcattaatattttggagtaaggttaaaacaacccccgtctctctgatccaattcttgtacttcttttattatacggatcctttgttatgcaaatgtatttatattaaaactctgcttatttgctattcatatgttttaccaccattcttacattccaagcaataacggtacgagttgactgtattctgaaatgatctgtccagctcaatctattcggccatgcaacatcaaagaggaacaataattaagaacaagagtgacagtttttttctcccctgaggactcaacaagagcgagtcgtctattatcgtaagatccttgacaccgatcttgcttatcttaattaagatcttgacagcaatctgctgccgaccacgacctcttaacagtctggacgcaactatggaaaaaaaaaactcggcgtgtggtggtgattttgttctcttttttaatcactgtttttcgtggctgcgtatattcggtctagatataaacacatggttttccaatccattttttttcaaaataaaaatattcaggttatacttttatattcttttctactatcgttaattaaaaaagaaattcagctttgtggtaggttgacgaactcactgaccgagtaagctaaacacaggggacggcgtgatgcgtgtctgcagagaggagtagcatcatctgatgacccagcatccacagactttttctctgaaaatttcgggcagaattggctcggtttttcggctcaccgtcacgatcagctgccatttcaaatgcagactgttcttaatttcttccaccggtgaaagtgaaattcaggcgcaagagggcaccgaaacgccgacctgttctattttcactgcacaccaaatttactaagggagggggtcaaatttgggttggttagccgaccaactatgggttcacattttgttagaaataatgtgttcttattgatgtttatgattcttttttaatacgagtgattttgcggttttttatgaggcatcgtattttcggtatctctctctgcaaaatttgattctccctccctcgcggttcatttatatttgacgttaacagaattacgattggttcttccaacgtcaagtacaaatgattggagagagcacctcttttaagtaccataaaatttctcttaaagatatgtttttcatatataaaaacataaaaggctctactgaggttttatatgtactcccacctacccattgatcatttgggggtgttttgtgctttatgatttggcacccgtgaaaagataacgtgtttaagaaatgggataaaatttcaccttttataacagaagggatcttttgaaaagttgtagcaggggactaattaactattcccaactgtgcttatagtattataattctcaaagaatccacgtgcaacccaaaaaaacaactgcaaaactagtttgagcatttctggaaaatctctgttttcatgcaattagatcttttgacattgtgaaggaaaaaatatcctcttttttttgcaatttcatctttgatattttgaaaaagctcccaatttatttacatttcaatctttgagattgtgaaaaattattgtgaaaagctccaaatttatttgcagatcaatttttcatatagtgaaaatctccaaaatttcttgcaatgggattttttgaggtactgaaaatctctaaaaaaattctttgaatgggatttttgagaatatctactaccactaaaaaattttgagaatatgttctaaaaaaattaaatggggaagagaggcaaaaaaaaaaaagttttgttcaagcgtgcatgcattgcagaggaagaagaagggaagaagctgaccaggtcggaagaagacggagaggccgaaatcgatggccttgagctgcgcgtcctcggccttgccggcgtagaggaagttctccggcttgaggtcgcggtgcatcacgccgtgggcgtggcacgcgcgcaccacctccgccaccgtccgcgccgcggcggccgcggcgcgctccgtgtaccggcccctcgccacgatccggtcgaacagctcgccgccgtcgcagagctccatcaccaggtgcaccgcgtcggcgtcctcgtaggcggcgcggaggcgcaccagcgccgggtggtccgggagcgacgccatgatggccacctcgcgccgcacgtcggcgacgtccacggcggtgcggaggcggcgcttcgggatggacttgcacgccagccgctcccgcgtcgcgcggtccgtggcgaggtgcgtcaccccgaactcgccgcgccccagctcgcggccgagctggtacttgtccgtgacgcgcagccgcgggtggtgcggcaccacgccctccagcacgcgcaccgcggacgcggcggcgccgcccctcgccggcagcacccgcggcggcgcccagtcgtacgggttgggcttcgccctcgccctgggcttgggcttgggcttgggttcttggccatgcctctgcctcgtcgccgtcgtcgtcgtcgccgacggcgccggcgacttcttggccgcgtgatgatgatctcgcggcggcgcgcccacctcatcggtggtagccggagcgacgcagcacgtgttgcccatggcgatcttctagaaccttctggaaacttcctcaccacagctatatatctacctctctagctagcttaattctatctacttctacatctctcgcccatctcagctcagctcagcttagcttggatgaacaagaagcataaagaaacaagggaaattaagccgcaaaatatatatatatatatagtgtgaatcaaatggtggagagagacgggcgggaggaagagaggagggataagaagaggtcgatgtcttgaagtggtctactacgcaattgcaatgagatcaaatcgacagagaaagagagaagaaaaaaatgagacaggaatcaatcaaatatagttttttgatgaatgatatgagctgatctgagtaaaaaaaaaacttaatttgatcggtaagaagcatcagtgtgcacgcatgatgctttgccatgcatggtcgatcgatcaaagcagggggtagaaagagggaggcagtgacgaccagtgagggagggagctttgcttcagggctacgtcgtgtcgagagatgggatcagtgagtagtagagatgagaaatgaagaaagaaagggaccatatatatcatgcatactcctactgcatgatgatgcatactagtagtatatgaacaagttgcagcgaaagaacaaattaaaccgaaactagttaacgtaaatttacagctatattctttttcttttaaaggcttgtaggtgtttatctcatattaatatatcttattaagtttccttttaaaaatgtaactatttagctaacatgtttatataaacgagatggtatccttgagaaaacactttaatttccctgtacgaatctgaagttttgatgcggatgaaaggatgcgtagcttcctagtacgagggacagctctaccaagaggcaggattactataaaattacctgatacctttgctgtctcgatctccaactagctacaaccatttctagctcgaactgttcttttttattcaacttctttttctcccatacctttctgttgctgtcgaagtgtcgagttgctgctgcctcttgcattgcgtcggtccattgagttggtctcccggtgtaggcgtgtatagctaggtgcctttggctcaaatgcagaatttggcctcgtatcgtatatactcgctacgtctcaaaataaatcgatcttgtacgatcgtaccagatataaacatttattgtactacaacatatccagcctcaacgtttggcatattttttgaatatttgcaaacaaaaattaatttgtgaataaaatttttatatatgtgttcttagcgatctaaaagcaaaggctgaaaaataaacttcaatgaaaaaaccccaaaatcagctccaaatttaacgttgaaaatttaaattttggcttataagcatatgaatatgccaaacgatgaggcccgtcatatccgatatgagattggtttattttaggacggatggagtatgcagctagtcagctgatctattagcctgcggtttgtgcatgcttaatttagcttttctgtgtgttgttccctgatctgtttgttgttcatcatgccgcgcagctggggtcgatctagctgatgccgtgtggattccagcacaaagggtacaaaacgacctgggcttcaggcatgcaagtgtctgtggtttcttcgaaaaaagttaagaatttattcggttatttaaaaatatacaagtgggcaatactattgctcgtacaaagacccatttaaatattttatatcctaaaaattttagaagaaaaaataaactagaattataataatcagggaaaaaaactgcttgtctactccactggcatccctagcgctacctgaagacggatgcgcgtagagcttaagccgtatttgttttgttcctacaacaaagcgagaaaaaatatatcatttttcatgcgcacactttccgaactgttaaatggtacgttttttattgaaaaaaagagaaaaaaaaattactttagaaaccatattaattatttttagaatttaaaatagctaatactcaattaaacatgtgctaatagattaacttgttttacctatataatttttccttcccacctctcaacaacacacccactacaaaatgaatggatgaaaaatgagctgttgtgtgagctaccccccttaattgcatcgctagtaatgcgtcccaatccctcagatatagctaagctagctactaccgtttgtttgtttgttgcgatcaagacacaattgaaatgtggacacgtcttctgaccaagtgaccagacgtacgtgtgcacaatgttttgttcgtgatcaattcatatgacatgacacatatccaactcccaacatctcgccataacccatactataggagtagtaggagtgaggtgactcgagaaaccaaaatttctctcttgcaatctccaccacaagcatggcagctgatgcaattaatgaaccttaatcaagcttagaatttaggaatgccggaaaagcacttgtgtggtgtcgaatcgtaggaaaatgacccatccattagggctaattttataaatcctaattatcacaaatattacacacaacgaagggaactttcaatcgaagtttacagccacattgtttcgcctatttgtagaataagcgaaacgacattttggaaacgaaaaataatttgtgaataaaatttatatatatatatatatgtatatatatgtatatatatatatatgtatatatatatatatgtgtatgtattcttagcgatcgaaaactaaaaattgaaaaataaactttgatgaaaaaaccctaaaatcagtttcaaatttaaggttgaaaatttaatttttggctgataaacataaatataaacgaaaagatgatgccctaagtgtgataagagatgtaccgtcaacttatgtccttttagcatgtataatattgtgtgttccgccgtataattgaaaaaaaattgcccatcctgcaagtaagagaggaccacttattaaacagggcagtgagagctaacgatggaatcggcgcgaaaggacg

SEQ ID NO: 7880 - DNA, 8648 bp, Oryza sativa
aggtgcttctaaagatttatgaggggtgaaaaataaagtaatggttagattcaacactagcaagtgttaaaactcatagttatgccaggcggttgtcctggcatatacaagatacaggctagacttgtaatatactcgtaaatgatctagcttcctgagattaaagcaaacatgccaaaacatatacatatctaattgtatcgtatatggaactggttgacatggtaagtatggacatgacatgaattatacgggacttgtaacaagtaactgtcatgggtaggtggttttggccccaagcgtcactgaccaggagctgtgatgaggaaagcaaagaagacaagaggcagtgagagaaacaggaagacagaataagtgtcatcaggacaggatttcctaataacagaatctcatccaaaatttccatactcttagctatatcctttaaatcctcacaggcaatctctaattgatctctcgatggaaatctcctaaccaaagaggagtatcaatccaactaagctgaagaggatgcaccagtgccagtccacagtagcaccagacagtatataccttaaaattaacctcttcgcagtatactatgtgcttgtgtctttttgagcttcaatacttcagagttcataaacaaatacggggtgtttattaaatatgagagcaaacctttgcttcatccatctcgatgctagcatcttccaatccatctagcatagatgagtctttacttactagagagacctggagaagttagtacaaaggcagagttgagaaagaggcaggagtcacaagtaagcaacaaaaaggatctaaattataagcaacagaccagtataggtgttagttgcccttccaaatcaagaaggcctttggcaaatgctgctgctgacatctgacaagtacaccatcatgaacatatactcagatgataaataacattacaagagaaaataacgcatagccacatactataagacaagttgcagacgatccacttctattttgctgctatcttctctctactatacccagtgatagcatccacttttatgattatcctactgaataacttatcctatcatttctgcaatatatttttctgtatttatgtgttcgagtacaacaatttgtcagtgtataacagtggtgtaattttatcaaagtagtgaaagtaccaaaatgagcgtgctgggcttgaatatacagatttgaagttaggctattagttatgacaatagtatattttgcctggttttccagtagtccgggaaatagtgaaaaaatgcaattatctaggagtacaattagattacagagtttccaataaagtttgaatatgcattgattaatattagactgattattgcttccgagccatcctgaacacggtatggatatgatcaagcagatttagcactatctgagaagaacaaacatcatatatcactgagaccaaacaattttcatcagcttaagttatgtttgcccccatccattgttccgtatttgataggttaaacacaagcaggtatgggctttattaccacaggaaataaaaagtagttgaaaggtaactaacaacaattacctatcaacaggtaaaattttcctaaatcctgttggcatgaccaatgtcaacatagaaaggaaaaacagaataaattaaaaaaataaaactatttcagattatctaaattgaactatttcagaggggctataaattgaaaaaaagaagaccaaaagtatacctgcacacggccttcatctgaactgtatatttttaaatcatgtctgtacgtgctatgaaggcgaagcaaaccagttccttcacctatattcaggataacatactagtaagaaaagaatattgagtacaagaaataaactttttttaaaaaaaaaaaaaagagaaaagaaaaccaagatgatacaaggtcatcatgcaagacaaggcagcctgacagagatcacatttcattgagaacattacattacttaaaatgttttaaagcttaaatacatgcaactttattcttaaaaaaaagaaacctgcaacagactgtaatgtcagtaaagttacttttcctagccaatcattgcctataataatgccaggttcttattgcatttatatctaaagaaaataactgaaattttcactagaaggcccattaatgacaggtgtgctagggccctacttgacaattctgtcgtttatgtcaatgagccaattgtaagctgaaggttttgaaaaacataattgatgtaggtattgtacagatatttaactagctaaaataagttgcaaagataaaaaatgggtgttctataatttcttgtttgctagcatcaagaacttcatctaagcagtaacttcaacaagccacatcaactactcacatacatgttattatgacagctaagtcaccttttacatgaacttcctttccaaattaattagaaaattgttgtagtaaactaagtggaacaggtgttcaacatcacaagcctgccaaggacctaggccactactgctcaagtttatggatctccagtgtaaatttctcttttcacttgaaaagaacatcaaagataaaaaaagttctttacataataacagaagcaacacaatgtgaatcttacctggatatatattgtttctgaaaaacctacccaactcttcagcctgaatgagaagcatgaaaaataaaatcatgacgtaagaataaagttgatcacaaatgcaactgtatgaactttgttcctgttgtatccaaatttgctcattcggttgtaagagttatttgtggattgatgataaattgaaaattgtataaaaattttcaaatttctattgtacttattctagatcattacaactcatcgatatttggctagtacgacataatagaacctagttgactaaccatcccaccaccacctattgagttggtgggaccttctatggatatgtttttcttctgatatatatatagagccttgcaagtttacaatattctggtatattcatttaaattccattgcaacgcttaggtactagcctagattggagtaacagaaaactagtgattgatacagaataattctagctctgaggcttattaaattaaacttagattaattaagttgtaatgagggagggtggatatttaccatgagaatacataatactccctccgtcacgaaataagttcatttttcacccatcacatataccaatagaaaactaactccgatgaaatgattgctcaaaaatgaacttattttgggacaaatgggagaggccaaaaatgaactcattgcgggacagagggagtaacaaacagttgaaaattaaagtaaaaagttatgagtacaaaacctgctttctcccagcatgagtgagtacaccgccatattttagaatcatcagtgcttcaattggtcgttcctcttcaccatcaccacagcgctttggaactctaatccatttcagtggctttagttgcacttttctataaataccagagaaatgcccaccctagtgttgcaatgataacaaaaattatcatatgtcagcattcttgtaaaagaatggtataaccttgttatgacagatatgccagcaccctttagaaggctggaggatatatacaagttccgtgctccttttaccactaggttcattatgtttgactacaaggtatgcaagacaaatatggcaccttgttccattaacggcaggaaaagaataagtaactaagagtgaaaagattattatagctccaaaaaaaattataatttcttgaattgaccaaaaattaacaaaaatctaacaatgttagtatcagagtctactggtttataaattaaaagtttgagaaatcaatagtaaatagcattcatgcctccatttgtggcatcatgaactaagtggctacaaagcacactgaatacatttgtgttagctatataatagtaaagagcctccacggggtatatctagtgtaaacctgaacaaatattaggaacaagaatattagggctcaaattaatgaaaagaatgttaacaaattgacaagaaagtctatggattgatagcaaaaacagaaaggaagtgaggttccgtggaagcggaaataacagcatgtatttctattattattccatagcgagttgaataattgtcccactttgtttcttccagcgcatagtcatttgaaatataaatttctaaataagggactaccccattcatccagattcgagtgtttgtcatgcctatttgatgccaaactgaaaaggttttgcatgcataatactagctactcgtatgagtttgcgcaagatatgttcccccataacctggtgaagaaatatccatatcacatggacaggcagatttgaattaaaaattacctcctccagtactgctttgacttgacgaagcttttcaatatgctccaaatcctcagcatcactgtcactttcccggccagacctagataatataaatttggttgagtaaatagaagatcaaactgactaaattaacaagtttgcgaattgtggcaagccaatagaagaataaacttgcacagacagctaattctggattggcttaccttgttggtggtacaagctgccttgtggcatctagcaagtcttgtagttgcacggcacttttcagttttgtctacaaggaaatcaagaaaaaatgatttagtttaagcaccaacaggataatgaaaaatgaatattccacaaaggggatacctcagctcttggctttccaccattgtatttcaacatcaaattcaggagtttttcctcagtaactttcaatttcactttctgctttggtgtccgatcgccactaaacagatattagatgtcaagacacaacaccaatatttatcattcaataccagcttaaccagcatagaggcagtaatccttactggcgtatcacaacaatgacagaacgtaattcttctgactgcccaaatgtgccaattattccacttccttgtcgtgtaagaccttcagtgggctgaactggttcattagatttccaaggaaggcttggagggatggttgaagaaagatgaggtgcctttgcatctagaaatatctttcgtaagatgcatgcagcatcgtcataatacctgaatgatagaaaaacttacgcaaatctttcagaactaattaaggtccatagacagtctgtaagaaaagaacactaggattaaataaattacttgtacgagttcttcacaaagctccatccattaacgtcacaaacatatgatcttccatcacaccttaagagatcaaaaccacaaacctatggaaacaagtcatatcagaacataataggaatattaggaaatactatgataaacgcaaggcggttatcatgaaaagaagatgagaagcaagcaaacacgatagatgcaaagtatctaaagcataactatagagatagtaaaacatactacttcccccaaaaattggacaacatgcaacaccttatctattcagcagagttgcaaattgaaacgtaactagattatataagtctgctgcagtatcagttgaagaattcactctcaagcaaaacaaaacaaaaataaaaggcacaattaatctaggcgttcatttcataggatattcaaaataaacttaagatataacaaagtaagctagcttaccatctgcctaaaagcactgcacacgtctcttgacatttgtttctctgtaggggtcaaaagcacaggataccgtaccttcaagtaataaaataaaaggtaagaaagatgacaggtaggaaacaggaatatcaagaaatgaagaggatgacacattgttcatggagtagatgaaaagctccgtgtcaagaaacttaatttagagtcataattcaaacattactaaacaacatccattaaatagccaatagatttttaaactactgtgtgtatcaattaacaaactccatgatcttaaaaataataaggttttattaattatcattagccataggttgattgctccatgcctgtccacattggtctgactatagggtagccaattacagcctggtgcaatacagcaagttctcaccccaaaaaatagtccgactatttcttctatgcactgatgagtaatatacaataaaaatgctagttcacgatatattgataccagagtttttaccatactccacggtataatcatttaacaaattgccaaaccaccaaaaatcaatccattgtcttgttcttggctacattatgtaaaattgtttgcacaaagcatgcccagtttaagttgacttcaatatcgaataaaaccttaaagctggtaataacaatcagaagtccattgtggaaaacggtatcaatttgacctaacagatgtggacatctcagcaaagagacctgcttgactgtgaatttgcttggaaacacatgaaatatgtgcaggtttcataccagtgatgataacacaaattttaggtggattttttctattttcatgtagcaaataccatggcacaacatgaactttgaacaacacaaatcaatgcatattcaaatgaatttaacaaaaaacatgtgtaatcgctcacttctttcccatcagggttcctcataacaacaccatcaacaactggtgatttacgtgcctcagcatgtgcatatcctgggccaactgtgtaaacctgaaaatagttttgtgataatttagacggaagccagaaaagtgaaatttttggaacatatgttccctgcatgatttactcaatgcaaaagctctccaaaccgttgaatgaaccatgtcaaaatagacaaagaatccaataaaaggagctgagcacactgaggctcgactttcttttattggaaaaaataggccaaatgatttttcttttgtgaaatgtgaacatggatagtttccacatttggtgagaccgtgagaagcttctcatccataaataaattgtatatggctgactgcaaggatataggtccattcaatttcaggttttccaaaacaaagctgaacataggaaagaaatagattcatgaatccttttaagagaacagccagaaccattaaagtgaaactaatatgctatttttcagtgtacagcagttgaaacagaacacttgcccaactaaaagaacagaacacttgcaaaagttttcttactttaacatccgtcccaccagtaggcatgaactcctcgtaaatgtaagatccttcacgcctcactctcctgacatcaggatgaaattcactagatcggttaccaacctacatttaatcagaaatataacaaaaagtttatttttgtatccagatacaagaaaaatacataagaatacatgaagaacagaaaatgttgtttggtttcctctgtttagaaaccacctgacatgttgacaaacaaaatataaaggagctaacaattgaattctgcaaagggaaatgcaagggatcaagcattcaagccatgtgatagcatagcaattataattaggtaaacattggcccctttttccttaaattgcagaaaataaaaggcatggatcctcaactcaaaataactccagagatatgttttcatgtatctttgttttccagaagccaaagaatcaaagcaattggcaggtttaaggactcaagggggaaaggtaattacagtcacccggtaaaagagtggtaagtatgatgcatgaaacttaaactgttgtggcgtgctacattcaaaattacctttcggaacagttccttcattccaccaccagcagaattaggataatatatcattattctatggtcatcccctgaaaaggattaaggaatcagttatcgtataattgatcattgtgagtgaaacatagactaacaagccatactactataaaaagggaggctaaaatgatagtatttcgttcactgttgtaccctcagcacaaaaaaaaatatagtgtatgctttcatgcatacagcaaaatcaaccacagcagtgccaatgaggcaatggaaacaacaattcaaagagacgaatcacagtacagcagaaataagttaattagataaatactggcaattaccattgacaggtttctccacgaagggcttcataaatcgctttccatgaacctcaacaaaatcttcttgctcaataaagtagtctaactcttggtacggatattctctattgacaagagcataattgggtacaggaattccatacttctccagatgcttaatcatgaaaatgattgcatttagcaaaatttagtaattattccaaagaataacttggaagagtaaatgagaaatcatgaaaaacacatcccataattactagaaaattattgcaacttgaggaagagcgacttggtgtctgataaacaagatgtggaagatacatacaaataaaatatttagaatgctagccaattcggtcagtggcaatcaaaagtacacccaagctgaaataaccttagattttttaaaaaaaaatgtcatctgttaaacttcgtgcttcagtactcctgtaaacatatgtgctgccagtacaatatagaagaaactaggtgcgttggtggtcgtca

SEQ ID NO: 7881 - DNA, 25572 bp, Oryza sativa
aaataagagagaggtggtgaggtggcatcctgagatatgggtcctacgctgactcagccgccacgtcagataaaaccggggtaaaaaccaccgaaggacctaaaataaacggttttgttaagttgagggatgttatatatctagttttgtggttgggggacgattttgtaactcgatgataagttgagggactttcggtgtactttttcctccggtggagtaataaagatgaagtccagtttgactccccaatcataggtcgagtctaatttgtatccctcgaaagaacggttataacggcttgttcaagtattaaaaccaatacgctctctcggcactgttgaacaacgtttttcgctgatgtggcacttaggtgacatgttgacgtagtcttcgtcctaagtaacgcggaatcacacttggcaaagaaaataaaaaaactaaatgggaccacatgtcattgataatttcacaaaaaaataagaagaatctgtggcccccctctctctctctcccttcttcctcctacctagcgaacctcatcgaacccaaccacgctagtctatcactgacctccgtgtcggagctctatggctctcagtgaagagatagaggcagacacggagaaaggaaggtagcggccagcgaaccccatcgagctccctctgtcgttgacctatgcctcaacattagagcagcattgaccgatggatgacgcttcgagcaatgcagtccccatcctagcgctcctcaggctccccgccactactcccacagcccatgggccaatagacgaggagcaacacgatgtggtcaccgtccatggggaagaggaaagcaacacgatgtgttgtggcatggagaagcttagggtcgcccagcactacggtcggcgtggttgaggtcgcgagcactgtggtgaagctccgtcaccggtgcgccactgccattttttcttcccctcctacggctgagttctctctccccgccgccctaggtgccttcttctcgtcacctccccatcatcgctctctctccacagctgcaagtaactctgtatgtttatatttttataatagtagatgtacagaaatagagttatatgcccagttgaactttggttcgcccagtaatgcagtttattttcttcgtgcaacaagcacacaacacatgtacataaccattttgtgcgtgaaggtgttggtttttttttttcattaatgcatgcaatgctgtctaggacatgttacatgtatgtacattccgatcgatcaagttggttgtacagagtgaatcacgaagaattgattcataaattttggatcaccatatatcgagcgcaaattcctaccggaaacacataatgatgatcgatacggagtatgaaacggatgacacacatcacagaaaacggaacagcacatcacatataattaattaagacaccagctaggccgatctcctgctggaagtagcccagaaatgatcacgacggtaacttttgccgcgcgctaacacaacgttgttaacccctgttcttctgagtgacgatgagttaattaactagagatctccatcagagtatcccatcgaacgggggctcaggtcgggcatggtggcgccgcgcagcaggtgatcccggaacgccaccccgatgacggcgagcgcgtcctccgcgctgccgatgttggcgcgctccctcagcacgccggtgaacggccccccccacgcgccgccgccgctcctcctccaccgcgtcagctcctcccacatggcgtcccagtgctcgatgtacggcaggtgctcgtcggcgacgcgggcccccagcccgccgaacaggagggtgtccatgaccggccggagccgctgcgcctcgccgatcgccaccgtgagcgtcgccagcgcccgcttcagcgccgcctcgccgtcgccgccggcggcggcggtggccgggtcgtagccggagagcaccgtggcggcgcggttcgtgaagggcatcgagatgggcaggccgcgcaggttggcgacgccgccgacgaggtcggcgtaggtgttcccgaacgggaggcgggccgcggcgagcccgagggcgtcgaacaggtgcccgttgccccgcagcgcgtgccagtggccgctccggttggcgaagccggcggcgtggatggtgtcgaccctcatggccagcgtccccgcgccgctcccgtactccagcaggtcgaccatgatcagcttgcccctactcgtcgccgccgactccacggcgacttgccctccgccggcgagcaggatgagcgggatcagaaggacgaagaagagcgcggccatggcggcgacggcgaggcgagtgcgcgcggcgcggcgtcgtacgtggtgcaaccgcctctgcattgcaagagaggcgatttttatcgacggtaagatcgaggcggacgggtagtaactagtaagcaggtgccgcgcgcgatcggcgtgagcgagcgaaaatttctggtttatcggatcacccggtacgaatgatttcggtttctcgtgttttgaatttggcagaaaattgtttgaacttgaccaaatttaatttaaaaattcaaattattttggaccaaaattaccgattttcggccatatcggtgaccctgatagaaatagcgaaatcgaaaaattgaaccctgccgggaatcgcttgaccggcgaggtgaagagtagagaggtcctcgtcaacgctccggcgagacggtggggggcagggcggtgccgggagagaaaaaggttgcaaagatttgcaggtggtgacacacacatgatcttttggtgtgtttgctgtgccaggggctaactgaaattcatactgctgtgcctgtgctgatcgtgtttttttaactttacgcagctgaaagtgggacagacttgcaggcggtcaaggatggaacatctccagcagcgggatgccgaaccaagctaaccgtgatcaactcaccacctacagcaatggccgatacagaattacagacattcattcaggctgtgtgttagatcaggggtgaaaagttttgacgtgtcacatcggatatacggatacacatttaaagtattaaacatagactaatgacaaaacaaattacagatttcacatgtaaattgcaagacgaatttattaagcctaattaattcgtcattagcaaatatttattgtagtaacacattgtcaaatcatgacgtgatcgtgattaggcttaaaagattcgtctcgcaatttgcacgtaatctgtgtaattaatttttttttcgtttatatttaatactccatatatatgtccaaacattcgatctaacagggtgaaaaatttagccagaggatctaaacagaccctcggacatgttcccattcctcgggaaactgctttaatcacccattcctctcagaaactttggatgggacacaaagtagtaaagagctttaactggcaggaaaatcccttaagcacctatgtgcagttgggaaatagatcccctgactttatgcagtctacagttgtgtcactggcagggcccacatgtcagtggcacaactgcaaattgcacactagaactagccaccacatgtttgcatgtggattcagatatatccaggtgagaaaaacaatgtcactaggagaaattatagcatgtatcagagcatttccaacaacctctccaaattgaactctccaaatacccatatagcaaactctccatccgatttggctagccaaactagttgttcactccaacaacctctccatctaccctctctactttgactctatgacatcgggacccatatgtcagcctctcccttcttcttcctcctatttcttcccctcttccccaccaaactcctcttttatccctttcttggttcttcctcctctcctctgctcttgtacgcctgagattgggagggggtggccggcgcatggtggtggggggttagcgcagggcggcgcgctggggaggaggagtccagggcgccggtggaaggaggctggggccggacggcgtggtgcgcggcggttcgatggctgagtgcggcggcgcggcagggcatggcgcgcggcggcggtgtaggatcgagatgtcgactagaggggggtgaataggcgatttaaaaactaaatgacacctaaacaaaactaacctaagttgctaggctcggtgagggttaagtctaactaagtaactaagttatgttttgcaaacctagggtgatagtggctcaattaattctctaggaaagtaaatcacactcctatgtcaatgttttgcaatcctagggtgatatgatctcaagtatgtctctagaaatataaattgcacaaatgtaaatgcgacaatcaaatgagataaggagacaagagatttttcaccgaggttcgaaaactcgccggtttcctactccctgttgaggcgagcccaactccaccgctcaaccatgaagccaccgcacgcccccttcgtcaaggggtgggcaaggtggaaagcaggcccacggggaggactacccaagcctcgatcactcgtggtagttcttccttcactccgaaggtggtgaaatccaaaccactcacaaaccggcaccgggcctcctccacaatcttctcggagaggtcaccgggcaactcctccacaagccgtctaggaggcggtaacctccaagagtaacaagcgatggcgcggctcggagatgatcaagtgccacactagctctacaatggaagcaattgcacttaactcttggctagaacaaccctcaaacacactagaaggatgaacacaaagctcaagtgggtgtgtgagagatgaaaggggtgtatgcaattgaagtggtgccaagagagtccccttgctgctggagagggagtatttatactcccaccaaccaaaactagccattgggggagaaatcccctaactctgtgtactgccgctctgaccggaggtgtgtggccggtcagacagtgctactctgcaacggctagaaaactagccgttgtagccctgttagagggccccattagcctggccggtcagaccgcaattgagtggccggtcagactggcctcggcttggtcagaccgccctcagctcggtctgaccgaatatggcttcatcggctctgtatcggccaccttgagcaacaccatcccagcctccagggggccggtctgaccgcacaagtgtcgtcagtcagaccgaccttgtgcgccggtcggaccgcccgcttggggccggtcagaccggacagggcacgccggtcagaccgtcactaggtggccggtctgaccgcccctggtcaggccaaaacacagtgaaactgcgtgtgttgtgaaaagtgtgtgtgtgtgtgtgatgaaatgtgagcacaagtctaaatgcataatgacctaatgtggcaattaagatcatctctttgctaggtcattacccctcttaatagtacggcaaagctataaataaactagcacaattttgatcgcccaacgcctcgatcaatttaaaaagaaaaacactagttaaccgtcttctattccttttgctttgcgccgttaattttaatccatcgataatcatccatgcgcacacataatatgaatctaacttaaaatatatagctcaaagacaacagttagtccacaattagtgcttgtcattaattaccaaaattaacaacgggggcctagatgcttcaggcagggcgctacgcggtggggcggcgtgtggcggaggcggcgcagagggcagcgtcggcacagccgtgcccggctgcgcgccggccggcgcagcggccgcctgaaggcagcttgtcggcgtcgaggaagggggcggaggcaggagtgaggggcgccgacggtcgcggcgagcgaaggatggcggctggccggcgagcggaggccggtggctgcagcgccgcctcgctgcaatccgccgccctgccaccgccgctcgcatgggagaggatgcgcgcacggatggcggcctcgtcgttgtcgtcgccgttgtccaccatcacaaggggtggccctctgctcctcgccggccttgcctgctcctccgctgcctcatcgctgtgtctcgtccacgacacctccgcctccaccgatgatgactacttcttgtcggacgacgtccacgatagcgccttcctgatccagtcctcctcctcatcggtggcgcgccaaggaagccgaggcagagagaatgctgagaaagagaggggagagaaaagtatggtcatgggtcccacaatcccaaggttggcgaaccagttttggctggccaagtttggccagctagggagcccatttagccagtcaaatagcttggagagtggaatagctagtctgttggagctcgtttttttttttcaaaattaccaaattttagcttggagagtgagatagctatactgttggagatgctctcatgagacgagaaagacaacggtgtgggggctcctcatcgcggccggatcaagggggcgtgcggtggcgatggaggagagggccacactaaggggaaaaggaaaagagaatgaaggtattattacttgtgattatcaatcaaaaattgaattgtcaatcttaaacttagagttgattttgaggttttttttatcgaagtttattttttaacctttgatttaaatcgttaagaacacatatatagaagttttattcacaagttacatatcagttacatattgttgttacatgcaagtttatattacactatagttatactatatttacatttgattcttttttttaaggaaatctgtcgataaaatatcgcaaaatctatttcgagaggcatctcgatttaggcttaacgagcgacgcggacaattacgtgagaagtactaatagcgctacagacatgcatgcaagtagtttttgctattaggttatacattttttttcttcttatgaaattttctcttaaattacttatccgatctatgatccgattacaccgttgtgttcgtaacaattaaatctttacaacaagatctcacatgattatattttgatgaaaaatcacaaattacttttataacatgtctaaattacttttagattccactaagttacttcttagacatacaaaagtaaattcagtaaaggctaaaaataatttacatatattatagaagtaacttagaacaaaacaaatgtaactttggcatgtcatttgaaataaatccgttgtagagataaaaacatgactctatctagaaattaaattaatcagcacaaattataaaattaactaaaaacaataatgaaagtaatcacctcagagcattatgaatgtataggaagtattttaatcaaatctaaaagtaacttatatatgataattatatatatgataatttgttcaatgaaaaaatgtattaattaaatttactttctttttgttataagttaactctataatatatgtgaattacttttaagctttactgaatttacttttgtatgtctaagaagtaacttagtgaaatctaaaagtaattaagacatatcataaaagtaatttgtgatttttcatcaaaatataatcatgtgagatcttgttgtaaagatttaattattacgaacacaacggtgtaattggatcgtagattggatgagtagtttaagagaaaattgtgtttgaagtatagctaccattagctgtgtagtgatgtctatgaaatatgtagtaaaattttaaccggtgcttgccggtaggtgttggcctgttgggtgcgtaacaaaaagtgcgtgactgatcaacgaaccaatcacattcgttcttctccacccagtgctacaacaacctataaaaccttctcctcctccgcacgtacacatccagaatggcgctctttctgccactactagtggcggcgtcgttgttctcgccagcagcagcgctgctcgccggcggcgagcatggcgtcgtcgtcgtcgagccgaggcaagtggagatcatgttcgacctcgccacgcagtcatggtaccacgagctctacaggcccctcaaagccgcgctcaccgacgacggggccggtccggagctcatgggccacgccgtcgtggacctgctcgacgacgaccagccgccgtcgaagcagatcacggtccgcctgttcgccagcggcggcggcggcgacgaggcgaagctcctcgtcgcggaggacgacgcctacgtggccggcttcgccaaccggacgggccactggcacacgttccgcggcgggcgctgccaccacccggtgatcatccccgccggcggcgcggcgccgtgcacggagctcccgttcgggggcacgtaccgcgaactcatcggcggcgtggccaacctgcgcgccgtgccgctggggagggcgtcggcggagagcgccatgcgggtgctgtcccgctacgacccggcgaccaccccggccgccgacgccaagatggtcgtggccaagttcatggtgatggtcaccgagcccatgcggctgaaggccgtgtcgcgcgccgtcggcggccggtgggaggaggagagctacctgagctccgacgaggccaagtacgtgccgtactggggcgagatatcggccatgctggtggagtggaacagcaccggccggtggggtgagctcggcccccggagcaagatggacagggcgcggtgcccgcggcccgccggatgcgaggacgacggcggcgacggcgacgacggcggaggcaagctattcatgatataagatttcatgattgtatatgcacggtctggtctgatcggttcattgtcggcacttccataatctggagtgattaggttgatctgcacctgtgtctctgtgtgctctgctgctaattaataaagtctctgctgtgttttggttgatcaagtttgcttaattactattgttgctctaattttacaagctgtaatggaagaagttaattaaacttggtcttgccaaagatgtagaatgaacaaattaaatgggagggagaggatggatacagtggccgttagatctagtatgctcggtccagattaaggcagcaagcagagatgggatattaactatatactctctgtcccataatataagagattttggagggatgtgacactttatagtattatgaatctggataaagtgcctgtccagatttaaagtatcacatcccttcataatcccttatattttgggatggagagagtattgttaaagtattaaactcgtgagaacaagttaaccttaggacatgtttgacgtataatatttgaataggttttaagtcaggttagcttcaccgaggtatatataacacctcttccacaatgcaaggagggtgtgttaagctaagccgcacccatcttttaccatttcaccttttagtaagatgagataattaaattaagttgcagcacataatagtgattttttttattttttacgagtgatccttagggctaatgggatcatataaaggatcagtataaggatcactctataatatacatgtagccttaatagaggggacttaatacgtccacctattttcacatcatcacaaatttgtgtcggctttccttgtgagttgtgacagtgagactgtgtgaaaagcaagctataaggggtgctttactaactacttggcggaatgtttggctagaaaggaataggaggatttttcaaaacaccccttgctcggcaagtgaagtagctcattttgtaaagcaagacttagcaagatttccgaaagacggcctttagaccaccttgaggttcttttgattgcttgaactcctatcccttcaatgggattgtaaatgcttttggttttttcctcctttcaattaaattccagtagttctcctgccggttctgccaaaaaaaaaaaagacagtgggactgtgcgagtggccacacgaaccagcagaatcacacatacagctcgggagaacatgaagggctatagctagcttaggtttcctcacttcctctggccaatttcactgtgccgctttcattgatgattattagatcatggttgtctcattggtgttcaccgatggatcagcttccattgagtacaaattaatttgcatcatattatctcaaaatttttcaatacgaactgcccttctcaatttatatcagagaatcaagtttttttaaaaaaaaattgaagaagcaggagctcctctactaaattaggacgaataatttggtctagaaacgaagaggagacagcgcggtgaaaagaccggcagctgcctcacgcgcggcgcaccgggatatttaactttttgctacactttcataatagagtaaactatacccacaatacataatttggtagctgtgtgtaatttggtgcaagaacatgagaaatgagctagtgccttttataatagagtaaattgcacccacggtacatagcttggtaggtttgtacaatttggtgaaaaacatgacaatgagcgttttagtgcaacgactcgacagatgggtataatttagtataagaagtttataagtgatcgtataaatacaacaactttcaaggtagatacgattttgatacaataagttaagaatttatatgataacttaattatttggtgtattttttatacatgtttaatttttaagtacttattttgacaatttactagtgtggatttgtttaagcatatttatatttttatcgtaacaactaataactgaaagtcaatataagtggatgtagaaattattatatatatttcggttgagatttaaaaaggtgaaggaaacaaacattattaaaggtaatgggatgtaaattggatgtgcaacgtaatttttaaagactaaaatcaatattatgatgtaatatccgtaggattgctgtgtaatggtatattgatatcgtgaaaaaaaaactcacctaagatatacttaactaatacttaactaagttgatgcaccaaaatactaataacttatcaagttcttgtactagaatacacctgcttttcaagttgttgcacttggacgttcaattctcaagttttgcactatatcacgcacacctgccaagttattgaatcgtatgtgcaatttatactctaataggtcctcatatgtgtgtggatctaatggtaaatttttaatggaagtagctatatttatggcgccatatttttcaccaaaagttagtcggcatgtatttatattgtaaggcactaaattacatatgtaattttagtgtatttacaatgtaagtcccaaaattacatatgtaagtactaaaattacatatgtaagtcacaaaattacatactaattacatatgtaagtagtgtgtaaatagggtgtaactactgtctaaatatactactaatatatactaattacatatttatactttaattacatatgtgtttcgctggtcggtacaaatactcatacttgatcgagtgcatgcagtgaagaaaaaaatagtagcaaagttctccagtagaccgctaattagcaacctgtaacctatgaagcacaactagttacgcgtaattaagtatgcgagcacgaatcctatgaccgatccaatggctcaacaagcgactgtaatcaaccagaaaatgtgtcgccaaaaatttagcaaaaccgtttttaattaccacgttaataaaaagtttaattattcccggcgcgcttgcctccgggctccggcgccgctcacctgccaagccactggaccgcgctataaaaccgccgtcgcactcttgcgaacccgagccactgtgctgcggcttgcacgccttcctcgccatggccaccgcgctctccgtctccctcctcctgccgctcctgcttcttctccatctcgccggcaacctccccgcggtcgtcgtcggcaagccgcacatcgagggtcccccggggcccgagatgatgatggtggatctgcgggactacgggagcggcgtgggtaccttggccgtgaggatggacggcctctccgtcgccggcttcgccaaccggagcggccactggcacgccctgcgaggcaacgagcacctgttccgcgtggcggcggcgacccctctcccgttcggcagcagctacggcgatctcgtcggcggcgtcaagaacctgccggacctccccttggaggaagacccggccaccgtggtgatctccgcctacgaccccgccgccgccgccgccgacgacgacgacgaggtggagctcaagcgggcgctggcgacgctgacggtggtgatctgcgagacgcagcggcttcgccccgtcatggacaccgtcctggcgacgggcggcgggcgccgcggggcggctcgcgtcgccgccgagcacctgccgtacatcgagcactgggacgccatgtgggacgagctgaagcggtggcggaggaccggcgagtggggcggcgggccgttcgccggcgagctgcgggagagggccaagatcggcagcgcgaaggaggcgctcgccgtcatcgggtggaccttccgccatattctgctgcgccgcgatggctccatgcctgagaggaggaccgaggacgtgccacgctatgggacattcgtctgacctctaactcgcgagtatgacgttgtagtagcggcaagtttatatcgttgacgtgcgtgctgtttacaagagcagatcaggtggctatagcctatatattgccttgatgaatttttttgagaattaatattatttttatggaaaatcgcaaaagtagtggccaatcggggaaaatcgcaaaagtaggtccctgtcgaacgggtgcaattcgatagggcacctatcgaacgacgggcagtcgacaaagccctgtcgaacggctggcgttcgacacgctcacttgtcgaacggagggaattcgacagggcccaccacccggcgccgcgaggcctgtcgaaccgggggcgttcgacagggccctccaccgaccctgtcgaacaatgggcgttcgacaggccggcttaaagccccgtccacccaggccgcgagttcgatttgtttgaggaccacatcgccagccgccgccgagagtcgccacatcgtcggcgtgagcgccggagggagcgaggggaggggatagcaggccagagaggaggctgaggaggcgccggccgggaggaaagggttggtgacgccctccagcagtgaagttaaggtatacattagtaatccctaagtacaatgcatatgaaagtttaataaaaaattggtttaagagttgttaattgtttcgtattgttcgatgttagtatgtatggttagcacatatttgttattgctaaatgttggtagaggtatttaagtaattgtacggttaaattagttcttagttagtacatattattgatatgttgtgtgttaaaataggtacaaaggtgttatattttatttggattattaaactagttgtttgttactaatagttgtaaattagtacacggcaatatagtataagttgtaatagggtaattatcgaatgattaaatgattaaacgtgagactatttgtcatgttttatcaggatgtcaggtgatatgcccattcgtctgtattatggcgatgctcctatacaaatatgtgatagcggggtggatttgactgtatatgtcttccatgatactagtctgaatgcaccggagcatatgggtttgaacgacgtgttagggtggttgtataatatatttggggtagatccagtgcacgataaatttgtcataaatgccgtgtggccagtgaggggtcaacatggatggcagtggagagtagtggaggttgcgtcaactgggagttggaggaagtttgttagtaaagtaagggagaaaggctatagcctagcaatagtggtgtagaagacaacatgtgttgatcgatcgggggagtcaagtcatgccgtggtggaagaaactccgttggaaggtggacaagctgaaaatgtttggcggactgagcaaggtcgaggggaagaagtagtagagggtaatacacaaggagaggtcattgttcgtggtactaatcgtgaggccaacgactcggacgatgaagaaccggattcgcctatgcgtgttgatgcagcggaggagaataaggcggtagtggatcagatggaagtggaaaacgaggaataccttgcgcttggtggaaggagaagatacaaccctgtagggcaacaaaactaacatacccgatgattggacggccatatcaatgagttgtatgaaggtaaacgatggtttagatgcccactggtgttatgatagtaagcaggtgaaagttggacagatgtttcatgacaaaggtcacttacaagatgcggtgaagaggtgggcatttgtccagaagcgtgagttcagggtgaaggtttcaaataggacgacgtatgacgtgaagtgcatacagggtggatttccttggagagtgcatggttacaagccacaacatgacactttatgggtagcttcgagggttgagcaacatacgtgtttgttggagaatacccgtctggtgcacagaaacctgacagcggcatttgttgcacaaatggtatattcaaaggtggttagaaaaacatctttgtcccctttcaccataatgcatgacgttgagaaagagtacggatatgagatatcgtacgacaaggcttggagggcaaaacagaaagcattggagatgaggtttggaacttatgaggattcttatcacaatcttcccccactattggaggtgatgcaggcaagaaacccgggcacacacatggctattctcgatgaggtgaatgaatatggggagaatgttcttcgtcgggctttctggtcatttgggtgcatgatagaggcctttagaaattgcattcctttgctctgtgttgatggcactttcatgacaggcaagtacagaggaacaattctaaccgcgatcggagtcgacgcggatagccatgtcgttcctgttgcttttgcatttgttgaaagcgagaacacatcaagctggctatggtttttgcggcacattaaaatgtgtgttgttgaaaatagaccaaatgtgtgtgttctacatgaccgacacgccggtttgctatcagcgatacagaagcttcaagaagatgtcacacagtccgtgccatggccagatttacatagcagacggaactctctcttcttttgtgccacaattccctcgggaacctgtgctttattgaaactatgacaaaactctgtccaagtaacttctgccccagttggacgggtcaccatgtagttgtcccaccaaatagaagcgggaccttgcagctggtgtgtagcaaaagcaaccttctcttgctcgttgcattgcaaaagattcagcttcttctcaatggcatgaagccagtcgtgggcctcgattgggttggtggtgcttgagaaagtgggcggcttgacacgaagaaattctaacagtttggactgaggaggtggaggaccaaactgcaggttctgctgctgctgctgtgcttgctgctgcacctgctgcaacacctgatggtactgttgctgcatctgttgcatcatcattgtcatcatctgagtctgattgtccaacacctgagcaattgttgggttctcgggcggtggggacggactgttgtcagatgcactgttggcacgtgctccattgatcggctcttcgctgccactggcgttgttcgagtcgcgtgaaccattccttatctccatctgaaggagataggtagaaatatgagaaaaggaagaaaaacagggggctcagaaactaatctttcttatgaatttaagtgcaattatcttaatcttgattaaaacactgaaaaagaggcacacaactcctaattgaggcagtcataccactgacacatgatatcgaccgccgactaacccacaagcaacaaacctaaacacgaaaactagcaagcaaacagactaagaaggcgataaagctaagggcggcgactctgaagctcggggcggcgcttgcaaacgagggataggactgacatctaaagtagacaagggataggaaccaattcatgctcaaatccaaattaaacaaagcaaaagaagactcaaataaataaccgagcatgatgattttatgcatagaacaacatttttcacgaaccgagacaaaagacactaatgcaactgactaaacaataacttaatgcatgaaatagatgcatagtcatactgatacgcataaacttaccccacctgaacatagacacgacctaatgcatatcacccgacaattcccgaccgactgccgaataaattccgaataaacttttactaaatccctagactgtcccaagtcgagaaatccaattaaataagcgaccaagatttttcccacaaatcaaaagaacaaaccccaaaattttcccgaaacaaaatccaagtgcaaaagggcatatgcataagaaaaaaaaagggttcagagggctcttaggtttccagttggcttgtcctacggtcaaggtcggctctgataccaacttgtcacacccagaaattctcgaaccagaatttctaagctgaatgtgcattaaatccctgtccaggaccagccaaggcacacaaacgacaattgttgacatacagacccacgtcttacaaaaatataaaagattacaaatgcagcgggaaagattaaagcgagctaaaccgggaagcttgacttcagcagcgggcgactccactccacaggcaaaccttgacggcagcaacgaaaccaacctctctgagacggctccaactgagaagaacttcaactctggtgtgggggaaaagagagcaagactgagtactacccactgtactcagcaagtcataccggaagatgaggtatgatgcaggatataaccaaaggaagctaggggttcttttgcataaagcaggcatttcaaagcagtagttgaaagcagtaaaacagctgtagtatacccaagttatcaatggcataaggtaaccaatatgtggctgaggaataggacccatcccacattacattgtaaaagaatgcaacatttaatagaaatgcaggatgttggtaaattgggtacaatatgatcaaacgtattgcatgacttgccttgctctcgaactgatgagacctcagcaacgtcttcgagaaaccgcggatcaacgaaacggccgaaacctacgcgacaaacaaagcacacaagcaaaacatgctataagactactgaaacaggaaacaaaaccatttttaatggattctttgcatttttcttgatttactgagacttgaatggacttaaacggagctcggatgaattacttatgaattttagaagataaactgtgtttttactaataaagaaaaagtccttaattaattattgcgcaataatacccagggctgacgtcatccagggggacggtggcgccgacaggcggggcccatgggtcagcttctcaaaggggagaggaagggggcgccggcacgtgggccccacgggtcagcggctccaaaaggagggaggtggcgcctagcaggtgggccccaccgggcggtggctcaaaggggaggcgagggaggcgccggccgggctcggctcggcctcaagaccgaccggccgaccaaggcgaggcggcggcgaggcacggccaccgacggcggtgaccggcggtgcgggaagcggcggcgacggccgaaaggcggcggcgcttggccgaagcagcggcgtggccggcgctcgcgggaaggtgaggaaaggagggggagggaggactcaccggcgacacggcggccggagcggaagacgaaggcggcgacgacgacctgacgagaggaggggcggacgagcggcggcgacacctagaggaggggaggagaggagttagggatggagaaggcgaccgcgacgaccaaagtggctggccggagacagaggggaatggatagctccccggctcacgagggagatggggttccggtggggttccggcgacgcgaggcggtggccgagatggcccacacggcggcggagctagcggcggcggcggcttggcgcggcggcggccctagtggcaacggcacgcggccggagatgggcggcggcgacggagctcggcgagcgtggcgcgacggcggtagagggcgtgggagaggacggtgaatgggggaaatgagagagagagctcgagtgagggtttttatgggcgagggaggggcgaaaacggccggggatggcccctatttggccagcgacgtggagaggtggaggagagagagagggtgttgggggatttcaaatcccccaccacttgcgggcgcgcgcgcgggagatgcggggagagggcggcgacgtgggcgccaggtgcgggcgcggagtggaggcgcgatgtggagcggagaaggcggcggcgcgggcggttggagctccggctccaacgaccggaggtaggggacgaccgacaggtggaccccacctgtcggcgcccgaaagagaaagggagggagggaggacttcggggaggggaaaggaggagcgggccggcccaggaaaggggtgccgagcgcggggagagagatgggccgacggcccatctagagaaaaaggaaggaaaagaaaagaaaaagaggagaaggattttcctgggattaaatattgcactttggtgatttttaattggttaaaattatttccaaggctatgaaaattccactaaaaatcttgttaatgcattggagcatgggaaactcaagaaaaattccaccacgctatttccgattattaattgcatttattaactagggatttagctctaggttaattaagataatttcttcgggcaatttatttaaccaatttttaaagcaagaaaagggggaaacttctgggcgtgatagagtagctgtgctgaatttttctggaggggctttgcaatggttacagtccactagagctcatgaaacgtgtagaaattgggaggagtttgttagggcagtgtgtgcaaaatttggtaaagaggaatttcaaactctgattcggcagttcaaccgcctgcaacaaacgggctctgtggttgaatatgctgagaagtttaatgggatcatgcatagtctccatgcacatcattgttcatggagtcatctcttttttttttactcaatttattgatgggctgcgagcagagatcagagctgctgttattttacatagacctatcgaattggatactgcggtagatttggcttgtttacaggaggaggttttggaatctgttcgaagggaaaatcgtagagccgaggttgtgggaggagcacgcggcagtttcaaatctgggggtttctcttctgtgtcagctcgtgcaattcctggtgttggtggacgagcggatgatcggcgtagtcaggatgatcatcgcacacctgaggacaagattgcagccctacaagcctatcgtcgagcgaagggtttgtgtcacacatgtggggagaaatggagtaaggaatacaagtgtggaccaacagtgcaattgcatatagtggaagaattgttgggtatgttccctagtgaggctgctgatgggtgtgacagtgattgccgggaagatgaagttactgaatctgagggagttctctgtcaaatctccaaagaagctatactcggtacttagtcagctcgttctgtcaagttgcagggattgatacaacatcatgaggtgcttatgttagtcgattcgggcagtacgcacagttttgtttctgcagaatttgctgataagctttctacccagcaatatttctgtccagctattaaggtgaaagtggctgatggaggggtactgagttgttcccgggaattgtggaattgtcagtggtaggtacaagggcagtcctttgttacaactttgaaatttttgccactgggttgttatgaggtaattcttggaatggattggttggaagatcattcccctatgcaagtggattggtgacacaaaacgctatcattccaacacttgggttctcctgttactcttaagggagttcagtctcgggtggatacttgtccggttatttcagcacttcaggtgcaagggttgctacaccggaatgccattgtacaaactgtcgaactgtgtatggtcagcactgattcagctcaggttgccttacctcctgaaattgatgccctgttaaccgaatttcagtctatttttgatgaaccacaagggttgccaccatctcgagtgtttgatcactctattccattgcttccgggtgcaaaacctgtcaatttgcatccttatcgctacaacccagcacaaaaagatgaaatcgaaaagcaagtacgtgagatgctgcaacaaggtgtaattcagcccagtgccaaccctttttcttctcttgtccttttggtactgaaaaaggatgggacatggcggttttgtatcgattaccatcatttgaatgctattattgtcaagaacagatatccccttccaattattgatgagttgttggacgaattgttgggtgcttgtgtgtttactagtttggatcttcgagcaggctttcataaaatccatatgaagctggaagatgaacacaagacagctttcaagactcacaatgggtattacgaattccgggtaatggcttatggtttgactggggcagcggctaccttccaatgactcatgaacaccattctgtcaccattattgtgcaaaggagtgcttgtgttcattgacgatattttgatttacagtaagacaatggctgaacatgtgctgcttctgaagtcagtgttccaactgcttgctcaacatcaattgaaggttaagcgctcgaagtgtacctttgccagttcacaactcacatatttggggcatgtcattagtgatgcgggtgtgtccaccgaccctaagaatattgcagctgttgttcgttgggcagtacctcaaaatgtgaaggaagtgcgcggatttttgggcttagcaggatactaccgcaagtttgtgcgccattttggggtgatcagccgtccccttactgatctcctaaagaagcatgtcgtgtttgtttggactagcgagcatcaagctgcttttgatgcgttaaaggcagctttgacttcggcaccggtgcttgcacttcctgactttactcaaacttttgagattgaaactgatgcttcagaccggggagtgggagctgttttgatgcaaggtggtcaccctttggcttttcttagtaaatctcttgggcctcgcaattgagggttgtcgacttatgaaaaggaatgtcttgctatattattggcagtggaccattggcgttcatatttacaatttggggagtttatcatccgtactgatcaaagaagccttattcatttgggggatcagcgtcttgctaccctttggcagcaaaaagcactcaccaaattgcttggactgcagtacaaactggtgtataggaaaggtgttgagaatcgggcagctgacgctctgtcgcgctgtgactctcctgagattcttcagttaagtgctttatctgtgtgtgttccctcctggttggatgaggttcgggacagttatgctagtcacccacatacatccagcttgctttctcaagtacttttgcaaccagaatcagctcctcattttagtgtaacagatggagtattacgttacaaggggcgcatttggttgggccataatgtgggactacagcagaaggttcttggagcattgcacaatgctgctgttggtgaccattctggagtgcaggtaacctatacccgattgcgcagactgtttgcttggcctggtctcaagaagtcggtgcagctctttgtggattcctgttctatgtgtaaacaagctaaggcagaacgggtgcgatacccgggacttcttcagccattacctgtcccagaacatgcctggcaagtggtgtctttggattttatcgaaggattacctctctcattgggattcaactgcattttggtggttgtggataagttttctcgctatgcacactttattgccttggctcatccgttcacagcttttgatgtggctttagcatatatgcaaaatgtgtacaagcttcatggtctgcctcaatctatgatttcagatcgtgactgtatcttcaccagtaatttatggtctgaattgttcaaattgactgatactcagttgcgcatgagttcggcatatcatcctcaaactgatggacaaacggagcgcgtgaatcagtgcttggaaacctttcttcggtgctttgtccatgcttgcccgcgtaaatggtttcggtggttggcgttggcagaattttggtacaatacaactcctcactctgctctcggtaccactccttttgaagctttatatggtcatcctcctcgccacttcggtgtacgttatattgctgaatgtgcggtacctgacttgactgaatggttgcaagagcgtcagatcatcactaatctcttgcgtcagcaccatcttcgtgcacaacaaaggactaaatctcaagcggacaagcatcgttctgatcgggtcttcgctgttggggattgggtttttctgaaggtccagccatatgcgcaaacatctgtggctgcgcgtgttaacaacaaactttctttccgctattttggtcccttttaggtgacggcgcgtgttggtccggtggcttaccgtttgcagccgccttacgactgtgctatccatcctgtcgttcacgtatctcagctccgcaaggcttcacctccacaatcagctgttgcagttcggcctcttcctcttgttgagtctgaagaattgattccagttcagatcatcgctcgtcgtctgtacaagcgtggcgcggctgctgtggagcaagttaaggtgcgttggatggggcaatcgtcttctgatgctacttgggaggatcttgctgtgctgaagcagaagtttccaactgtgccggcttggggacaagccggttgcccagaaggggggcatgttacagctgatgataaccctatcaagactatcagacgctcagctagagagagacggcccaacactcgtgtaactgggccggagtgggtctgaaagtgggtcttgggtatgtgtctataaatacccaggcgtgagtgggaagaggtaacgaatgagaaatctgtacacagaactatccctcaatctaatacaaatcctcttcctgctcatttgcttctctgtctttttcctatctgcttcccttgttcttcccgttcttccacgcaaggtgttcgacgaaattcccttgagaaagatcgtaacactttaatagcaagataaaagagcaaagcttcgatcgatcagctgggatgaaaacagaagcgatgaaactttaattaggagttattaccttcatacttgtaacatagaaataaatgttactcaatctagttcttcgaatctagattatggttataaattttattttgggccaaaatctctatgcgccaaaatttacgaacaaatcagtaacttctatacttttttgctagaaattatttgcaaattcaacaaaatttgattgagttttaataagctttgaccaattttttttaaaggaaattaaaaaccaaaaattccgggtgacatattcgcttgtatgtagggggtgaaactatcagaattaacaaaattttgctcagaaattgacaacctgatcttggcatgattcatattcctacaatcctttgtttcgaatgcaaatgagaaacgttcaggggttttttggttagctccacagagtagtgggctagacgatctgggttcaaatcctcactccttttaattattgatattagatcatttcctaatattcccatatttgtttgggatgcaaactaaagttgttaatttagaaacagggcggtggcacataacgaagcaggattaattaggtgtaacgtagccgcctttctaataaatcagttattatggaggatatagctacctaacattatctcttgtacatgtttatagatataatgacaaacttgattttcttattgcgcgtagttaattggtagtctctatctacacacgcaaaagttgaccttgcgtgatcgagtacgacatattttttttcttactttatcacacaaaacctgctagtataatcatatggaattggccctacctacctaatccaaaaactcactcaagctgattcaagctagcagtccaactctcactctcgtaactcttgtatgcatgcatgcaaaataccaaacaacaattaagtaatattaagcacaacagtaatatgtacgtggtgaatcatttcttgctaattaattaagctactacacaaagtgacttagtgacacacgggtagctagctagtaggatctcttagatacttatatactccatccgtcccaaaatataagcatttttagcatagtaataagtcaaaaaatttttactttaactattaatagcaaaaaaataaaagatcaataatgtaaaattgatgttactagatttattattaaacaaattatcataatatgcaactcttattatttaaaacatttacttttatagatattgttggtcaaagtaacatctcggagaccgtgtaagagtctaaaaatacttatatttgggatagaagagtacttttgttgttcttgttaataaagtttgatgtttagagcgagagctataagaaacctgaatgcagaggtggatgagagagaagaggagaaagaagagaaacaagttgtaagcatacaaccggtttaggcacatgaatcaaaaaaatatgtgagactgacatgtggaccatatatttatagtaaagagttaaccactatctgagtaagttgagagatagactataaagatctatacaataagtagccggttatattattagtcttgctattattaattatacctttattaagcagtattattttgtgattaactttttagtggcaagtatagctagtaactaaagctaggcgatgttgtagcaaatcttcttgaactcttctagatggttctcgaagagtggcacgtagacgtcgatgctgccgtcgccgaggaaggaggggacgaggaagatggtgccttccatggcgaggtaggacggcatgaagtacagggggcagccgccgccgaagtcgaggtcgtagaagctcatgcccagccagctgtccacctccatgtccgggcacaccaccacctcgccggcgtcggcggtggggacgaggccctccgcctcgacggcgccggaggacgcgaagtcgacgaacgagcggaagtaggcgtcgtcgatgcccgccacggcgcggtggatgagctccgcggcgtggtgcgacgggcgcgcgacgagctcgccggcgtcgcagcgcgggaacgcccagagcaccaggttgccgaagtagtcgcgcggcaccggcgggcgcatgcgggcgcggccgttgacggcgatgcggaccctggtggtgg

SEQ ID NO: 7882 - DNA, 36468 bp, Oryza sativa
  unsure (1)..(36468): unsure at all n locations
gggctgcgcggcggcgctggacgagcactacgcgcacaccatgagcttcggccggggccgtggccacgccgtgctccgcgccgccgccgccgacccgcggtgcgcgctcgcctcctccctcgccgcgcaccacgtcgccccgcgggaccccgcccgggccgccgccttcctcgccgccgccgccgacaacctcgtaagcgtcgtcgcccctcacgttgtcgctcgccgccttaattttttcccccctcctcgaatcctccatttactcggtgagcttgcgctttcgtgttgctctaaacttccaccagggtgcagcgacggagtacgagagggcggtgttccgcgcgctgtcggcgctgatcggggaggagagggacgagcaggtggcgatcgagcggcacttcgaggtttgggggtagcttgtctccattttttgtaaattgagagtatgtgctgctggataaattgattaatggcaagaattgattggtggtgtgtgctttacatgtggcagttgctgaaggaattccccagggatctcatgtctctaaagagagctcagctcatctgcttctacatgggacgccctgatacatcgctcaaatttgttgaacaggtaagttcactacaaaggctcgtgtatgtttatatgcttacaaagtggaaatatcgtatataactaatgaaaccgaagttgaatctaacactgtttgttattatttaaaggaacacccatggtagcaactttattgaatcatcacttcaaaactttggataaaaataaaatattttacaacagttgatcaaaaaagcatcacttttagtgctgggattttgtgtgcatgcgcgtgtgtgtggaatagaagaatgcaggattttctggatgtgcttcaaaacacttcctcttatcaatgtaccatagttctaggtactattcttttcattagctttgttgtactcattcttgatcaggttttgccagagaatcaagaccagaactacatttacggcatgcttgctttcccattactagaacttggaaggatggatgacgctgaaaaagctgctcggaaaggcttggccataaacaagaacgactgctggtcacagcataatgtatgcgggtggttttgacataattttgttattttaagaagtttatcggcataacagattgtgttatgcatttatacctaatcgttcatattctaccgacaaacttctttaatacaagcttcatctgccattccatcttgcagctgtgccatgttttccagcaggaatgccatttcaaagaagctactgagttcatgaaatcgtgttctccatcatgggcagcatgctcatcgtttatgtatacaattttccacatgatgctctctcgtttgatgctagtaataactaataaccacagaaatagttcttacaaaatcattttcttctttctgtaggctaacccacaactggtggcatgttgctgtttgttacttggaaggtgaattccctacaagtaaagttctggagatatacgatcataacttcatgacagagcttgagaaaagtgattgtgaggcagcagaggtattaatgctggccatttttcctgtacatcaatgttttagagacactgagtaatttctcatgcatcaggtgtaccttaatgcactagggctgctactccgtttgcatattcgtggtcaggttgatctggccaaagatagattggcagcattgctagatgcacttacgaatgaggtactgtctcagcttcaataatttcaaatatattcgtaaaaactgttcagatttaagcttcaataatttcaaatatattcataaaaactgttcagatttaagtaagctgtatactgctgactgccaagagcattttacaggtctgaactaaagctgtgcaggactcatttttctgactatttcgatttgaactttgtactttgttcagaaaatatggcatgtggaatggctccttgatctacttgtattatgggcactgtcaagtatgggtgagattacaagagcagacaacttgttggaatcacttaggtcaaggtcagatacattaaacttttcttcagggaacacaagactctgctattaatactagtcaataatgctagaataacccattaaccttgcagagttagttcgatggacacaaaaaaacagcaagtgatgcaaaaggcaatccaggtatgctgaattctgtttgcaagattaagtaccaagacacaagcaatatataactcatgcacaatgaaaagtgtggactatcatttgtctagtgtttctgaaaaatgaacaccattcacttctgatgcctcaatatcattacattgtatgtttttgtggcattactattacctgctaactaattttaagatatgtttgctttcctgtagctattagtttgtaatttatttaactttttacatgcatgcctactgtactgttgaggagtattttgaaagataaaattgcatatttattctataaaagatactatatttttgctgttatttaattctttccttggcacagctagcagaggctgtgtatgaatatggaaaaggagagcacaagaaagtctttgacatcttgggtccagatttcgatgcactcagttgtaaagtatgattaacaaacctgttttcgttcaagacaagtagttatcgtatttgttttcttttactgaacatcaacatacgtacaagtagatgattggggcatcagatgagcaagtggatgtcttcaatgaagtttggtacactgtgctaataaataccggagagagttccagaggtatttgcctatttgttcttcatcattagaaaactaaattactgttttgtcgctccttaaggagctaatgcaatttggattgtacacagcaattgaggtgctcgagaaacaaattaggaaacgagagggtgcacccttcttgtggcgcttgctggtaagtatttactatttatccattttgcattttcttctcgctaatgtttcttaactgacttgttaaagatccgaaacattaactccaataatctttaaaatatcttgtcatgacacgtaatgttggttgctatagatcgatggttgcctgaacatagcattttgacaacaatctactagtactttcagataagttggtggctgtgctataggcaaaatagaaatatttgcgtcaactttgtatcatctgtagagactgctggcattcatctttgcatataagcagaatgctacaaggcatttgagattaatacgtgtttctgtctagtatcaacacatcaactgatatctccatgccaaatgtaacatgtgaactaaggaatgaccttcggtgcaatcttggcctaaccttggacttcttgcaaacttattttatcggccagaccaattagtaccattctgatattcatcccaggccctattctgaatacaactaccctcagggtttgtggctttaaaaaggtcaagccaattcagttgttgcttggtaatccgtaatcatacagaagacactagtgaggtacacatatttccattgtatttctaataggatttagttgttttctctctaccaggagaaggcatactcattgcatggcagagctgcagatgcttcagtcgcatccgaaaaggcaaatgctctacaggctgcttattctcgttaatttcgagttatgaaatacagtataccaatatgcttacatgccctatagagtgcacattcgctgtttgacataataagtggccgcgaaccaatttatatatgatttgatgggacccttacgagttactccctccgtctcaaaaaaagacaaatattgggtttccgtgtccaacgtttaaccgtccgtcttatttaaaaaaattatgaaaaaaattagaaagacaagtcacataaagtattatcatgttttatcatctaacaataatgaaaatactaattataaaaaaatttcatataagatgaacagttaaacgttagacacggaaattcaggtttatcattttttaggacagagggagtacgaccggaccaatgagcaaatatgttgttttttcactcttgttctatctgatgctacgaggaaattgtgcccagcgttccctgcactgctgtcgtctgacagcattggatatgacaaaggaatggatggcagctactccctccgtttcatatgctttaactgaaatggtcgatttttttttaagtttgacaaaaatataaacattttaaacacaaaacaatcatattatcaatatatattaaatgtttgttttagttaaactaatttgatgttatagatgttagatatttctataaacttgatcaaactttaaaaagtttaactaggaaaaaatcaaagcaacttataatatgaaatggaggaagttgtaatttggtgaaatcatggattttcactccacaaaactgtgtgtacaagttctacgagattttgaaaatactaccacaagcagggaagtaccttgtactaccatgcaaaatttcaagagcaaaggattaaaaagtggttgggcccacgtgtcatatcttctctcatcctctattgccctcttctcccgagctcgaatggcagatgtggcagtggcaatgaggaggctgctgttgtggggaagaaaaagagagatgagggaggggaccgaattaaatttgaaactatactgtttattcaattttttgctagaaatattcgggatgcaaaatcttttacaaaaatataccatcggtttcgcacaacaattgcgcgaaaatgacatgaaaataacgtcgcgaccggtatcgcacaatgaaaatgcgagaccgcacggtctcgctcaagcaaacagcgataccgtgccttgccgatttaattagcggttaattatgataattaatcactaattattattagttaattgttaattaattacttaatcactaatcaaatggatcccattggacaatatcgctgatggcttctgcgagaccgttcggtctcgctcttccatcccacgagacggtctcgcgctgttgccgcacgagaccgtgcggtctcacgctttcgccgcgcgataccgtccgcgacgtcatccccacgtcatttttgcgcaactgaagtgcgacaccgatggcatatttctacacaagtttttgcatcccgaatattcctgaaaaaaagtgaatgaacagtatattttcaaatttagggaccatgacggagctaggctggtggctactggccatggctctcttctttggtggcggtggctgcggctacttccggtagggtgtggcgggtctcggcgatggtggcgatggtgacggcggcaaggtcacgaggcagctgtggaatttaatgttcaaaatttgatactgttggcatattttatggatcatgtgtggccatgtttgtgaaaaagaccagcataacatctaattaaacaacccacatggcacacattgatatattttgaacacacgaagtgaaattcacgatcagggttcacaatattgatattggatcaaaactgctccccagcggtatcttcggattttatgggaaaccatctattaaaccgataaaatcctaacaaatcttgtaaaaaaataaaaatcaacttgaccgaaaaattgagtggtttatgtagtccatgtttggtttcaatcggttctgtaaacaccgtttgtgacttgctttgcaattttacaaaataagtaaataaataatactccttattctttgtgtcgtctgttacatagattgaaaataagtctctttcgcatccctgaacttcgtgctggaccgtgctggcccagcttgccgaggtagtagcccaggcacagcacagctatcgggccgggccagcatgggtacaacccgactcccgagtcgaaccgtgttgtgcctgggacgggccaaatcaccgggccttgggtcaggccgtcggacctcgggccatatggccatttatacttgaaggttctgttctttgttatttttatttatagtttgcatacacttgtggtaccgcatcctttaggctacggtcgtgcactcaacccagtccaggtcagtcttctctctattcttcaatctgcatccttattttgcatttggtagcagttagtctattagaaaagacgagcagtcctttaaaatcatttaactccagtctagtaagtccactccaacctcaggtgctgtcctctctttcgctgttcatgcccagctaatctggaaatgctccaaacttctgattccccaactctaggtcaggtcttcagttcttcaccttgcactgtgtaatattgagtcgattaggattttgctaatctggattttagtttgttttagtctaatggattactggacgaagataagcagagcattgcaatcgttttgtcaagttcggtacaatgaattcaccctataaatagtaggagccagagctagtatattagtaattagcaaaataatttgttgtattgtgcttggttcgaatgtctttgttatgggctctaggtttctcacaccaattgaatgaattagatctaaaaattagggatgttgttagaggagggcacaactggttgtgcatgcaattttatggttgaaaaggcacaattggttggataggagtacactgatgctaagaataacctatggttgaaaactatggtattgaatgctaaaggataatgcgttgtggagttaaaatttccactaaattctgtatttttaattacatagaattataatagatcatctgcgtaccggtgagccagggcggccgcccggcgatggatccactagtgagtagacatggatagttttagcctttatgtttaagccctactaggcttgaagagatcctggcccaccactgatcatagatcttcgcccatatctgcttcaaacgagtacggatccttagtgtagaagatgtgccggtcaaccttatcctccgttgatctcttcccatatgccttcagtagctggacgtgctggatcttttcccactcatagctgccatcttgcaaggatatgagtttaagcaatcttagactgcagtacacgtccagcttatttagctctgtctctcgtaggtactctgggagggcatcagcatccaaatccttccaaatgacgctcctaagtgattgcaaatccttcactaccttcagccctgggcatctgataacgacgatatgtcgcagtcttggactgttggagatcctctgcagcttcgggttgtcagctgacgtgagctccacaagtgacgggaagttctctacggagatcaggtgcggcgcatttctgagattcagcacccttagtgcggttgcatggtgcacaagtccaagcggaagataacgtagtttacaaccggtgatggtaacaacgtctaaggcgggcatccctggtgtttgctgatcccagttctacactctccatcccaacatcccctttaaacccagtgtttctagctttggaaatgcaacaccagcatcaccgcgagaaagaccatggagctgcagcttcntagtgatccttgttccagttgtgactttctggtcatcagcactagaggaggagaggaagaggagatcatggccaatgctcacgatggatggagcatgatcaatccaaatataatcaagaaaagggagctggcccaagccgacaggcagctgcttgcagcatacgtagtccttcagctccaaacgccttaagcttggaaagtccgacattgttctcatccatcggggtagtcgatatccaaagtaaccattgaccgtaagacattctacgcaaggcggaggacagagattactcaacacaacctcggctcgttcctgctcctcgattacattgctggttccttcgatcatcccgttgtcggtgagcctactggcaaatgtcaagtctaagattttcaagtgctttttactgttgagcattgctgtagcagccatagagcctgaagatgcaagctctagacctcttaaatcaagccattttaggttcgacaaagaccgtagttcttccaagctgctccaggcatgtcccctgtcatccaaataagttgggaaccccaacatgttcaccaagttttctagctttcccatacctggaggaattgaggttaacctcgtgcccctgaagtcgagaaacctcatattctgtagcttcaagatgctgtcaggaagctgatgaaaattccgacaccccataaggtcaatgaactgtagaaattttagatttcctatgcctcgagggattgcagatatgcctgtatttgcaagccccaagtatcttagatgcttgagatggcatatatagtccggcaggtcaacaagatctacaccttgtaaatgtagtactcttaggcaagagatattgttcctgaaatacgtcaactcagttatacatctcccaaagagcaacaatgtcctcaatgacacttgcttttgtatagcgacccgctctattgcagttttggatacagacaagtgacgcagctttgaagcacctgcaataccatgcacatcttgtctgtcattgacaagtagtccttcatctttaactatctgttgagcaaaggagcgaataacatcatgcattgtgcttgctgatagatcataggatcgtttgtatggctctagaagattccgtgacaccaactcattgtaatattcaactcccaaatcttcaggtagcgtcgatctcattatgtcatgtccgtaaccttgtgcaatccacatcctgactattactcctcttatgatcagttcatctttagggaaaagtgagcagaacacgaagcactgtttcaaatgcggaggcagctcttcgtagctcagatagaccgctttgttgatgtcgtcattgcttcttgtcattgaccatgcaaagtgattagagacgttcacccaagcatctctcgttttgcccttgttcagtaagagtccacccacaaccttaatcgcaagtggcaagccatcacatctttctacgatcttcaatccgatgtcctctagtccacaatctcagattcatcgccctcgttcagaactacctgttggagaattgccacatcagagagcaagagaggaacaaaactagggagaaaaaacctagtactagtaaaatatattgcatcaagttgttttccgctggtctcaacggcttaatttgtgctaaaaacacttgttttcctctgagcagaaatactagtaacagcctcacattttgtaggagcaagagaaataccatccaccaacgcatgtatgtgctgctgtgaataattgaatatagaatagaatgtgcatctcactaattagtacttcctccgtcccaataagaacaccggataggacatttcctagtactacgaatctagacaggctatatgtccagattcatagtactaggaaatatccagattcgtaatcctagaaattgtcctattcggtgttcttatattttgggacggagtagtacagagatacacatttctattctatattcaattattcccagtactaatactccctccgtcccacaatataagggaattttagtttttacttgtaacatttgaccactcgtcttattcaaatttttttttgcaaatataaaaaacgaaaagttatgcttaaagtactgtagataataaagtaagtcacaaataaaataattaataatttcaaaaaaaattgaataagacgagtggtcaaacgttgcaaggaaaaactcaaaatcccttatattatgggatggagggagtaataattagtactccctccatctagttttgatagtcatatttccaaatctgaaaaatttatttttaataggcatatttcaatccaacaacctatcatcttaatgattttctcagatttaatgcgtgactcttcattcttccacacaagattggctgcatgggcatcgagaaatgtaaatattaatgaatcgcttgttaacgagaaataacatgtttaaatggatgataagtagaattacttatccttggtcagtatgccaaaataaaatatgactattaaaattagatggagggagtaattagtaatgtgcatctcagtactaattagtaattaactagctgggtagcccgcgcaattgcgcggctagcacccaaacaaaatcatatattttttaaatatgattttacttaaaatttatttaatagctatctcattgtattaagactttgaaagaccaaaacttatcatcctcgtgtttctaattatatagttttgaaaagtcacaccagttgctacctcttatgctatctctttctttatttgcttgctcgatctaccactatttctatccattcttcttggaacatttaaaaattggattttgtagtttttagagtttattgtcacgttgagtttcatttttataatttctagatgtcccgtcaaacgttgccattacactcctgtacggcccgtccactgtctcttctctttattgtcattgagattttaaaaattgaacataattatcgtttgggttcatttttactttttagaagtcccgccaaaccgtcagtagctttgccattgtactcctctatggctcgtccgctatctcctttctttattgtcattgagattttaaaatcgaacctgattatcattgttttttttttactttttagaaattccgaacctttaaaaaatgaacttgttgttttattttttataatttttagaagtcccatcaaacgaggccactatgcccctttacagcccgtccgccgcatactctttattgtcattgtgattctaaaaattgaacataactatcattggaattcattttttattttctagaagtcccatcaaccgtcggcggctctgcaactatactcttatacaccccgcccgctgcttctcctttttattgtcattgagattttaaaaatcgaaatgattataaatgttttttttactttctagaagtcctggccaccaccttacttgtttgcttcacggtctgcctgacgtccctccttttaatcgtcattaggattttatttgatgttttattaacaatttttatatgtcgtatcaaccaccaccactctacttctttataggcatgttacttaatttatttcgtcatgtgttttagatggtcttttattttaatagtctttatttttatcacaaattttagttatttaaaaattgtattcctaattgaaattttatttttctttttctaattccagaatttatttcataaaaaattagctaatactgtattgtgttcttttaatgtttttatttttttattttcaattttcgttgttttataattgtattcctacttgaactctcttttaatttttctaattttggttattattttattttttattctaaattttaattaatctcgtattgggttcttatatggattcttcttttaatattgcttattttcaattcctaattccagctaattttaaattgtattcctacttgaactcttcttttattttcttttgctaattttggatttatttttatttttattccgaattttaattaatctcgtattggattcttatatggattcttcttttaatattccttatttttaatttcgaatttcagctgtttttaaattgtattcctacttggattctccttttcttttctaattttgaattttattttatttttatttcgaattttgattaatctcgtattgggttcttatatgaaaaattctttcaatattgcttatttttaattaagaatttcagatttttttatattgtattcctacatggactcacattttctttttctaattttagattttattttatttttatttcgaattttaattaatctcgtattgggttcttatatagaaatttctttcaatattgcttatttttaattcctaatttcagctcttttttcgattgtatttctacttggactctctttttcttttttttcttttcctccgattaatgtggaaatttctagcctccacagcgaacgtggtgccttcttttcgagctgtctgatagtagatagatagatagatagataatagatagatagatactatgtgatagtcttacctgcttctttagcagtgaccaagaatcacctagatccagcttctcaacccggtggaggtgctgggctctcatcccacgagcaactccgtcgttcctcgtcgtcaccaacactcggcttccaggagcacaagcaccgagcggtgctcggagcagatcgctccacaccctatcgctccacacgtcatccatcaccagcaggaacctcttctgcctcacggcatgcttcaacgtgtcctcgagcagggccttgtccccggcgcagccatggtagcttcccccaaacgcggcgatcacgccgtgcaggaggtgaacctcgttgacctcctgattcacgctcagccataccttcttgtcgaagtggctctccaacacggcgtcgttgaagaccatcctggcaagcgtggtcttgcctatcccccagcgccggtgatagcgacggcgatgacatcgcctgacgatcttgcgcgcgtgcgaccatccgccagcttgttgccaatcagcagatcaacgaggttccttgtgtgaagatctatcttgtcgccgacaacatcggatcgaatgatggatggtcccgtcttgcggttgcggctgctttctgacgagcaagaacacatgggtctatcggttagacgaagggccgaggaggagtggattacttgggagacaaatccaaagcgggagctcctcttcgcgatctcctccaccctccggttgagctcctggatcttcctcccgatcttgcgcgtagcggcagggctgcggcggcagagggcgctccagcacgccgacggcgccggagcagctcttggcggtgagccggggtcttctccgccctccatggcgcggaagaggtcaaggatgtcgtcggcgtcgtacatggcgtccttgagctccctcacccaccgctccacgcccgggtcgtggatgcgcctccggtcggcgtcggccaggatgctgctcaggtcggcgagcgtcgtctcgagcttggcgatcgcgccgggcacgcccaggagcgtctccacctcctccttcgccatccccaccaggacgttcgccagcttggccgcgaatgcttccagcgccgccgccatgagcagagaagatcagacccccaatgacaatgttgtgtatcgctgcaatgataggggcgtgcattttttttttattctccgcagcatgattttgactttgacttttttttcaagtcgtcacatcaatatacgaatatatatatttaaaatctaataacaaaataaattgcagattccattagaaaactgcgagacgaatttattaagcctaattaatccgttattgctaaatgtttactataacatcacattaccaaatcatggtacaattagatttaaaagatttgtctcacaattattttttacctatatttaatactctattcatacgtttgatagggtaaaaattttttgttttgagaactaaaaagggcagcgatcagttgactttcctgtactctaaaaaaatatataataacggtggtaagtaataaatctgttcactccatcaccaactcattatcttttttacaatggaaaaaggacgaatggggtctcagaacccacattaaaatcacaactttttttaagagaaaaatgataatgtgaggaaaaatggttcacaagttagtaataaatttatataaacaaatatcaagagatgatgtataaaaataataatattaacaatggattaatgatagttttcattaattaagtgcaatgcgcgggcaatatgcccatcattaaaaataagccggttgagccatccgagaatggataataacattcgatcccgctaatctaatctaatgcagtataagtaaatatataatttcttaagtagattttcattatgggtcatcttttattacccatgtttcgctttaacatactttaaccaatgtatttactttggacgaggtaatcttgactttgttttattttggattatccttttttttaagcatatgaacgatgttgagtacatcggctcctatttatcaataaacttcctcagttgtatggtgtagaccgtttaaattttaaaatatactgttcattcaattttttctcaaaaatattcggtatgtaaaaaattttacagaaatataccgtcggtctcgcacaaacattacgtgaagatgacgtgggaatgacgtggcagacggtatcacgcaggaaaagcgcgagactgcgcggtctcgcggaatgaaagagcgagaccgttcggtctcactgaagcaatgcgcgataccatgccatgccgatttcattagcgattaattatccttattagcgtttaattaattattaattattaattcgttaattatgataattaatcactaattattattagttaattgagtaattaatcactaattaaaagaagctgtcagacagtgtcgctcgttgcttcagcgagtgtcgacgggtgatacccgtagaacggatatagagggtattggggtacgttggtacaaggatctacgtaatacgacatcgagcaaacaaaagacgaggattatactggttcaggccccttaataggtaatagccctaattcagttgatatgggattatatgatggaaaaccacaggttacaaagggaacgatggaactcgatgaaaccggcgagatcgtaatcgagttggttcgactagatctcccggcgacttggctcctgcaggctccgacttcgtaggctgtgggggtggtgttggctgtgagattcgatgccttaggtcttcccagggggtcccttttatatcgcagatcaggtggtctccagtagaactcggagacatcggaccctacacgatacattaacgaccctgtcttgtccgagtaggactcaaacactgtggagaatttccttagtgcatgcagataatgtccgtgtatgcgcgggtatgccatgtcgatatgtggcgcatatcgaagggtaaggggtatacctaatccgtaaccctgacagtagcccctgatttctgcttaaatgaactcgtgcgaccaatagcgacttctgatgtcgagactgatgtcgttctcggtgtgggaaccgtagagacaggacatgatcgagaacaccgtgtgaagcccaacggtcacgagtgaatttaaactgaagtctgaaaaactgccgcacgtaacggacccagaaatttccggcggccatctctctcctttccttggaattcgcaccgtcggtagtgcgtctatttaaaggaattttggggatccatcttgaagtccgcccaccatgcagaaaacattccgcctgtaagcgctcttcgccttcctcgctgccacaagaaaccctagttttagcaacatatgctctttctccggcgatcttcgatcagcgatggacctcggcaaatcatcttccaccagtgcgtcgctgaagaagcttcaggaagacggcgcccttcctggtcgtggaagcatggagagggaagcaagaggtattaatccccagcccgtcttaggtcgcatggttgcgatcgaagtctatattctctgcggttttctccccccgccttccgaatttcttctcctggttttgaacttctatggtctttctcttcttcatttgaatctcaattctatcgcctttcttaacatctttgctcatctttgtgaggcctacattggggtagagccttttcttgatctttttcgcttctactacgagttgcgttggatggagtccaacagggtatctggttgcgttgggttccgacttcgggatggcctgaagtcgcgttatatccccttccagtgcccttcttctcgcagcaaatggtggaatatgtggttctatcttgagatcaaagattcagaccttgtcttcgttgttcccgatgaacaaccggacaagatttcgtcttggactgcaaagccccctttgaccccctatcttcagtcgtttatcgacatcatcgacgatctccgattacggggcttgtcggggtatgaagtcgttgcagacttcgttggtaggcggatccagccgctccaggctcgggcccatccagcctttaaatattccggaccagaggacgcgacccgggtttctcctcggggtatctttctcgcatttatcctgacatgcttatgttcgcgttccccttgatttatcgaaacttggttctcgtttcataggtctgaacagcgaaaccgtggagcgccgcgtcggccaggtgatgatcagtggtccgacaacggcgagtaacatcctcgtgcccctttgtgaaaagggggcggctgaacgtgatgacgctatcaacgtaagtatactcgataggcatcccgcattttcctttcgagatcaccttatgacttgattaagcgtaggctcttcctctgactgacatcatcgggccgctcgcggaccatcaggtggcagcgtctctaaaagagaaggtcgccaaggaggcgtctgatgctgttgcggccactactagtggtgacaatgttccgacaaaggggaggaagttctcctctgtaagcggacatcgtcgcaagacatcgaccccctcggtaagttatcctgtcgccagatcgtgccgccagaaggattttgccttacttcgcattggttgtctttcaggcctcggacgcgtctcccccgcctccacgacgacaatgtcttgtgacggttggcgagaagtaagtagatggatttttaggtttctgtgattccattcaagctttgtctgatccgtggtcgttccatagggaggcgcgggcaaaggctgcgcaaaacaagtctggagggacttccagcgcgtcgcctgccgcgccctcaacggatgtcgtactcgtagccgagagtcgggaggcaacgcctagcggcccagtcagcgatcccgcggcaggtcgtggtccacccgctgccgtcctcacctgggaggagctccaagtcgaaatggggcgcctcctcgaagctggtgctcgcggcattggccgcgagattgcagaggcgaggtcggaagtagtgttggcgaatgcgcgtgctgaccggctggtgcgcgagttggcggaagctcgtgaagacctcacgaagatgagggaattggtggccggcaacgagcgacaacgacaggggctcgaggactgtatgtcggaactcgggaacaacctgtcggaaatccgaggctcgttgcgggtcacctacactggcctgcaccagcttgccggggagtgtggcatcaagtctaccatcccggtgaatcctgacgaattctcgctgacatcctcccttgcggaactggcgacggcgatgggggagatcccctccaagcatgcggccaggatcgcggaggagacgtcgaacgggatctacaccggggcgtgtcatgtcctcgcgtgtgtaaagctgtcgcgtcctgaactcgatctgcgtgagatcttggatcagggggcggctagcaacacgcgtaagaaggtgatggaagaagtcggtgatctgggggagtctgttctccccctatttgaagagtaggacttcttgtacttccaagacacgctgtgtaaaacttgaattctgaccgccttcgtgcgagcaattatcattctagtttactcttgtatgttgacctcgggaacttttgtcctttgtagagatgtcgatgtcgaggatgtccagcagcgtgggcagcctaaattgtcagcgatccctccggatcttgcgtctgtgggacacgcgttgctggacaacgtgggtgaaattttgcccgcgaggacagggacaacgacgacttccttaggtttgtggtctcttcatcacttttcgctcctccgatttaatcagtcgtgttctcgagagagagaagcagtctgacgtagtcgtttccgtgttggacagacctcgaggacgcacttgctggccaagatcgtcgtatccaatattggaagacgaaatttgaagtggcggaactcgagagagccatgttggaagtaaaaaaggagcaggccgtggaaacgctccgaggtcgtgaggtgtggtttaactcgtatttgaagagctgctgcacatccatggccagagtttgcagagaacttcgagtggtctgcggagaacctgaggagtcggcggctggatacatctcgtggctgaacgggtgaaggcgtcggcaagcggattgacgaagctctgaaacaggagtgccgtcggtcgagccgatatgccggagggcatgtgttggcttgcatacgagatcattgtccgcaaatgcacctcgagtttcttcatgaagggttcactcgttctcggaggactcctgcggagatagaccacctggcgaagtcgatggcaccgttagcggagaaggttttcaagtctatggactggcgttggccttcttggtagtattcgtacctctggatatagtgtgtaagagtgtttcctcagttcacgactttggtcagtcgtttgagtcgtacactctccctagcccccagccttgtcgtcggaggattcttctcgggggacaaggctcttggacctttgacctgccttggttgagaaagcactgatcctagcccccagccgtgaagttggaaagttaattttccgattacacggcttggttaatacgcacggcgagaactcttacacgaccaggtcttacatggtctttcgtctctacaggatccgacaaggccttatcggctctgggcgtccccagccgaagatcccttaggttcctcggaggccttgtcaggacggcgtaaagggacatgaggataggtttcaacgctaggtgtcatctaggtaagggatcatcaggcaggaacactgtgattgtaatatgtgcctaaaaataggctttattgatactgtaaggtgtcttacaggtatggattatattgactcatacatagaatttacgtagttggtcaatgttctaagagtttgccaactcgcggccatcgccgtctgctatcttgaatgcacctggtcacaagacttgtgtgatcgtgtaaggtccttcccatttgggtgagagcttgtttcgccctgcttggctttgaacccatcggaggacgtagtcgccgatcgaaagtatgcgtgctcggatgtgcttctcgtgataatggcggagggcctgttggtaactggctgctcggactgcaactcgttcgcgatattcctcgagtagattcacatcgtcgtttccctgttcctcctgatcctcgtcggaatacttctgtactcgtgtactttgatatcgtagctcgctggggagcatggcctcagagccgtacacgaggaagaagggtgtttccttgttagacgtggtcggtgtggtgcgtacggcccatagtactaatgggagttcttcgacccatttcttgtcgtgtgacatgagcctgtcgtagacacgggtcttgatcccttgtagcactatgccgtttgccctctcgacttgtccgttgctttgaggatgagagaccgaagcgaagcatatcttgactcccagcccgatgcagtaatcttggaaatcggcgctgatgaactgggagccgttgtcggtgatgatgcgatgtggtagtccgtatctgcaaaatatccctttgataaatttgatggcgttgtcggccttgatttcccccgtgggtatcgcctcgatccattttgtgaatttgtcgatcgccacgaataggaacctgtagccgccctgtcctcgtgggaatggcccgagtatatctagcccccaacacgagaacagccaagtaagaaggatagtctggagcgcttgtgtgggtagctttgtgtgtttactgtgaaattaataggcttcacaccgctggactatgtcgcatgcatctttgagggcggttggctagaaaaacccttgttgaaaagcattcccgaccaacgtccgaccggcggcatgtgacccacagatgccttcatgtatatcgaggaggaggtgtctaccgtcgtcggacgaaacgcatttgagaagtaccccgtttggcgctttcttgtatagatcgttgccgattatgcaatagatttttgttttacgggttattttctcagcctctgcgtcatcctcgggcaactcatcgctgttgatgaatttgatcagtggggtgcgccaatcgtctgtggtttcaatatcggcaacgacgcgttctgcctctgtggcctccgagctgatgtcgggggcgtctaggttaacgtcgccgctgacctcttttactgatggttttgtcaggacgtccagaaaagtgccgggttcgagcggttctcgtctggacgcgcgccgtgctagatcgtttggctcgatgttgtccttgcggtatacgtgtcggacttcgatcccatcgaaccttttctccagcttcctgacttctgcgagatacttggataactcagggttagagcatttataatctttgtgcacctggtttgcgactagttcggagtcccctttcacgatcagtcgtttgactccaagtgcggctgcagctcttatcccggcgagtagtccttcgtacttggctgtgttgttggttgccctgaagttgaggtggattgcgtgcttgaattgatctccggaaggagatgtcaagatgaatcctgcccctgctccttggctgttgagtgcaccatcgaacgccattatccacgtttcattgtcgatttggttgtctgatttgttatcaggcatagtccagtcagctacgaagtcggcgagcacctgggacttgatggctgttcgtggcacaaagtggacatcaaactggcttagctcgactacccatttcgcaatgcggccgacaacgtctttgtttctcacgacttcgccgagagggaaggaggagacaactgtgactctgtgggcctgaaagtagtggcgtagctttcttgacgtcatgattactgtataaagcagcttttggatctgaggatatcttgactttgcgtcgtggagagcttgcgtcgtggagagcttcgctgacgtagtagactggtcatcgtactttctctctctcgacgacaatgacggtgctaacggaatatggcgtggcggcaatgtagaggaataattcttcattaggttggggagcaacaagtacaggggggtttgataggtagcacttgagtgcaataaatgcctcttcggcttccagtgtccatacaaatttgtcttgcttctccagcagagcgaagaagggttgtcctcgttctcccatcctagcgacgaacctgcttagtgctgccatgcatccggttagcttttgtactttcttgagtcttgtgggcgacttcatgttctcgattgccttgatcttctcgggatttgcttttattcctctgccagagacgaggaaaccgagcaacttgcccgacggtactccgaacgtgcacttcactagattgagcatgaggcggtatcattagaggttgtcgaacgtttcccgtagatcgtcaatcaatgagtcgcttgtcttggtcttgacaacgatgtcgtcgacgtattcctcgacgttgttgccgagctggttgctaagcgcgccctggaccgtgcgctggaaagtattccctacggttatcagtccgaaaggcatcttaacataacaaaataccccgaacggcgtgatgaatgctgtcttctcttcgtcctctttcgccatgctgatttggtggtagccagagtaagcgtcgaggaagctcaatagctcacagccggctgttgagtccaccggttgatctattcgatgaagagggaagtgatccttgggacacgccttgttgaggtcggtgaaatcgacgcacatcctccattttccgttggcctcccgcaccatgactggattggctagccactctagatggagcacctctctgataaagccagctttgagaagtttgtcgagctcttctcatatggcttgttttcggtctggtgcaaatcgccgcagtctttgctttactggcttcgcatcgggtcgcaccatgagtttgtgctcaatcacctccctagggacccctggcatgtcggacggctgccaagcgaacacgtcagcattgtcgcggaggaaggtgatgagcgcgagttcctatttctcgcttagtgatgccccgatcttaacggtcttgttggggttgccactagtgagtggaacgatcttgatcgcgctgtctggtttcggcatcttgtttgtcttgctcactttcttgggaggctcagttgtggcgggtgggctgggcgtttgctcgaccatgtcgaggctcgacttgtcgcattgtaccgctagcttagcgttcccttgaatagtgattgttcctttcggtcccggcatcttgagcacttgatatgcatagtgagatgcggccatgaacttcgcaagtgcagttctcccgatgatggcgttatacgctgtatcaaattcagcgacatcaaaggtgatctgctctgttcggaagttgtttgcttgaccgaaagtcacaggcaacgtgattttgcccaatggtttggacgaggactggggagtaattccatgaaagggttgatcggtaggtgtcaactcgcttcgtgggattcccatcgcgtccaaggtgctggcgaaaagaaggttgattgagctgccaccgtcgatgagaactcgcgcgaccttgatgtttcgaatggtgggctcgaccacgatcggattgcgtcctgggatgacggcagtcttgggatggtcttcttccgagaattctatcttctgttcagaccacttcatcttgggtgcagccccctgccatgtcgagcagacttcacgttccactttcttgtattctcgcttggaggagtacgctgtggagcctccgaaaatgtgtgagacgtggaggtcggagtctggatatgctgagtctgattcctgagcagccgcctccacatccttttcgaccacgcgtactcgcttgcatttttccaacgccatatgtttcttgagcgacttcttcaaaacgaggcagtcttccaaagagtgtctatccgtcttgtgtattgggcaccatgctttctttgcgtcgctaccctgtgggtctaggcatttggatgggttcgcgtattctgctgcgagaacttctgcttgagcttttcttttcccactcttgcgactttaactctagtcgtgatgcgtcttgtcgccaactcctgggtggtatagcgatctcggactccagacttaaaggcgcgaattacagaagcgtcggtgatctcagggattgtattcctgcactcgttaaagcgccgaacaaattcccgtagggattcacccgagttatgtgtcaacgcatgtaggtcatcttcaatcgcgtggcgcttgtaagttccttggaaattggcgatgaactgctgccacaggtctgcccacaaagaaatcgagtagggcgggaagtgcatcagccatgagcgtgtagagccttttaatgcagatggcaaataatttgccaacgcgttgtcgtccgctccggcagcatagagtactgtggagtagacttgaaggaattcttctgggtcagtactcccatcgtacttctctattgctccgggtcggaatatctcaggccatcggacatcacacagggaacgaccgaaagctctacatccagcgctgggggcggtgggttgtcggcgatcgtgtgtccttcgtggatgtctgtctgacgatgaggatgaataagaagatgacgatgacgatgaatcgcttggttccggtgtgggattacggggtcgtcggctgggttctcgagaatcctgtcgtcgccctccgttgttgtcccggcgccgatctccgtcgtcctcgtcgttatggcggcgtcctcgaccagtatcgccctgcgtacgcctctcgcgatcatcatgatcgtggcgattgtggcgattagcgcggtctcggtcttcgctcgagcggccctctcgttcttcgcgatgtcgggaagagacgcgatgttgggagcgattcccgtcgtctcgcatgcgccgtgcctctcggcggccgttgagatggtcacggagatcgccggtgccacgaggtggaggggtagcttgatggggtgactcccgctgttcgggattttcgccatcgacaccgccggttggtggttgttcccggtgcgtagcagcagcggcttctttgaacgcgtggctgaggttggttactgattcccgtagccgttcctgccaccacgcgagatcattgttcagaacgggatcgtaaggtctctctctcagtattgtgttaagggtcctgatgtgctgggccggtgtagtcacttgattttctgcctccgcattagcgtgtgctgacgtgctggtcccgtcgatagctaatacctcgcgtggcgtactcgttggagatgagctgtagtcctcgagtagatgcaggactgatggttcgtgggaatcgatgtcgattacgccgacgaatcgatctgagaccagcgttcgttgttccttgtcttcatctctaagggatatgcctgactgttggtccttaggaggtgacgtcttcgtggcgctgagaaagaccttgcagcttgagaggtcgtgattctttgtcttgtgaataggacagtaaacatcacgcgttggagaaatacgctgaattccacgctcgttgcaagcgcgaatttcggcgcggacgttgagaaaaacccagcaggcttgcaaagtgtgtttcctggttttgtggataggacaccaggaccttgtcgcttcagaagttgttctcgtcggctcgtggttcttgtcggaacaacaaggttcggccgcattagaatccttctcgagcttagatgttgtcgacgttctgttctccgcttcggcgggaggatccttcgacacggagtcgtcttgggttgcaaccactgcgttctcgtttccggtcattgacggaccggctgagatcggtatcgtggtgtaaaccgggaagacgatttcaccgacttgagtccacaccaacattgttgaagcaggaaacccgtggttgaggttggtgttgacgctgttgtcaacgaagctggatgacatagtagtagaaccttgagcaccaagtccccctacctggcgcgccactgtcgacgggtgatacccgtagaccggatatagagggtattggggtacgttggtacaaggatctacgtaatacgacatcgagcaaacaaaagatgaggattatactggttcaggccccttgataggtaatagccctaatccagttgatatgggattatatgatggaaaaccacaggttacaaagggaacgatggaactcgaagaaaccggcgagatcgtaatcgagttagttcgactagatctcccggcgacttggctcctgcaggctccgacttcgtaggctgtgggggtggtgttggctgtgagattcgatgccttaggtcctcccagggagtcccttttatatcgcagatcaggtggtctccaagtagaactcggagacatcggaccctacacgatacattgacgaccctgtcttgtccgagtaggactcaaatactatggagaatttccttagtgtatgcagataatgtccgtgtatgcgcgggtatgccatgtcgatatgtggcgcatatcgaagggtaagaggtatacctaatccgtaaccctaacagcgagaccgttcggtctcgctcttccattccgcgagaccgtgcggtctcgtggcgcgagaccgcgcagtctcgcgcgataccattcgcgatgtcattcccacgtcatcttcgcgcaacggttgtgcgagaccgatggtatatttctgtaaaaaattttgcatcccgaatatttctgagaaaaaaatgaatgaacagtatattttaaaatttaattcttctttgatatatgacaaattagatgcaaatgaataaaaaaattaagttgtccaaaatgatacataaaactacatggaccaaagtaaaaacattacttgaagggtaatcgatagcgaaacatcggtaaaaataagtatcttaaattcaaatgtagtctgttaaaaaagtgaagcgaataatcggaaaaagaggtatacccacccccacggcccaccccgccaagctcatcgtgtggcggagcggggagaggacttgttcaccggtgttgtgagaagaggggatctttgacgcgtggggtggaaaaatgctttgcaaatggcatccaacaaattagactcgggaagaccaacgatgaagaaaatagttttgtcacttgcatgtgagctcgctagtttaaagtgcaaagatgcaaactttggtaacaaaacatggtctaaagtgaaaatattttctattgcctagtgcaatatgcaacttgctcatttcgtcctataaaaaccaacctagcactggatttggcatattctattactatgaattttgactgattcagcttggcggacattgggtaggcaagtcacaacgttacattgggtagatctggaccatccaaaacaaatccaacggagatttatgtattattaaaaaaatttcttttcacgaactaaacacaccctaagagcagctccagtgtgagacaaaaatcaacgcacgggcagagaaaccgaaccaaatactccctccgtctcataatataaattttgactttttgcttgcactatttgaccactcgtcttattcaaaaaatttgtgcaaatataaaaaacgaaaagttatgcttaaagtaatttggataataaagtaagtcacaaataaaataaataataatttcaattttttttgaataagatgaatagtcaaacagttaaagtaaaaagtcaaaatcccttatattatgggacggagggagtagtacactataggagtcggccggaaatgctgttgggtgatcgatcgccctggggatggggcagcgatcgatcccctccctcctccctccctccacccctccacctgatttccttttttggcatcgcattactttcctatttcagtaaatttatatacctaaagttaatacgcctcaagtttacacatctaaagtttagagaccaaaagtttataagtcaaaagtttatatatccgattcaaatttgaatttgaattcaaatttttttatatataatatttctatacatctaaagtttatacatctaaagtttatacacctaaagtttatagacctaaagtttataactcaaaagtttatatacgcgtttcaaatttgaatttgaattatatctgattcaaatttgaatttgaattcaaatatttttaaagtttatacacctaaagtttatagatccaaagtttataagtcaaaagtttacatacctgattcaaatttgaatttgaattatatctgattcaaatttgaatttgaattcaaatattttctatatatagtatttctatacatctaaagtttatacacctaaagtttatagacccaaagtttataagtcaaaagtttacatacccgattcaaatttgaatttgaattcaaattttttatatatagtcataaatttttctaacttttgtttttcaaaaaaaaattgtgtggtgtactgtagtaaaaagaaaagaaggggaggaggaagggggagaagagagaggagtacagggggaggaggggcaaaccgatcactgggcgacggcaatcgatcgcccattagagcaggtacaatagcatgctataagccagctgtaaacatattttaaagagaaaaaggaagagaaagaatagcagcggactacagatctgtagccagctgcagcacggactccaagacgtaatgtatatatgacagataggaccatgtattaatattatagtaagcactattgtatgagttggctattacattagctatagatgatttggagttagtagtgagatatgctattaaacttgctcttataccctccggagtcggctgctatgtgtcagaccgaaaatcgacgccccaaaatgagtcgaactcagctgattaaacaagtgtttatcacggggagaatagaatggagaaaggaacggttggctgatagatcggcaaatgcagcagtatgggtcccacaaatcgacgccaacactggaaaaagtgtgacaagtctgtgtattcagaaaagtttggatttgatagaaaagttgaaagattgaagaataatttggaactaaacacgatggaaattggtttgggtggactcgtgatcatggacgtggagcagtcgcagaggtttggagttttgactatgtgagtatctgtcggcgcaagcaacttcaactctccgtctcttcctttttttttcccagcacagtgtgtcggcggcgatcatggcggcgatgctggacgccttcgcgtcgagcctcgcacgcattctggcggagacggcgaaggaggaggtcgaggcgctgctgggcgtgcccggcgagatctccaggctcgaggcgacgctcggcgacctgcgcgccgtcctctccgacgcggagagggcgcgcgaccgcgacgcggccgtggaccggtgggtgcgggagctcagggacgccatgtacgacgccgacgacatcctcgacgagtgccaggccgccgcggggggcgaggccgcgacgcccgttgccatggcgggctgctgctgctgcttccgcggcgtccgcgtccctgccctctcctgcttccgcgaccccgtccgggcacgcgagatcgggaagagggtcagggcgctcaaccggaggctggacggcatcgagaggaggagctcccgcttcggcttcgtctcccagactaggatcatctcctcgtctccctccccttgctgctctcggcgcgcagattcaggcgacggccgccgcaccgcgctgggcctcatccgatccgacgtcgtcggggagaagatcgcggaagacacgaggatgctcgccgacatccttgtcagtaagacgacggacctggacgacgccggcggcggctgcaatctcatccccaccattgccgtcaccggcgccggcggcataggcaagaccaccctcgccaggatggtcttcggcgacgccacggtccaagagagcttcgacgccaggatctggctgttcgtcggccgggacgccgacgaggtcacgatgctgcgcagcgccatcgcccatgccgccggggcggccagctgcgagggcctcgccgtcgccggggacaaggacctgctggagcgcgccctgcagcgcgcggtgacgcacaggaaggtcctgctggtgatggatgacgtgtggagcgacgcggcgtggaacgagctgctcagggtcccgcttagccatggcgccccggggagccggatcctggtgaccacgagaaacgatggcgttgctcacaggatgaaggtgaggtacctccaccgtgttgacaagctgcggcgacaggatgcttggtccttgctcaagaagcaggtcagtatcacaaacaaatctgatcaattgtgccaattgcaagtttgggactgaaattcggatttcacacgatgagcttcgatgtttaagctattgtagatcttgaagaatccttaaataaatggtttacaactatctactttctaactgcaattatgagagttttttttaagtaaatcacatgataaaaaagcatggttgttattaggtaaaaatgaatgttgcaggtttttttttttgttgttgtttactgtatttgagaatagcttatattcaatggatgttattaggtatacacttcatttttaagtaagatagctttttactattccaacagatagttttgaacaagagtgatgaagctgaattggatgagttggaggatattgggatgcaaattgtggacaggtgtgatggtttaccgctcgcgattaagatgattgggggcctcttacttagtaagagcagaacaagaggtgcctggatggaggtttctagacattctgcatggtgtaaacatgaagtgaatgatgaaattaacaaagtggtctgcttgagctatggagagttgccttctcatttgaagcaatgctttgtgtactgctcacttttcccacgaggtgaggtgatcgaatcaagaaccattgtccgaatgtggatcgctgaagggttcgtgcaagatagcacgggttcaggattgccagaggctgtagcagctcagtactacaaagagttagtcttaaggaaccttttggacccaagtgatgggtactatgatcaactaggatgcaccatgcatgatgttgtccggtcttttgcccaacatgtagcgaaggacgagggattgtccattaacgagatgcagaaacagaccataggtgatgcacttggtactctgaagtttcgtcggctctgtatttcaaacaagcaagtcgagtgggatgctttacagaggcaagtatcactaaggacgttgatactattcaggagcatcgttactaagcacaagaatttcttgaataatctttcttgccttcgggtgctacatcttgaggatgcaaatctgatagtactaccagactccatctgtcaccttaagcatttgagatacctaggtctcaaaggcacatacatatctgcactccctaacctcatagggaatttgaggtttctacagcacattgatctctgtggttgcataaatgtgtctgaacttcctgaaagcattgttcgactgcggaagctaagatcactggacatcagacacacaatggtatcttcagttcctaggggtttcggaaagctagaaaatttggttgagatgttggggttcccaaccgatttggatgacagtacacatgattggtgtagcttggaagagctaggatctttgccaaatctcagtgcactacatttggaggttctggaaaaggcaacacttggccaaatggcagcaagatcaaagctcagcagcaagcagaatctcacacaactggagctgagatgcactagcaggatcagcgcaaacggcaccgtgcaaggtggtatcagcgaggaggattgcgagagaatcgagaacgtttttgagcatctccgccctccaccttcaattgaccgtcttacgattgcaggttactttggacatcggctaccgcagtggatggccacggcgaccgcctttcggagcttgaggcggctggtgctagaagactacgcgtgctgcgaccggctgcccggtggcttgggccaactcccttaccttgactacctctggattgagcatgcaccatccattgagcatgtcagtcatgatttcatcctccctccggtaggcattgctgtcgatggcaacgcaccatcgacgacgacaacaacaactaagactgaaggtgcaggcattgcgtttcccaagctgaagcggctgggtttccaggggatgttgagatgggcatcgtgggactgggacgagcatgtccaagcaatgcctgctctggagtcgctcacagtggagaacagcaaactgaatcgtctccctccggggcttgtgtaccacaccagagcactgaaagctttggtgctgacgaacgccgtgagccttgaatccgtagagaacttgcattcgctggttgaactttacctggctgacaacccaaagctagagatggttgtaaactgctcgagcttgacgaagattgagatcctcagatgcccagagctgaaggcgtttgacaggttgcctgcagtccggagcatcgtttgggaggacttggatgctgacacgctcccggggtacttacaggaggcaaaggtaaagaggttacacataaactgcaacttgagcttgctcaacctgatatccttgcaggatgccagctctgaagagtggaggagcgtccggcatgtgcaacaattgaaggttttcgggttcaaaccacagagcgaaacgtctgaatgttacttcctttataccaaagagccatatcacgtcgaaacaaacatctccaaagcctgaacttctgctagatgtatttgtcatttgtcttgaaaaagaatgttgtattactatctgtttcctctactttgttattctcatttctgatttgcacgttctgtttactgcaatcaggctgattctgaagcttcagcagtcagcttatcgaatttcaccagctccatctgaaatgctttacatgcagaaaacagagagcttccaatggaaaatgcatgcgcaactgcaattttgcttttttttaaaaaaaagatcgttcagtgaacaatttgcacatacctaacccccaggataaaaattaaaagaaaagtttattcatgcatccatttcctttcaagaaaggagatgagacaactttcactttttaaggtgtgacattttgaagcttcctactgaacaagctattttatattcgttcaggggaaaagtggaatggaaacaacccattccatgaattcgcggtcagacgtacgaaaatataaaccataacacaatggtatcacacatgggaggcctccaatttaagggacaatacatataggaaaacaccgacaaaaacggataatctcaacaatcccctttgatgatttgatttatagattgtatgaactgttggttgattacatttatgttagctgagaggagataaaaactactaattagatgaaacgaaacagttcctctgcagcaaccatattactcttgttagataagagtctatcacactgtgtaggactggtgaatggtatcaatgtccaggcccttcagcttcacaactgactccacatgccccttcagcgtatgaagctccctgagcctgcaagtgtagcatcaacagcaagaacaagcacatagttagttagctttacatcgttttcacgccacgtgttccagggggatgcaaattggcattgtgcagctagaaagggagatgcttcttgatcttggaaggaacatggcaaaagcaactgagaattgatgcaatataaaggacatggtgcttctatatgattcttaaggtgacagatcatggaaaagaattatacaagtgtctactgcagatttaggtcctaccttgcaatctcggccctccgtttcgcctcttccgccatctgattcagctcactgtagccggtcttctctgggaagggcttcgcatccggtggctgcaggccatggagtgtcctatgtgcatgtgcccacttgagttccctctcttccttgccaaaatccttcttccttgtaaacgcaatctgtcgaaatcgatgggccattagtcacaaatgcatggaaattcagtcgaaataggtaaggagccaagacaactatgcagggtgcattagcattactctctgctcaatgacaagatcccatgctttcccactcagagcatatcggatgaggaacttgatgatatcgagcgggaagtagaaaacgagattgtagagccacacgataccggcccagccccatccaatgcctttgattgaagtgaatgcccagttagcataaacagctatcaatgtagctatctgcatttgaaggggaagaaagttagattaacacaattctacccagaagagaatttatcagtttgcggtaatagggagagagcataccagctgtgcaacgaagaaagcaaagacaagtagaaagccagggcgttcgataaatgaccagctgcgagaccttgtgacaaagataagagcttggctgatggtgctaacttgaagatatacagcagatgcaagcttttggtagtcatcttgagctgtcttctcaaggctttcgacgtgaaagatcctctgaaaatcaatgcaacattaagtttcaaagcgaatacaagaatcaatcacaaaatgtggtaggccaacagttcaattagaaccatttgttatcattttttggcacttcttacagggaaaaagttggtcttgtatgcagcccagaagaatataacagtcatcattgccaagtatccacccagcacaactccagttgtgaaaatttcagccaacttccagctgtcaggtagtggagaaggctttactagatccttagatatagtcattatggtacctgtttgtgccagaaaatggttgaagtgaacatcatgaaaatagtttctacttactactgaagttttaggagagatagcagggatggagggaacaagaatgtgacataccatcattcagaattgcaatgatcagaaccataaatggcgggaaatcaaactcccatataagggcaagcagcataaacccaaactgtcaaaagagcagtcaatatacattaagtgctagctaaaacataaagttgatacacattgtttggcatagtaagatgaaaacatcatattggggatcatcaaagttaatgtgtacaaaaggttatacactggaatcatttagtgcttagttctgttaaatttatctgaatggttagttctgattgacctgtagttaaactaaaatacctacgagaacaatcaactatttatttaccaaatgagaggaaatccataatttctagttctccagtaaagaaaacataccacaatacgtattgtaatcgagacagcatatatctgcaaacatggaaatgaattagcaaaataacccaaggaaaaaggcagaatattaaaagacactatgtttgtttccatctgacttacagtgtagttcttcattcgctggaaaatcgcccgactggtaagaacagcactaatgatcacactcaagccaggttctgtgagtacaatatcagatgcactccttgctgcatcagtcgcatcagcaactgctataccaatatcagctttctttagggctggagcatcgtttacaccatcaccagtcattccacagatgtgcttccgtgcttgcagacgttttacaatctcatacttgtgctctgagaaaagagagaacttcacagttatatttttctttgtgactttcaaccatttggtttttattctgcaattgattgcatacaaacctgggaatacaccagcaaaaccatcagctttctcgattagatcgtcaactggtaaagcagcaacagactcatccttgttctgtcccaacaaagcagatgaagggtacatgtttgtacccattcctagacgacgccctgtttctttcccaatcgctagttggtcacctgaagataaagaaataattttaattcccataattcagaaagattaacaaaattgcaataaatttccatgacatgatccagtaatgacacttggtagaccaactctcaacttaccacaattttttaggcatgtttacagtgttaattttaaaaaaatgttgaatcagaattaaatataaattatcctcacaaaaataatttaaataagttatataaacaagaaagagtctctataaacattaagttagacctgtaaatggatacatataagcaatggtgaagactggaaccgctacaaagaccactatctgcagctttgaactggtgatggtccccatggctccaaacaatgacagaagagcaatggatggtttatttttttttaatgatgaaaattgagtttcttctttatgatacatcataatcatgcatttcttattgaacagattgcagtactgcaaatttatgctagttgttcttcctattgtactccctccgtcccaaaatataagggattttgggtgaatgtgactctctgtccagattcattgtcctaggaagtgtcatatccacccaaaatctcttatattttgggacggatggagtagattaggattctagtaactgatgcaccatataataactggacatggagtaccctctcaccaccacaacgaccagaaaagaataataaaaaatatatataacaaataaaccatctagattttttttttcaatcagaagagtacctgtgatcatcttaacatttacaccaaggttaagtgcccttcgaattgtttctgcactatcatgccttggaggatcaaagagtggaaggagagcaacaaagcgccatggcccaccaggactctctttccttccatctggaacttcctacatgacagggaaaggagaccataatgaaaattaaactggcccagggaacaatgatttttcaacatatataatgactctggatagttcctaatcttaattaactcaaaatgttaaaacattcaaattgtgcaaagagtatccgaagaagtgctaacctgatatgctacagcaagtgatcgaagtccacgttctgcaaacttatcaattacagcatggactcgtcgttctatctgtgtcttgttgtgtgccaggttgagaatctgcatg

SEQ ID NO: 7883 - DNA, 23579 bp, Oryza sativa
tgctattgttgcagcaaactgaaatatgtcgctaatgttgcagtaaactgatagttttatcactaaacttgcagttttctaaaatttactcttataataattaaactcaattaataatatgctaatacttttttatttttgcgtgtcgtaatctaatcttcatgttcttcagattagcaccgcaacgtttagtaatgttgttcccgccaagtttcgattagagctcagcacggcacatcgccggaatggagccgtcgcccagcagcagctgccggaacgtccacccgacgacggcgagcgcctcctccgcgctgccgatgctggcgcgctccctcagctcgccggcgaacggcccgccgccccactcgccggtccgcctccaccgcttcagctcctcccacatggcgtcccagtgctcgatgtacggcaggtgctcggcggcgacgcgcgcccctcgcccccgcgtcaggatggtctccaggatcgggtggagccgctgcccctcgcagatcaccgccgccagcgtcgccagcgcccgcttcaccgccgccgcctcgccgccgccgccgccgtcgtagccggagagcaccacggtggcgtagctcgtgaagggcgaccccagggggaggccgagcaggttgttgacgccgccgacgaggtcgccgtagctgctgccgaaagggagaggggtcgccacgaggtcgccgcggaacaggtggtcgttgcctcgcagggcgtgccagtggccggtccggttggcgaagccggcgacggagaagacgtcgggcctcacggcgagcgtccccacgccgctgccgtagtcctggaggtccaccaagatcaggtcgcgctcgactcgcacctcgccgagaacggccgccgggaggttcccggcgagggggagaagcaggagcggcgccgggaggaggaggaggaggaggaagaaggagagcgcggcggccatggcgtcgtacgtgcaacaaacctggagagctagctagccagtggcccggttcttccacgatggcgacgattttgtagccggcggcgcgcggtcgagtgggttggcaggtgagcggcgattttgtcgccggagaccggaggcgggcgcggccggcgtgcgtgatcggcgtgcccggaatctctattgacagcgctgtaaaaactaaaaaaaaaaaagtcaaatatactcctccattttggattacaagtcatttttttactttgtcaaagataaattgttttaagtttgattaaatttatagaaaaaacatgaacattttttacctaagacaaatatgttatgaaaatatattcgatcattgaattttgattattgatttaatgaaactaatttgttgttgtaaatatgattgtatttaggaaaaagtacgaaataccccctgaactatcgcggtcgaccgaattaccctcctaaattcaaataacggatattttacaccataaactatacataccggacaaacgacccctaacaccgttctgggcggttttgatttcagctatcacacgtgccgccaatgtggcagcctaatcagaaaaaaaattaaaaaaatccctgggcccatctgtcatccaacttctcccagctcccttgcgctctctctctctctcgtgcgcgtactcgggctaggggcggaggcgagccagttcccccaaatccagccgccgccgccgccctcttcttccctttggccgcccgcggaggaggcagccggagctcatggtggacggcggcgcggggatgggaagatggcgacggcacggggacgggaggtgtgcggggtcggcgacggcgaacttcttcgcgccgccctgggaggaacgaggcggaggcccagccgccgccggtgaggaacgaggccggaggcggaggcggcggagaggaagaccggcgtcgtgtggtggcgagcacgaaaggggcggcgagcgcggaaggacctgtccgcgagcgtggcacgcaccagcgcggcggggaagggaggcggaggaggtgatcgccgagtacctcgacgctgcccgtcgccggccctcgcgcgccgaccgcaagcgccgctcgacctgcgcccgcgcggccgccacctcgacgccgcccgtcgccagccctcgcgcgccgacccccgcgccgctcgaccagggaccgcgcggccgccacctaggcgccacccgtcaccggccctcgcgcgccgacccccgcgccgcttgacctggaaccgcgcggccgccacctcaacgccgctcgtccgatgctttgtggatagccgactggcgccttcgccgccggccaatccggcgacccctcccgccgcctgccggaacccgaaccggtagttggcgttcatctggctggcgagcagctcggtggcggagggccccgttggacgcggcgatgggaagtttaacatctccgagaacgcgcacgatccatgcccggccggcgcctctgcgtggtcgtacatggcggcaggctgggcgtgctcatcgccgtcgatgcggagcaagccatggcctcccctctcacccggccggcgggtcgaagccctgctgcaccctcaggcctcagcttgtcgaggcggctctgctgcgccaagtgatgttgctgctgctcgtgctgtttggtcttagctggagccagggaagtcgaaggcctgttgctgctgctgttcctatgccggcgatggtcatttggccaacaagttcctcttatttctctgcagctacctgagctcatcaccacaagaaaccggatggcaagctgccggcggcgagcgcccatcgcctcgcccgtccccccgcgccactgcccacggcgcgtccccgcgcaccgccgcccaccgcccgtccgcagccgcgtgcatgggagagagagagagcgcgcgaccgaggagagggagaccgggaaggaagagagatgaaatgtgggcccaagaagtctttttctgactagattgccgcgttggcgccacgtgtacaagctcaagtcaaaaccgctcaaaatagtatcgatgggggtaattcatccggtattaaaagtttagggtgcgttatgtctggtttcgggttcagaaggtaattcagccaaccgtgatagttcagggtaatccatactttttccttgtatttatgtataaacttagtcttgaagtaattttacttttatcataatctggtggtagtagatattgctgcattttgtgagtggtgacatctgcatttgactgcatgttgaacgaattgtgttgttgctgtgcagaatgtgatgtgaagcacgtaggtgcgtgaactgtcaaaggtgtaacttaattcgtcaaatttgattgctgattttgaattgacaatggtagttcgtgtttttctttaaggtgatggaataaatggtttacgtctctgacatataccgacaggcacatatccaataagttttgttgttggaagaaaaaaaaggcaacacagggtgatgccgatttggatcaaataaactacggagttgctagaaatatggcgccatatgctacagtcgattttttttcagccacttacacagtagttacacctcatttacaacccacttacatatgtaattagtatgtaattttcgaatttacatatgtaattttagtacttacatatgtaattttgagacttacattgtaaatacactaaaattacatatgtaatttagggacttacaatgtaaatacataccgactattctttgatgaaaaatatggcgccataaatatagctacacccatcaaacggttctcattgtaacaagcgcgtgatatgatctggaaaacgaccaccacaataggacttaaatcaaacacactgaaatttaagatcatcccattcagaaagggaacaacgaacacagacatcacggtgacacacgaactgacactagagcatagagagcaacgttttattcagagaaacagcacccgtgcaaatgcagaatatactccatataagtatcaggcgctgtggctgtgatcctgcagcagctgcacgaagctgcggttcgcgagcagcttggcaatggcgagcgcctcgccggcgctgcggatgccggcgcgcctcctcagcacctcggtgaagggcccgtcccactcgccggtgcgcctccaccggaggacctcgaacgacatggtgtcccagtgctcgatgtacggcaggtgctccgccgccacgcgcgcctcgccgctctcccacccgctcgacaccgtctccctgatcggctccagccgcagggcctgggtgaacatcaccgacagcgccgccaccgcccgcttcaccgccgccgtcccctcctcggcgtcggggtcgtaggaggcgagcaccccggcggcccgcgccgcggccgctttcccgagcggcaggccggggacgtggtggaggccgccgatgaggtcgcggtaggtgttgcggaacgggaggcgcctggcgttggggatggcgtcctcgtcgccgcggaagacgtgccagtggtggctcccgttggtgaagccggcgaaggagatgtcgtggcggtgcatggccaggacggtgccgtcgccgtcgccgctacgcagtttgagaaagaccaggtcgtcgccgggtgggtcttgctgctgcgccgccgagaccgagagaacctctccgcggtggccggcgagattgaggaggaagcggaggaggaggaggagcagcgcggcctggaagttcgccatggtgagatcgagctagctagctccctaagctttgatgctctcctcagcaaagcaaagctatatatgcgcagtgtgtagtgatgaatcctcgcaatttgcgttgggcaactgcaccaggagggtgaactggttgaatgctgatagagctgtttacacctaaagttggcatttaggtttaaaattgaagagaattgtcaagatttgataaagttactggttttctctacaaggctggtctaaccgccgtgtattggccggtcagaccgttgcttgcgggccggtctgatcggcgtgccaacaagagcctagctcgtctacaatattttggtcgcgccatgaaaaaagcgtgtccctcctagcgttaggcagctagagaaagggaagaaaaactctcgcaattttcacacgtatgctcctagactgctaaacatcatgcattttttgaaaagaaaaaactagaaatattgccgcgcctgaccatgatgctgctgaattgagtatacacaattgctcaaactggttcaagagaattaacaattgaacattgtatcaaacataattatctcaacatattgaagagacttatttaccattatctcgtacacacgacaggaggtcgtttgcaagtttgctttggcacataaatctgaaagtagagaaatcaacacatcgtgtaccgataaactattgtgtcacttgattgtgaaggatcagaccagctttgtattgcatcagtgttaagcagtgataagaagcgaatactacttcccagtagtctttcaatgcaaaggaaaggatattaaggaacgatcatatcaatgcttaccaatcatcaatgcttgccaatgacagtaatttcaaattgatagattaagatacttaaatatcacacatcgatacaaaattacaacacttttgagtagttttgtaatttctctcccatatcaactctggtgaaaagaaatactatactaaaaaggctagacagttgtgatactatataaaactttgcttgttcgtattctggaaatgctccacacaaatatttccattttaggtaagaaatgaatgagtgtatagttggattggaaattttgacctgaactctgcatatacaacacaattaattttgtagtgctaaaaaaagctagcaatatgctaaagtgggtgagaatacttgatgtgtctaaactggctttaactcaatgcaaaataggatgtagtgattggagaagctttctgggatggatcaacatggtggagaaaaaccacttttatcctgccgtcactccttggtggactatagaaagtcacctatgttttcagttgcaaatattttggcattgtgaggttacagattactaattcagatttagaagatagacaaatgcatagaaaggaagaagctcacttcagatataatggctataatataataacattaccttaaaccacggtacaaccaactgtcctgaagggtatagggttaaaaaaggtggggagcaacaaaccaatagggaaaattagcgtttcatgggaagaaacaaaagaatttatatgtttgcattaagcacctagatatttaagtacagaccacatagactgtgagtaataacattatgtgaatatctttttctaaatatgcaaccacttttcagtttgttaagctagttaagctaggaaataagtattgatctggcttgcttgttcgaagaagaaaccacccccaataactgcagtcaccttgcctagcttagaaaagaagaaaagcaattctctcacgcaaaaatattgttttgaactggtcgaacgctgatagcacacaccataatcacgaaaacgtaacaacacagcattttttccgcgttcgttcaatcaggatcccaacctccactccctcgcttttcgcgcgcacacttttcaaactgttaagcggtgtatttttttttaaaaaaaaatttaatatgaaagttacttaaaaaatcaaattaatcatttttttaaaaaataactaatacttaattaatcgcgcgctaataaacggttccgtttttcgtgcagaggggatggtttccaaccccaacaatcgaacacaggcgcaagctaatctgctgctggaaattgtggactcacacacatacacaaatgaacgagaacttgtcgctaatggaaacgttattactactactctacaactaactttaacagtttatcatagaggtcagtagactcagtgcggcacatcgccgccgccgagccgtcgccgagcagcttttgccgactgccggaacgtccagccgacgacggcgagcgcctcctccgcgctgccgatgttggcgcgctccctcagcacgccggtgaacggcccgccccactcgccgcgccgcctccacctcccgagctcgtgccacatggcgtcccagtgctcgatgtacggcaggtgctcgtcggcgatccgggcctgctccccggcgggcgccctccccatccggctggcctccagcacggcccgcgcgatcggccggagcagcaggggccgtgctcgctggtggtggtggtcgccgcggtggaacaggtggtcgctgccgcgcagggcgtgccagtggccgctccggttggcgaagccggcgacgaacatggtgtcgaccctcaccgccagcgccccggcgccgctcccgaagtcgagcaggtccaccatggacagcttgcccctcaggctcgtgggggacagctcgacgtgccccctgcgctgagagagacgagcgggaggaggaggaggacgaagaggaatggtgcggcggccatggtgaggagtgaggaatgcgtgcaaaccttgggcaagcgggcggcgatttatccgccggcccggcaagagggcggcgtgagatctcggcggagtggcaggtgtgcggcgagtttgttgccggaggcggcggtggctcgccgcgcgcgatcggcgtgagcgaaactcttgaccgcgaaggcgaaaagtagagccgctgacaggtgcaggggtgggcattccgtctaaccgaaaaaatcggttcggtttttcggtcttttaaaaaattcggtttttagaatcactcggtcttcaagaaaactcaggaccgagcgattcggtcttcggtttgttcggttcggtctcggtcataaaccgaactaaccgtaacactaactgtggtttgaacggcagaaaaaaataatcacaaaaatagtactcgtaaaagatcgatgaatcaaatcaactcagatcgaatcaaagcagctcggatgaacgacaggtcgacagcaatatgatgatcccacgagcaagtagcaggtagagcacgactcagagaaaagaagcaaatcaagcaaattaatcctactgtgacttggatcccgtcgatctccatcgcccctccgaaagctccatatctcatccatctcgtctcccatcgtcgttgttcccggctacccgcggctgccatcgctttaatcacaagctcacggccggcgtcctccgccagcgaggtctcttccaccaccgtccaccagggtgcagctgggcgaccgggctagagtgcgtcgggttgggaagggatcgccacagccgcacgaccttcttgggaggcgctcctccgtcgggcggcgttgggcggtgctgcaccgtcgggcatcgggactgggagttgcagaggataagatcgtggcttcgtgagcagggactaggtggttgttgctcacgtgatgaggtattgggcctagtgggctgagatgtcacatgtggtattgggcctctgatatatttcggttttttcggtcaattcagttaaccgagcctcaagaccgaattgaccgaactaaattcggttagttgaaagtgcataccgaatttatgaccgaatttctcggtctcggttagttcggttttggtctcggtcatttcggttcggtttttttctgtccacccctagacaggtggggcatgagtatacaagattttttgcgcatgatctggtggcacacacattggaacgtattttgtgtgaatttgaatcatccgatgatccgtgcagccatttgcattggcagaaggaaaacggagaaatttgtttggacgcttctgtttgatcatttcagaagcgtgtggccggcctagaatgagtttggctaatgcccagatcctcgtgccttgctctgatctagaatgagtttggcaaatgtcccaaatcctcatgaactgaacaaggagtatcaagcctgtgccgaagaacaggtccagtaaaagaagtatccccattcggtccaacactttggcacttggaattgacgctcgtgctgatcgattgtgttttcaaacagtatatgcaactagaagtgtaacagaatcattggcggccgcttaacttgcagacggtgaaagaagaaatctgttaccactgtacatatccaacagttcttttttttcgtaggagccatattcttttttttgacagtatgttcaacaatgcttgcagctgttaatttgctgtagatgtgatgtgtcaacactctcaaaggtgcagttagattcatgaaattttgatgctgaatttaatttggattaaccatcacaataccaatctgtatgaaacggaactcccatcagtaaacagcactgaggcacaaaacatttactgcataataatcgtcagaggcggctcaccaaattaagttctaaacactttgatctgaaaacacaaaacacaacatcacaacacacaacaatatttttattcagcgagcagccgcgcgtgagacgatgaagcaagcaagcactgcaagctgcagtgatcagatgccgtgagcaagctgcagctcctccaggtcgcgatcgatcagcacgccggcgacggcgcccgcctcctccgcgccgccgatgccggcgtccttcctcagcagctcggtgaacgggccgtcccacctcccggtgcgcctcaagcggaggagctcgaacgacatggtgtcccagtgctcgatgtacggcaggtgctcggcggcgacgcgggcctccccccccccccccccacccgctcgacacggtctcgttgatcggcttcacccgcgccgcctcgctgatcatcaccgtcaccgccgccagcgcccgcccgagctcctccacctcgttcccctcggcggcgaacgccgccgggtcgtaggaggagagcacgcgggcggcgcgcaccatggcgtcgcggccgagggggacgccggggaggttctggatgccgccgatgaggtcgcggtaggtgtcgccgccgaaggggaggacgctggccgcggacgggacgaggccctcgcggccgcggaaggcgtgccagtggcgcgtccggttggcgaagccggcgagggagaggtcgtggccctggagcgccacggcggctagctcgtcggcgtcgaggcctccggtgaggccgacgacgaagaggccgtcggagggcggctcgaggtcggagacggagaggacgtcgctgcggtagccgccgaggtcgaggaggaagtagaggaagaaggcggcttggaaatgcatggccaaatcgatcaatcgatcagcttgcacccctacttctcccaatctctctagctatagcttcgttctgagcaagtgtgatactggaatataaatacgagagagatattagctcgatcgcttttagcacgtcaaaagagcgtgtcctctctacctctccggagaaaggggatgacaggtggggccaggaccccgggcactgttgggagaaactaattgtatgactccgctggttcagtatgaattttattttttttatatactccctccatcccctaaatgtttgacgccgttgactttttaaaatatatttgaccgttcgtcttattcaaaaaatttaagcaattattaattctttttctaccatttgatttattgttaaatatacttttatgtatacatatagttttacatatttcacaaaagttcttgaataagacgaacgatcaaacatgtttaaaaaagtcaacggcgtcaaacatttagggaatgaggtagtaactatttaaaccacatgcatactcctagatatgatagcatccatatgtagaaaatactttccaagatccatctctactttcaagctttccatgtcgtgaggaggaagagggtgcagactccttttttttcgtttgtcccttaccgattgctagtgctgtccatcattcataaaccattgtggttacactccatttcgacgatttgagatgttcgtaggtcgtctaattagataagatatctcagtttttctcgtgtatctatatttcactaataagttaaaggacatatctagtgtgtggtgataaagcacgcggtatgtgttgtttggccaaccatgcatttcgctaggaggtggaagcacatatctagtgtgtggtgggtatgcgttgtttggccattcacaggttaccaatttatcgaagcacaaactattttttgcacaactattcaagaaaagagcttgcatttttttttcgagatctatggttttcaggtcaatattttttcgaggtatatggtttccaggactccaggtcaatatcttagtacttcctccgtttcacaatgtaagtctgttaacagtgaaatttggtaatcagcaaagacgtcatcggcttagagtcattatcggctgcagcatctcgggatcagccgatgggagttatcaagtcgccaatagtcaaattcctgctatattcggctaaggaaatcaatctactaacggaagcttatccataagtgaccgagtttaaaaagaatgcggcatggcaagttatctattaaatagaaatagtttgttagtttccttttatctttagaaaaatgtgtttagtgtcctataaggactttatctgttccttttatctttaggaaggtttctttcttgtccgacaaagacttgtatcaacccatgggtataaatatgtacaccctgggtcattgtaatctatcctcacgatcaatacaattcggcgcatcgccaccttttaccttttctactttattttatcgtccggtaggatttggcacctgacgcggggctgcatcggtgttcgatctctgacgaaggggtaagtccaatgttccgtcggcccaggcaattgtatcgtttacgtcggcgtcgttcaaggctgcatcagtacattcgacctcttggattgctctggtttggatgatatatttgcctacctatttatcatgtctctgttaatctagtcttagcatatcaatttagctctatcagctgtctctcgctttagggtttctgccggtatcggctaaatcgcattgctagattagattagcctaggcatctaccaccctgaaaatcagtcaacggcttgattgtctagatattgtgtttgatctactaagtcgtgcttagaaccataatctctagcctgcctcttgattgccaataagggtttcatcgaggtttcagccggtgagttatctggacgttgcatcggctcataaggattgcatatacataaaagttggatttagccgatgacaacaaaggtttcactgtttaatctaatcttgtggatttcatgatatcagacctctagccgatgtgtgctttaaccctcggatcgatgcttatttatcatatcattgctagccgattggtttatacaggactatattgttattttattatatcatcatcaaccgattgcttaaaccctatcgctatcggctgatatcggcatcagctgttatcggctggaattactccatcggcttgtcagccgatcggctgttttgatctactatttgcatatcttgtcagttgcaggatcaaactgactggcacgcccgcatctcatcaatctttggacctgcacaggagctaagcagatctctcaggccggtgcgttcgattttttcgtcaacaaagtcattctagtattttttatatttatagtgatattaatgaatctacttacattgtgaaatggagggagtagtttgtgttgattgaccctaggaaccgcataccttgtaagctgatccggccgtatattcttcgtggtctgtaagcttttattttttatttcgtatgctgccgcttcatacgtatacgttatgaatggtgttcatggcttgatgcattcatattgatgaaaaacttgtgactagcagcctccattaaggtgtgaagctgtagggttaattcatgaaatttcatttccgggcagttcctattgaaaaattgaaacacgatgtgatgcaaatgcacatgaagatggaaatggtcagttggtgaataatggaacaacattgaggcgcacacggcacacacatcttcatataataaatcactaccagaccttctagtctacactggccgaagatgttgggggtcttccggctagctttacaagatggagggctagatgacttgggttcgaaacctcactccttttaattatttgatattaggtcatttcttaatattaacgtcttttttacacttgccaaaaaccatcgggaaaaatatgaattactgttagaaaatatttctgtgtggtacacaccatatacctataggaatagcgaccaccatatacctataggaatagccgagaccacagagaaatgtggtttttccgtcagtttgccgaaagaaattatttaagttatttccccgtgatctcaaaacaaccacacagtcaaacaaactggtgttagaaaacgaaacacatcacatgtatacgttggattgagatcctctattattgaagtcaccgtgcctttaatacttacatgtgggtccaaaatattctatcctattcacgtgccagcgacaaagtcatgtaatttcgaaactcgagattcctgaccggaatgatatatactcaactcaattactcaaatagttaaacagcacgcgcgatgcggtcatgctagcaagcagtagaaaagagagaggttgcaattttgcatcaggtggtggagtgagccaggatcagctgcgccaaggtggcaatggcgagcgcctcgccggcgctgcggatgccggcgcgcctcctcagcagctcggtgaacggccccgtcccacctcccggtgcgcctccaccggaggacctcgaacgacatggtgtcccagtgctcgatgtacggcaggtgctcggcggccgccacgcacgcgcctcgccgctctcccgccacccgttcgacacgggtctccccgatcggcttcagccgcatatggcttccacgagcatcaccgacaggcgccgccacgccccgcctgagcgccgccgccgccgcctcctcctcgccggcggcgtccgcgtcgtacgacgcgatcgcctcggtggcctccgccgcggccgctctccccagcggcaggctggggccgatgaggtcgcggtaggtgctgcggaacgggaggcggcgcctgcaggcgttcgggatggcgccctcgtcgccgcggaagacgtgccagtggccgctccggttggcgaagccggcgaaggagaggtcgtggcggtgcgccgccagcgtggcctcgccgccgtccaggtcgatgaggaacacgtcgtcgccggagatgccggcctgtcgcgccgccgagcgagccgccgccgctgccactgatcctcctcctccccggaggcgccggccgccgccgcggccggccgagaggtcgaggagatagacggcgagggcgaagaagaggaggaggaggagtccggagcgagagctctttcttcttcctcttcgccggcacgccgccgcgggatgatgagagctcgacttggacttggatagtggaatcgtcgtcgtcgatcgagcgacacgatcgagagcaaattgtgtacataattgtggtgatgatagtgtcgtggttgcatgcatgcggatgcgggtcgcgttggacaactgcaccatggtttgtgatgaatcgtcgtcgttgcgaccggcaagtacagcacgcacgcacgcacgggtgggagagaaaatggtaggtcacttgtttgattgaggcgggcatcgagctgcgtcgatacgaaatttcggaacttaaatttggatctatgcatttgtgtaccgtggggaaaatcgatctgctccgagatggattctaatagctcgagtggacatccacccgtttattacatgtcaactagatggttacgaaaaattttcaaaaaatttgataagatgtatccatatgtaatatatcactccacaaacatgcaagttaaattcaacttttacaatttgtaaaaaaataacaaatttaattgtaaatatacatattgtaatttgagttttgtttcttatttttgtaacaacttgtagaagttgaattttaacttacatgtttgcggattgatatattacatattgatctatcttgttcatatttttttaatttttttcataatcatttagatgacatgcaataaacgggtggacgtccactcgagctgttaaaacagtttccccgatctgctttgctcgcaacctttcttcttcgattgcgcgtgctggaaatgtgcgtgcagtgagcagtgttgcgacttgccatacggtcatcgcaatcgcaagtggtggcgtaaatgcgtaatacgttggaaaaagtacatcgaaggtccctcaacttgtcatcgagttacaaaatcgtcctccaaccacaaaaccagatatgatacatctgtcgtcccttaactaatcaaaactggttacaataagtccttaagtggttttgacaccggttttgtcctacgtggcaactaagtcaacgtgggacccacgtggaccacgcatatcaggatgccacgtcatctctcttacccctcctctctctctcgctcttctcttctatgggcaagccggctggcggttggggaggaggccactggggcgaggcgggagaggaggaggcggcgtggctagctcgtgccgcatcccgtccttaaagttcccgtcgctgtgggaatcgaagaggcagcgcggtggtgtcagaagttgcgcggtggagcggaaggcggcgttgatcgcgttgggagccgtgatggcgtcggagagggagcgcggcggcggcggggtggtgttgttgccggaggaggcgaggaggggcgccaacctgccgctgccgcatcctaacatgtggggtccatgtgggtcccacgctgactcagccgtcacgtagtacaaaaccggtgtcaaaaccaccaaaggatctattgtgaccggttttgattagttaagggacgccagatatctggttttgcgtggggggggggtgattttgtaacttgatgacaagttgagggaccttcagtatactttttcctaatatgttgggctcacgaatctttaaaggcccatgacttgtgggccttagtgggcttggcctaaaaatgcggcaacgcgtcttcctcgatgccagccgtctctgctcccggcggtcttttttttttttttaaaaccacttccatcggctgtttgtaatcagacatcagctgaccgcagacgccgccggccgccggccgccggcgaagtagaagccatttacagcgctggaagtggtaaaaatagcagataatttacgctttgtgcgtcaagaggagtaatgtattattgtatttctttccaacgaactgtctggtttttacttgttagtagagagtaacatccatttgcaaattactgcacttgttttttctaaacaaaagttataatactacgtatcttctctatctctactatattataaaaataaaaaatatttttgtcagtattttggtacgttatccgtatttgaatcggtttttagatttgttctttttggaaatacaaatccgtgtttgaatcggattttaagtttgattgcttaggagtcatataataaatctttttttttaaaaaaactcacatgctaatttaggatgaaagtcggactcctaattatagctcatgattttcttaaaaaaatatccaagcgaattccaatggtgaatttcaccctacctataccgtataacaataatataattaaaataatatttttctagtgtgtatatatatccaggagcattccctccataaaaaaactcaatttctagagtttaaatattgtccaaaaaaacaacttctacaatcctacagtcctacctaccctcagcaggtaaaacgagaagttttattatcacgtttactaatatattttttttcaataattaaagatattttagtcattctcactctccactaattccaccttagattgttaggaatggattttttttgacggaacgagtaacaaactcctacagtatgctcttgtttagatccaaactttttcttcaaacatctaacttttctatcccatcaaaacttttctacacacaaactttcaacttttccatcacattatttcaatttcaatgtgaagtaaacacacccaatatttgagaggaagtacttcaacacaaaggaagaaggctctagaacaaaggcccagggtgggtccaaagtccaagcggcacaccaccggtgaggaagtagcgagaggcggcaatggcaacaccgcttgaagattcgtgcaagccaatccgcccaaccagatgccctacccggcggcctctctctcctctcccccataaatctctctctcccacggcctccacccatcgcctcccacccgtctcgccgctccatctccaagcccgaatccccaaaaccctagcccaccccctgccgccatggccgcctcccccaccggctcctcctcctcggcccccgccgccgcggcggcggcggcggccgaggccaccgacgggccgaccctcagcgtcgtctcgaagcggctccgcgcgctgcggaagaagcacaaccggatcctccagatggaggagtcgctcgccggcgggaggaagctcaacaaggagcaggagggggtgctccgatccaagcccgccgtcgtcgcgctcatcgacgagctcgagcggatgcgcgcccctctcgccgccgccctcgccgaggagctctcctcccgccccgccccctcctcctccgccgcgccgccgccccccgcatcctcctccgccgcaggcgccgcggattcgtccgtcgtcgaggatctcctcgcgctcatctacttcggcaccctcttcgacctcaagccgcagaccgagttcgtcgccaccatggtcgcgcgcgcgcaggagcgggactgctgcatcacctacgactacgtcacggaggacgccgccgacctgctgcaccagtccgatctcgacaaggtgtctgctctggccgccctcgccgcctcgcgccctgccgcggcggtgggcgtctcgcaccgcgacgcgctccagtcctgcgcgcagcacgcccgcctctggcttcgccgtgccgatgagccaatccaccccgaatccagcatcacttgtaagtataggggttttgtttataatgttgtttgatttgggggatttgcaattatgacactgcaaacattaacttttgctataatgacactggacccacatttcatagacacagatggatccatttgtcatccacgcggagtgtcaaaacagcgaagccaccatgtttgcagtcctaatattgcaattttctcgtttgattttagctgctgattggatgatttatatatatccgtgatgctttatttggttacagatgcagcggttagggcgaagttggacaagatcatggcttcagactactacacagcgcaaccggagatgccggagatgggggctgcggtcgatttgtcggctgctgtgcaggagagcatggttgtgtcaccagaggcgccggctgtggaagagagccaggctgagggacacaaggtgaaaaaaatatttgttcttttcttgccaattaactttacttggcgtggcccaatgattgttgtcctgctaactttatcatgctgtggattgatgatggatttgatgcagtacaatatgttattattgctgctgcttgtactattatatctggtctgattttgttgtctagtgctattattatgatcaactgtggataattacttcatttgggggtagagattgtaaggcagatccgaattgtgtttatcaaaagcttgaagttagataacttgcatatggtttatttgatgacaaatgacagttagtgcctgtgtgtgagaattatgctggaaaaggttcatgtatcccatttaacttgccactctttgtttgtactacaccatgatatttgtattattctgggtctgatgtcacatatatctgaagtaaaaagcatgagtattccactatataggtgccaatgattttgccgctgttggaaattgatatgtttaacaatagtgtatctctaatcgattattttgtagtagacaaatatactactatgtttctcttgcctgctatcattttgaaagcatgatataagatgctgagggttcaaaattacaacttccatgaactttttatgcttaagatttttttatacggtccttaaaagatctattttttctgtacatgttcttctttttcgaccagttaagcctcatggatggatttgatctgcaaaatattctccttttcaatttgtgtaacttaagttttatatgctttgtctgcaataatatactccttatatattgttatgctgaagtattgcttctctgatgccttaatggcttaatgcatatattttcaagttttagacgtactcagtttttattttactgctttttgactctgaatatattatctattgtacagccatgcattcttgacaagcattttttaccaatttgcttggtgcctgcaatttgcatcttaaactttgagttgcctacttaatcttttataggttcatccaaaaacccaccgataaccactaacaagtactgacaatggtgattatatttattctaaaatcattataaggtgatgtaattcaatatggatatgtttataattgttttcatttgctctcagtcatgtgcaactaggtttacagtctactgatctagttcgcatgaatatcctgttctgatggatattatgaacacaccaaattgcatctgtgtctatatgatgtattcagatcaatttaatttactacataggattgctgattgctttctgtatgacccagttttccatgctgaacatgtgcccattattagctagtgctgctttcccatttacatattgttctgtctagagctcttgtttcgtcatatctgaagtcaccatcaacaaataaagactagaacttatcgcagacaacagtcataccatattagatttatcttattgtgatagttctggagttctgctatgaattttaggtagatttcttatgagcacatgttcaatgttcattgctgaaaaatgcttagataatattgaaccactgtgcaaatttattatagcaactaccattatggagttcattttgtccaaagaaaatactattaactcccttccggcagtatacaggcatgccaactcctttaatgggtgtctgtcatacatgttttcattcttcgagttgataacacctaagtgaagcaattagagaaaaggtagtgcatttataaaatggaaaaaaaatgctttgcacctaaaagttgtgtgtatcattgtcattcctatttgtaggaatagaacacaagctgaaagtaaggactatggttcaggcataaccctcctttttttattctaatgaggtaggttggataaccttgttgcatgtcaaatatcagatgtacccttaatatgcttatttccccattcacgcttgtaggatggttgataaattttgtatgattgagccttgaagtgtgattgagttttaaagatattttattttattatttgacattattcatttgagtaaacacctaatcagctcccttctggctatataagtgctactccctccgtttcatattataagactttctagcattgcccacattcatatatatgttaatatctgtaatcatttgtcactctgtagtatgtaatatcgaacaacttatagaattctattttgagctttaaagtgccaatgttgtccatgtttgtgcatgataattttttttgtgaatgaacatggcaaactgaagctctgttctttatggatgattgaacagattatagacaatcgtccatagggatggattaaccaaaagattagcttagaactagttatctaagcaatgttgatgtagaaagtttttcgagagattgtgttttgagaactgtggtactcataatccatattccataatgcatgacataacttgattgtgtctttttaaattaggaacagcaataacaaatggaggtctagagaaggataaagattagattattttgacgactacagactttgtacatgcgatttgtcgatgttgctagttaatatcagttcgtaggaagcaacaaaatgaaggatatattttcatcattgctaagactttgctttattatttcttacattattaatgcttatgcatcgatatccttttagtatgaccaaagtcgtgcctttaatgggcacttaacccaaaactgtctggctagccatatgtgtggatattttttttactgtgcctgtgtaatatagtactgttgaaattgctggcatattgagctcattatatattattatttgtagtatttgctagaagagtctgataaaagtttgtgatgtttgcaacatcttcggcattctaaagccaaatcttttggtttacgtgtgtatagactgagcaatatttagatagaacacactatattgtgaggttagaattgtgtccattatcgattgtgatggattttgtgtgggcataattgctccaaattgtcattatcttattttgcatctagtgcactgtagaggcatttctacaagagagatttttagtttggatgtgatttgacttaggaaacttgaaggtctattatcctgtgggcaaatgttgtgatcaatttgttttgttggcgtagtttgtttgttgcctagtcagttcttttgaggcacgggttatatcttgtttactgatatcttatattttgtttgttgacaggatgagaaggaggcttcggaggctacagaaatctacaacgataatcagcctaatgtagctgatgctcagaatgtggtatttaccaatgatttgttgatatttctatatgcaatatgtttcctcatactgactaaccacataacttcaggaggatgaagccccggtgaatccttctgaagagttctcagcagcagaggtggagcaggagaagtttgaagcagatgtggaggaacaagagaggaatgcagatcaacagttcacttctcgacggccttaccagaaccagcgcggtggtggtggtcgtggtggtggcaggaggggttaccagaatggaggtcgtggtggacgtggggggcgaggaatgggcggtggcgggtaccagaatggtcgtggtggtggcggcggcggtggctaccagaatggccgtggtgggggtgagggtggtgggtactactataatgagcctggttactaccagcagagggggtacagcaacagaggcaggggtggtcgctctggtggtggcaactcttattacaacaatcaaggtggaggttcgcagggaggtggccacgcccatcctgggagggttgagctgggcgcaaacgcttagcttcctaactattttgcttggaggagtgagtgttacgcgaggagaggacataatatgtgggagccattttgttattatagaactaacttagccctttattatgtcaacatttgcccccctcagagttcttttgtcactccaatgactttcatatggatggttggttgataatgcggaatactttggggaagtagtttaaggtcatattcgttctccttaattccatttcttgtgtttatgtgtggtggttgttttacttctcttctcattttctgcttatgagatttatcatgcatctactgtctacatatcacaacaacatgatacacataattggtgctgctcttttttttttcttcatgagttggcttcatagatgctgctaaatcgtgccaactcaactcccaagtttcccgtccgttactgtaccatatttttttgtgaggattgttttattagctgttgttctatgacgaccctgcaaatgtcaccaggtgcgaccgtgtgttgtttacctgagcaatccgagccgagagctgcggttatgtgctctatgtgcaacatttttgtttatgttttttgtcttatgtttgtctcttgcatacctaacccagtctgttgttttaatttgtttatgcatgcattcagctcgaggaaatgttctggtcggacttaatcagacagctgacctatagtttcttgtgttatgagaagacctagagtttctgctgagcgaatagacatggacaatgccacatcttaacactccacctaaattacttgaccatttcttaaccaccattccacctaacatttctgtctaccaaaaaaaataaacacacatgtaatcctgtttatcacgctgactttagcaaaccggacaggttgattagtgtctgtgtgtgtgtgagagagagtgtcgaatggcatggtaattagccgggcacttgctttccgaaggagcgaaatcatgggtactaatcatggccccggtgcacgtcgcttcatgccttaatcatgaccctgcatgttagctatctcctcccaaaacctttgaccattgcctttcttctaattagcacttgttta

SEQ ID NO: 7884 - DNA, 33031 bp, Oryza sativa
ccgcctccctgaaacgcacgggaatttcagctggaattcatacgggagaggggggcaaggaagaaaataccccagtagaagggaatagcaaaaccccacctggacgacgcccacacggctccctgcgctaggtcggaggcgccccccgccgccgccgccgcccccgcctcgggagggtagtcagggtgcacgccgaccgacgaggaggccctgcctgcctccgcgccaccggaggaccacccgagcgagagccagccgccgcaggcgtccacggcggcggcgaggtcggccctccccgcggcgacgagctcggcgcgggtggggaacgcccccggcttgtcggaccgccgcatgaactcgtagatcgcctcctcgaggtcctcctccccgcgggccgcattggacgccgacaacgtcctcctcggcgcccgcgtctgcgtcggcgccgcgcgctggcgacggtagacgcggcggcggcggtggtgatggtggtggtgcggcgccgcggcggcgaggaggacgaggcgtcggcgaggagcggaggcgggggctagggttagggttggggaggggagaggaggaggaggggtcacggggagggggaggaggagggggagcatcgcggtcgcatttcggtgctgcttctccgcggggggggaaacgcgatgggttgggcgggaggggggaggcgacgacacgagaaagatgaggaggagggggggagcgagacggccagccactgctgccaccagtggcgactggcgactggcgagcgatccctctgacgcatggggccctgggcacccaacccctgttgctcctcccttcttggacctttctgcactgcagagtgcagatcccaatttggcaatttgcaaccttagcaccgcgacctgctcaggtggctacagctagtagcctgcgtttatgcctgctattgtacaactctatccgtctcattttaagtgcagccgtgaatttatttgtttaatgtttgaccgttcatcttattttaatattatcattattatcagataaaaaatatgaataatactttatactccctccgtcccgaaatatagcaacctatgactagatgggacatcacctagtacgacctatgactagataggacatcacctagtacgacttatgtccagatacatcgtactagatgatgtctcatctagtcataggttgttatattttgggacagagggagtacattacttaaattttaaactttttcataaatttttcaaataagacggacagtagaacgttggatttagaaatacacagatttaaaatgggacggagggagtagtagtaacagagtagatatgcgcaaacaaggagcatgtgactgatggttggtcctttgatgcgacttgggattttgtggatatggaggagactgtacaatgtgccatcgtggcgttctctccctattttgatagggaacgagatcatatatgctacattatttggatttgagtcactaatatatggtttatttattatgatttatgtgtaagtgatctagagtcacctggcatcatggtagagaatccgtgtctatttgattgagctaaatatggtgatggcggtgactatggcaatgaaaaatgatgtcggtggtgaactggtgatggtaataaatagaactgcctgtgtttgtaatttaatgacatgacgtgcaaatttgtattgttgggttgttttgttccagttgtgtgaatgtaaatagcgttgatggagaaaatataatagtgtagtaaaaaagatttcatttcgaaattgatttggactacattgaaaaggctcatttgtgacatgtgaaagggaacacgggtggttgctatatccgagagatagacacaaacacctatgggtatgtccatacctctcacatccttgtcatcgtacgcccgacaaatataggacaacatcaacctcacatcatcgattcgttgataacttatcgtaaacatttgagaaatttttcagtgagcataaaaatgcacatctccgatgatattcaacattctccgcggcttgtctgattggattgccacgcaattcgttcaagcagaaaacggtgacagctttgacagtgaggagcatatgacaaaaaggccaagaggcagacacttccgttttgttattatgggctgaagagagaatagagaaagctggaaaatcacagctatggaggatagccggtgccaattatttcatcgttggtcgagacggttactggttactggatgcatgagaggccatgaagttatttccactgaactgattgtgtgagctggatggttgatgagcaaacaaacagcaaaattaaattttgagtttatgagtgatggcatggggtgtagacagctgcggttcaatgttaccatcggattctccgttcatcattaagcagttcttccatttcaaaattttgccaaaatttaagctggactttttcctcgggccgatttgagagacggctactccttgccaagccaacctgggattttccttaccttcgcatgctttagttcaatatagttcatgctgcgagagtacgccgtgccaaattgtcgatacacagattttgaaggcgtacctgcatatatatggattgagatcctctgacttcaagttagagaggcgtgatcattgacatgtggatccgattgccagtgacaatgacttcgactaccattagatgacatgttaacatcatcttccgcgagcacatcgtctctggccatcatgtccaaatgatttcctgctgttggttgaatgaatgtcagcggctgcaacaatattaaccatgtcaacaaatgtttatccaacaaatgggatgcaagtatagaagaatgttaagttctaatatgacctcgaaaatctgaaaaaacaacccttgtcaagacattccgaaaatctgaaacttttacggcagcttcggttctaacaaaaaaaaaaaagggaagctattgcagtagttccgaatcaaaggcaccatatcccgtatcttgaatttaagtagacatatcctataatatttccataactacaggcggtttcccatttaagtgactaaacaataatccatctgccacaaacatgccaaatcttgttgcgtgcgcaggatttataaccatttactagatgtgtagcctctttaacgtatcatgtttggctagtgctacatgaatagagacaccaaacgaacacatcatgaatttaaatataacggaattccgcaacagtatcagttaatctgtatgatgatacatcggttgacacaccccttgttcctgggtcaccacggggatcttctcgaacgagaagagggaggacaccagctgagctccaagctttggatacagaatcacttgcatcacccaaaatcaatgaggaaactgcatcaaaactgcatgcagcaagtcaagatctcgtgcagctgcactgtcactagaaagttcacccaaacataaaaggctaacagctccaagatagtgaagaagagctgcaactattgatgtcgtcatggcagctgatgacccaagtccagttttggcaacttcaggtttgctccagtcattgttccataattccattagcaacttctgaattaaatgtaattggacagaatggaggcagcgaaagcaatacttctggtctggagttagagggaggccacgtgcttcaatctggagaaacggtggaaaaagacaagttaattatttaacagcggcacaatgctccaaaagtgagttatattcagacataagttaatcatggaaagagagtatatttgcagtttataaaaccatgcaacccatccgcattgatttttaatttttatttttgcagctggttcatccttcacagttccattgaatatttatttgtggacacaatagaggatatcatatcatgaccacacagagtacaatacaaaaacttttcaactttataaagtacataagagaaaggatagacctcaaagcaatgccattacattataaccaatcgtgttcaatttattgcagttacagataggtgaaatgtaaacatttgccaatggaatgataattcaattagcagagaatctaacatcaccaggtatcagatatacagagagaaaatacttattacaaagcataaagcatatcttctcccttatggttctgcctgagccaccccttttcagtaaattatccgagtagtcatgaaaaattaccaaaagttttgttcagacatctatccaggaaaaaaaaatcagctgaaaattactacagattgtcaggagggaaagaatagaaggctttttcttaaatccttaattaggcactggcaagtggcaaccgtgtttgttagtgcttttcgtgggatgcgaagaaaatatatgttcaagattaggtggtcagcaaagctgaaagaatcaactagggccacgttcagattaagtcacacttctttgttaaattctaacctgggattggtgagttaagctcttggctaaaggaaagcaaatgcgtgacaacgcaagctaattcagaaaagaagctttacctgttctctataggaataaaaaatcgttgcaacctacaaaaaatagagatgagaatttaacaacgatacgaaatcaaattatagcgtggtattcaaaatgattcggacaggagcaaaacttgagactaaaatcgcaaaaccttgcaaaagcaaagcttgtccagtgcatccttcccctctttgtcagcgactgtcacttccgcagctgccaccgagaattgcactgtcttgttccacaaaagggtttgcagattccctgcaacatcaagtcattaaccactatcaccaaacatgattacatgaggtccaagtctccaatgacaactacagagcagagttctgctgcgcaaatggtacaatcccagcaaatgatcatggactacttaccttgaggacgtcgatttcttcggggagagcttgtaggtggcctcccgggagagctgaggagatgtcactttcacattcgtccacgcctagtagcaatttaccatatgggacaggtaccacacagagtaaggattagttctccctgatggtgatggctactaaattgtgtgagaaataatctggggtttcgggggctcacccatgcccaggattcgtcgtgggtgagctggtcgcggggcgggaggacgacggcgtagaagcgagcggtggtgatgaggacgaggccggcgttggggcgctccagcacctaggaaacctcccgcgacgagcaccttccccggcgccgacgccgacgccgcccccctgccctgccctgccacagggatcggtcgaacggtcagacctggatcgagggctaggcaatcgaggtcaagtagagaaagagaaacactcacacttccattctcggcttcggcggcgaggggggacgcgatccggagctcacggccggcggcgggaaatgccgggtagcgcgcgcggcgcggcgcaagcacgacgacgcacgccgcctttcgaggtcgctccgcttacggcggggcggggcataggaagcgaggggcatcgcgagcgcgcgggcgcacgcggtggccggggggaaggacgacgacggcggcggcggcgccggcggcgagatggccttttgcagttacgcgggctcgaggactgggcttggtgaaatggcctcctgggccatgaggcccgctactcttagcttcaatataaaaattttatcctcttttttgtttcttttttgtttaggacaaaaggattcctccgtttccattcatgaaggattcgaattttatcctaaaatataaggaatttgcatgtctaacgtgtactcctgatgactctttatatatataacgactttgtagatattaacatgcatgtcgtgtttaggcgcatttagattttagggcctgttcactttgctgccaaaaaaaaccttaccaaaaatgttggcaagatttcttatatagttaccaaaatttggcaacaaactaaatgtagccactttttttagcaactttactaaaatttagtaaggttgaaaatggcaccaaagtgaacaggcctttagaacacatgatgagtatagcacgatctagtttctatgtgcacaaaattactttaaataaaaatcatatgctacacatggtgtaaaccgtctttattctcccagtcttgtttggcactcggaaaaaaaaaggaattggctgatgttttccctcgttatgcatgctcacacacttttatatcctgtgcgaatgcaaaaaatcatgcttgaagtgtttatactttatagtgataaaaacaaattttaaaaattaattaattaatcttttaagtataacaaatagttaaatgtgtctctaaaattaacgatgtcaattatttattagtagtactatgcaacatatcgtaccatccaatatataaaccactccaatagtaaatcttttggaccagatattaatttcaaggtcatgtggaggtttaattgcatatatgctagtactatagaaatctaagcattagatctggggttgctaaccaatccaattaacaaaagacagccattttgctggctaattctcctgcagcacgtgcccaacaccgaacccgacatcccatttacttttaagcaattttcacaaaactcatatattatactcccttcgtcctaaattacaatgtataaatttttacacatgttttaatgacatactttaaccaataatttattatattttatattcctagcagatataaaattaacatcacattaaagcactttaaaatatgaatctagttttttactgaaagttaaactatgaatctagtgatataacatacataatatttagcataaatatatggttaatatgcttattagtcaaaaactaccaagtttgatcttcctaaaaagaaataggacatcctataatttaggatggagggagtagtccaatttgttttataaccattataaccttatagagtcataaaccacaacattaaacattttttctttgactagtaaggtgcccgtgcgttgcaacgggaaatgctatatatcaatttcaaattatattaagtgaaaagatattaaataatcattgagtgaaaatttattgaacacggaaaaaaaatctggcaatccaaaaaaactacaaatcataattgttctatagattactttcaaagcaagaaatatgttatcattatagaagtatagtgcaaactttctgccacatatataaaacaatctcatggtgtttattaaattataaaaagacaacatagatagaagactttcttatggatgatcacctcaaaattaaattactacatataggtaaataactattctaatgttgtgcacttgcgatacacttaaaaaatcccgtgcaccgctagggtgttgctttcacactcattttgttggtacatcagtagatttagcaaaaaaaaaattgccttagctcgtcaccatcctggacatgttaaatatttataattataaaatatagttacaagcccgcgctagcgctatggtgacgatttatatcgtaaatgaaacaatcataagattggctattaagtatgtcgacgtttgatgtcacgactacagtatttggacagtatggggatcgttggtgctaggatatatgcgagactgaggtaaaagagatggtgacagggatttttatacaggttcaggcccctgagctatcaggtaatagccctacatcctgttggccggagccgatgttgctttttattcaccataatcacaccaatacaatatgtggggtagcctatctaactattgtcgacatggcggtctgaaggtctgactcgtagttgacaacagggtagccttcctcctcgagctcgtgcccgacggaatcagagacagtgctagatccctacggccggcctctgaaggtaccggatagggtcgatccaggcgtatctctgatgtcgatatccgacggcttgtcttggcgtatgtaggcttctatgttgattgaggtggccgtgtctcttccctccctagggggtcttgtatttatacccatagatgttccattatccaagtagaactagggaaaccaatatggatacaatccgagtagtccttgtcgtttccatgtagaactctggttgtctttccttaccggaactcctcctatatctgaaggttgtttccgtataggacatgatatgtggtgggtcctgccgagatttaagtcaacttctattaagtatgtggtatctcataaccatgacaaaggtatatattcaagacattaattaagacttaagtatcagatagttcaagcaggcaggtttaatgagctgagtacagaagctctttgtcaaaatataatataatacgcaattcttttaaagaatagaccacgctaaacttattgcaataagtttcggtccatttttgcaataagattttagcacgatctattcttcaaataaaattttcaaaatggtcaaattgtcaaaatttcagaaaatactctttgtcacaatataatgcaatatgcaattctttataccataaatactgcttaaacagacaaaacgctaattttagcgaagttacattaagaaggttttcacttcacgtcagaccagcacaaagagcctattacaaggtccttagttttactatagtgtaataaaccagcagccaaagaaactacatccaagacaaggtccatgattcagtcgacgatgttttatcaactccatgttatgcttgatgtcttcagcgtctttctcccacgtctcacgccagtaaccaaagaacgaaagtctgaaccaatttcaggacacatccaatcaatttgttcgaatacataattcatggcttttcaacgttaattaaagcatcacattcatatatcagtacatgacatggcaaaccacaaagccaaggttgccataatctaagctacgaccaaattacagaaatctttgcatttgcgaataaatgaccaagagagaatagattaaatcgcatgcactatttcagacacgtttggtattcacttccaaatatgagagtatgtactaaaccttaggagatatatgattgcgtccatattctaatacagaagtatatgatacttgcttcagataaaatctgacaaggagaacaaaagttcaaactcgtcataaaaaaatgtgtgcgtgttcggaagtaaaattataaaggtaccattttgccatcgttctgaaggagctaactctgttattgaatatctgatcctttttttcataaactcactaatacgtatgagctagctttgattgatcatcatcagctagaagtgaaattgtaagtcaatagtgaagataaatgatggtttagagagagagagagagagagagagagagagagggagagagagagggagggagggagagagagagagagagagagagagagagagagagagagagagagaggggagagggtggggtggggaagggggatgaactcaccaaaatatcccaactgcatacaaccatcaagggtcacgcattcgtgtgtgatagagagctagctaaagggctggcacaggcaacaaaatcaaggcagcaagtgccagaataatgggacatgatcacattcaacgacaagaaatatatagtattttccgagaattgcccatcctctgctagaaaaattcccatgttgagctattttgatctgaatccaaagaaactattaatcaaaaaagagaaggtgcagatttgcagttcactgggtacaaaagttagatgcacctctttaacatttagcagattgctctcgacatatgacaacaacttcccagtcaattgagctattgtcctttagaccctcaaacagctcctccttttgtgtatatatgccttcattatatatatgtctgaaaaaaaccaaacaaaagggggaaatttatgaacatccctgctagttggttattttacaaggcattggaaaaaataagaaaaaaaatatgatctactccatagtaatgacaccctgaaacaaacagatacaagaacaccaataaccgagcacatgggaaatcctaataattaaattgacaacacaaaaaagaaactaccaagaccacaggcagcaagcatgacttggagtgaagaaagctgctaacaacatagggcaggctcccatctgccaccagccggctcagattgcaccagcagcaagcatgttggagtatgcagcaacaatcatgaagcaggataggcttagttggtgatcttggggttggtgtggttgttcatcttgagctgaacaatacaaccataaaatgttagtcctactgctaggtatgaaaactcagttcaaatttttaagaaggtatcagatctatcacaactgagggttattaatagtagaaaatgtaagcagtgtcaactgtagagcagatttacaacatattaattcttgggctagctttaacatatgttatgcagatttacagagatgtagttcactaattaataacctgcaaatttttgtatttgtgcaatggccatctatgagaatttcaggatcgatatatcacgaacattgcttacataatcttcactgcatcgttccattttttattttcatccactctgaaacaatcaaggaccagattagttttgagactgcaagatccaaattagtttgctccaacatataatttgaatctttctgcttggtagcaacactctcaacttcccagcagttcatagccctagagtctatacatagtaattggatatttcattacattagcataaataacaacagagagaatcctgcaatcattagtataaataacaacataggggacatgacaatatgacattctcacttacagagaaatcaatttctggtaatacattggctaagcagcatttcgttgaacaccttttgggcaaaaaagagcattagtgatcctgcaatctgtaataaccctcgacactcacagtgatgattcttgacaaatgaatgggttgcaacgtaaagagaacgaaccaattaaccatgcgtcccttctccggcagaagttctgccggagggatcgtgctcggatggtaccgggggcatggagcgctggaggcgggcacaggtgtcacctctcccatggagcgggcgaggcggctgggaagcagattggcgaacctcgcccttggcaccgacctgggcgaggggcgagtgagggatcggcggcggcgttgatctgggcaaggacgaacaaccccgtcgcaccttgcacttcattctctccctcaacgcctggtagtgtcaccgcgcgcagccgtcgttggagtgaggtcttcaacatctcccatctgtcggctgttgtggcgtcgatgcagggtcagcgtccggtccccaatcggcggggtgtcgggcgacgagcggtggcgacgagcgtgtgaccttgagaggcggaggcgtgcgatggcgatctgcagtggatggatggaagcgggggtgcggccgacggcgagacgcggcggatggatggaggcggtgccgggggggggagtgttggggcgatagggcgggagggaccgggagagcaggcggcagaggaggaatggatcggtggtgcgaccggcggcgagacgcggcggatggatggaggcagtgccggcggggaggagtgcgataggaggagcggcgatgtcgacccgcgacgacggcggcgtcgattcgggcgagcaggagtggcggtcggtgaaggcgtggtgggggcgcggcgaaggatgaggggagcggcgtcgacggttggatagcgagcgcgatccggcctgtgggggagaaaagtgtgattcgcggaggggaggagtgcgtgcgatgggatcctcagcaccgtccgatctgccaatcccacggttaataagtcgcgtgtctgctagggttggagtgactgtcaccactacagaattttaaaaagtagtagagatacaccatgcatgcatatgatatcctgcaaattatatccaaaacatatgttttattaattcaaccgtagtaattttaagttattgttttttattttttacaaaattaagatatggttaacattgtggttctataaaaccttatgaccaaaatacccatgattatacgaacatgcctaacctcctatgtagggatggtaattgtgcccgtttgcccgtttatccgtgggtaaaaaccctattagggttggttttgttcgctattttatacccatgggttttttattgggtcaaaggctatgtccgatgggtaaatgggcataggtattgtcagggttacggatagggtataccctctacccttagatatacgttgtatactgatacggtatacccgcgcgtatacggatatttcccgtgtacattaaggaaattcatcacaagatagatgcggaatccacagatagaaggagtcctactcggacagaactgggtcgttcctgtatcgtgtggggtccgatgtctccgagttctacttagagaccaactgacctgcggtataaaagtgaccccccgggaggacctaaggcattgaatcttactgccaacacatccaccacagcctacgaagtcggagcctacaagagccaagttgccgggtgatctagtcgaaccaactcgactacggtctcgtcggtatcatcgagttctgctattccatttgtaatctgtggattccattatataatcccatatcaactggattagggctattacctattaaggagcctgaaccagtataatccttgtttcctgtttgcttgatgtcgtactacgtagatcctcgtaccagcgtaccccaataccctctatatccggtctacgggtatcccccgtcgacaggtatgggtaacactacgtatgcccgctttgcccatttacccgtgaaatctaacttatattgtaggctagaagcaaaatccactagaatacatcactactacaaaatcaatttttcatggcgtcactctatttttttctctggcggccatacgcataaaccgccattaaaaatatattgaggggtgaggggctaagtaccaccagcgaaaatagattttcactagcggccgagttaacttaaaatcgctcccaacctcacacttctccccaaccttatccgctcctctcccatccccatcccatcgctcctacccatctctgtctccgtgagcccttcctcctccgctcctctcctttccgccgccgccaccgcgcgctcttcctcctccgctcctctctcgcccaccaccgcgcgccctttcctcctccgctccactcccacccgtcgccgccaccgcgtgcccttcctcctgcactccgctcccacccgccaccaccgcgcgccgtcgacactcggcgaccacgacgacgacgccggccgagagagcggatccaccgccaactcaggatccggaggctcctcccctccctctgtaccctctccttctcccagatctagctggaagggagtggttggcgcagaggaggtgatgacgcggtggaggaagaggatgaaggggaggcgcggtggaggaaagggtggggtgtgccgatcagcgacgggggtacacgagagctctggatctgtcgggcggcggcggtgctcggcagtgcacgggtgtcagcggtggtcggcggtgcacgggcggagagacgtgcgagcagcagagctcggttgcgggaggcagatggcggatccggcggcgactcgttcaagtcctgcattggcaagttctccatcggcaagccattaggcaatccggcagccccaagtcctcggatcgacgacggcgtggagctccttcctccgtgacgagctgccgccgtggagctccgtcctccaccgccgtggagctccttccttcgcatcgagccgctgccgggagctcggagccttgggttcagcaaccgctgctgttcttctcgtggtgaggcaatgggtgatgcatgctgggattgaaacattttttttgttccgcaggatcgacagcatggttggcaaaattaattttgatttttgtgatggtgaaattgcactgtgaggccaacatatttgaatcgatgcttgaatttgtgattgtggacttgtatttgtgatttggtgagaagaagaggatgcttgaatttgtaattgagggcatatctgaatcggtttgaatttgagtttttgtatttttgcaccggagaatattttcgcaggcgatcctcttaagaatgcgcctgtgaaaattggttttcgcaggcggccttcttaagaacgcgcttgcgaaaaattgattttcgtaggcggctcttttaataacgcccttaaaaaattggttttcgcaggtggccctcttaagaacgcgcttgcaaaaattgattttcgcaagcggtattatgaccgcttgtgaaaaccaatgattctctggcctttacttactggcggggctgctcagccgccagcacaaacctctttttaccgccagcataaatgtttttttaagtagtgcataagctacgttctttgttttatgtggttttctttttatttcccttattatttttctcccacttcctctatcaccgccagaggagagaccccacaccaaggcagagaatatttaatgttttcagttcgattcaaacttagaagcttgtagacttttgtttcactgattttgttgtagccggtaaacgggcacgcccgcgagcgatgggcatgggcaacaatctttgcccgtcatgtagtaacgggcatacctacgggcaagggtatgggtaggcactgcccgtgcccgtcgcacccgattgccatccctactcctatggttttttgcaacttaaggtttgtttgtatgactaccgtcaagtgttgggtagtaccaaattaaacataggcaagtttggcactaccaattgtttgattgggtaattttgtatttagtttatagtgaagaaagttctagactgctaccaaaattagtatgggtgctaccaaaagtattggcttcaatccaaattaaccaatagtagaacaaattttggtagcaattcaaaactgcccttaaagcataatactggggttttgtaaaaattatttatttcttattttcaccctcgacttaacaagaaataacgaagcggtgacgataacaagtcaaacaggatagcaatttgcttagcttggtgtggcccagtagtttagtttggagttgaaacgatgatagcgaagtgtaaaaggcggtttggatttctcggattttccttctgtgcagcttagcccttttaattagaacaggtcaagcaaaactttgagcctttcgttctgtgagactgatagactacgaccctgtttggatcagggcacatcgaatgcttaacactaattaaaaatattaaacatatactaatgataaaacccaggactaattcgcgagacgaatctattaagcctaattaatctatgattagcctatgtaatactacagtaaacatgtgttggctatggattaattaggcttaaaaaatttatctcgcgaattagctctcatttatataattttattattatacttctaattagtatttaaacattcgatgtgacagcgactaaaatttaattcctagatccaaacaccacctaactacgccatgatttggatttcatgacatgcaccaaggacacacattggtggatccatgtacatgattccgcacgtgtagaaactatagaacagattttctgagctaaacgtagcatccatgattttcacatatatagaccagcaagttaatgttacttgtcaatttcatgaaacttcaataccagttattatgattcttttgctaatttatttttgagataatccaagaaatatcattgacaaacatccaaatccaagaaatatcattgacaagtgtaagttttaagatatgctatcgtacaaacgactttgtctaaaaatgccatcgccgttaggttccgttcattccgcgccgttaaatactataggatgaacaatgcatttaacgacgtggattggatggaaccctaacggtgatggtatttttaggataaagtcgtatgtacgatggtattttttggaactcacacttgtcgatgacgttttctagatttggacgcttgttaattatatttctttattaatttataaaaccaataatctgggatgatggcgtgggtcccttcctcttccccttcagatgttgattcaatcttccacttcccctttatacgttgattcagcagtaacattttatgatttaatttctgtgatttgtttttagtttttggaggctgcgtttgtttcagcctgttactaatctctctccctcgttttccacgtacatgattttcaaaccgctaaacagtgtattttttaaaaaaaagtttctatacgaagattgcttaaaaaatcaaattaatctatttttaaaaaaatagtaatacttaattaatcacgcgccaaagaactagtctgttttccgtacagaggagatgggttactaacccagtaacgaacacagcctaagacttgaatggagtgtgtagaccggatgatgggggtcggcgccatgcaaattggctccaaagtttaagagcaaggataacaatagatctgacggcttattattagccaatcttaaaaccaatatatataatagattagctataagattggctacaattttcttctcccatctctatcttttacttatacatttattgtatttgtcttggagtttgtgttaagctagctcttgcattagagccaacacctttgatttttttatctctcctccatataagcttagagcaagtttaataatatagcccactactagctacaaatcatctatagccaatgtaatagccaattcatacaatagttactcactatactattaatatctagtcccacctatcatacacacattatgtcttggagtctgtgctgcagctggctacagatctgtagcccgctgatcttctctctcttcctttatctcttgaaaatatgtttatagctagcttatagcctgctattgtacctgctcttacagtaggtttgttcccaactccctactctcgttttccgcgcgcacgcttttcaaactgctaaacggtatatttttttaaaaaaagtttatatacgaaagttgcttaaaaaatcatattatctattttttaaaaaaaatagcaaatacttaattaatcatattttaatggaccgctctgttttccgtgtttactgtttgtgttgagaacatgttcgtgtgaacacaccctaaagactcagtgccaagttttgatcaatttatataataagcatgtgtttggtttggggacgaagtgggatgtgttgggttcatccctattttctggaatatgatggttctattttttgtttggttagagggatggagcgcaccctattttttgttttgttagagggatggagtgagatggaatggtcccatcacctgtttggatagagggataaggtgggatatctggataaaaatacttcctcaactagaattggtgaggttacttctcacatgaacaatatatttttagcacctacaaaaatttaataaactctcacacaaaaaatacattcgtagcagccccaaaaatttaacaaaaagataaatatgttgccatatcatgctcaagcactaattaatcatctcatcacaaattacttgcacacatcacaaactaattcttgctcacatgaaaaaaatgtctactgaaagaacatgtacagatctgaaacgaaatccccatccaatgctgtcgttgggattctaggaggattggagaaggaacatcacgcatgctgctgacattggaggccgacggcggatggaggctggttggacaccgccgtggccgccgacggctcacccctgctcgcgtgctcctgtcaaatgagtttccgcaaaaggtctcgaataaaaaaaatccagagtcagcagtcagcactcgggtaacgcaatcgacaagggttgagctagttccaagcaagtgtttccttcaacttctctcttcttttttttttttgaactgctgagattgtgttttcttgcacggatcctggtactatttggacagacgcaggcaggggaaccttgaagtcttccccggcacagaggatcgggtgtgtttcggggggcaacaaggtggcgtggcgtggcccccacatccagcctagaagtagaaggccgcgagacatcctggcctgacctcaaaagcagctccccccctccccagtctctcatccgctctaccgtgcgcgagcgagaattttaaaataacataactttaataaaaaaaatataaaaatacattttgattgattaaaaaaacacaaatttagcaccttatcaaataatcaatatctattgaacaatcattattcgatttgtatttatcaaacaacgattgttcaacaggttagggtggtctaccgaactcgataggacccacagcccacacgcatgcatgcacacacatcgaattctctatttttttaaactctatcgaacaatgtttgtttgacacggttattcgataaggtgttaaatttatgattttagttaataaacatttatttttataatcttccattaaagatgtactatttcaaaaagaaagaaagttccgagcgtgatgcggctctcgtgtggctggactgggacggcaggcagcggctggccacacgagctccgccacacgatgccgcggaccggaggggcagtctcgtccactcggtggacgggcggtgcgctctcgcgcgtcacgccgcgaaaaaccaacgctgcacgctatatagactatagccggttgctgacggcggctggtggtgtggccgaaagcgtgccggccacacgggcaaatagccatattacaataggggaggaggaggaaaaaaaaagaaactatatgctctgctttgagctttctggtggttgatggtcagttggtcacacaagaaaaaattgcaacttgagtcctcccatctctaaccgtttttcctttttcttccttttttctgcgtttcatttgctgtcatgagtcctgacaccctcctatatggaaaaaataagaagagtcttgacaccctggtcctatgaagctgtgctcgtactcctgtggcgtagacatgcaggtgcatgtggtaatgtgggataaagggcctgttcggctgtctggtacagccactgtacgtagctgttgctgctacagcagcagactcaacttactgtttgggttggctgcacaacaataaagttaagtgcagccgaataggcccataatccttgagaacgttagaaaccatgcaggaagcccattaaaaaaataatgaggtttcctataatttcgtatgttttgtttaagttccacacaaccccaagatcctatggccctctttgaaatggaaggattgtcaaaataattttagaggatttatttttctaaggatttttttaataaaatcctttgattcataggaagatgatatgaaaattttcgtaggattgttttcaccaattctttagggaaatgagcaagtgactagacctcttgtgatatttttatttggttgatttttttctatggtacaatcaactggctcatctttccgattattgtgttctcaattactataggattataaaacatacttcctccgttttatattataagactttctagcattattctcattcgtatgtctagattaattaacatctactccttccgtcccacaatataagggattttgagtttttgcttgcaacatttaaccactcgtcttattcaaatttttttctccaaatataaaaaacaaaaagttatgcttaaaatactgtagataataaagtaagtcacaaataaaataaataataatttcaaatttttttgaataagacgagtggtcaaacattgcaagcaaaaactcaaaatcccttatattatgggacggagggagtatatgaatatgagcaatgttagaaagtcttatagtaatatgaaagggaggaagtattattttaattcaaatgttttttctgttcctatgtgttttttcacctgtgtttcaaaaggggacttaaattactttttatggcaacctatgttattgaaatgtcgggcacagaacattttcagtgtaggagaaaataaccattttttcttgaggaccaataccaggggagtgaaacttgatatagttattgaagttcagagtcatcattactgaccggtcatctttatgattttgaattttatatggataatgaaaaagactagaagggcaatactaatatatatagagttaaaaaaagagaacaaaatattggaacatcactttgaattctacacaaacctatattttgtgcttaacataacattaatatcgagtgcatctttttctcttcacatgctagtgttttgtgagcgggcaaacgttgttccgaggaagtaacgcttaagccatcaataaaaactattttcacatacaatgttttaactgttaatccctctctttttaatcaccatcacatattatattatacatccccctcctatttgaagaagaagtacatacctacaaaaatgtttagtaaccttccgattgacaccctttatttattttcttttcaatcataaggactaaaacgaaaatgccaagaggaaaaaaagtgaaattccgagaagtacaagcccttgaagcgaaaagcgcaggtattttagctgccttgctccaagagagcagaattcctcggttctttcaaaacgcaagggaactaaaaacgaaacaacctgtaattaccatttctgtccctttcccctcccctccacgactccgccgccgccgccgccgccgccgccgccgtcatcgccgccgtcgccgacgacgaagccgacacagagccacacggcggcgcgctcgaagcaatcgaaccaacaagcagccgcgtcgaatcgcataggaggaagagagaagttgggggcagcaaccaacagctaggggtgggtaggtggtggtggcaaagcagcgggggtagcgggaggagaccggggcggcgggcgcgcgcggtgccctcgggagctagcccttggccccgccgcctgcgccgtcgcgccgatctccatcgccaccggcgagcagcggcgccgggggcgtcccgctgctgcttccgccgcgtgctctgagcgtctgattcccctcggccccgcggctcccgtctcctcgcgagctcgtctgcccgccgcctgcgccgatctccatccatcgcgagcagcggtgccgccgccgtcgtcatggtgagcaccccgtaccgacgcgcatcctcttcctttctcatctccatctcgttctacgcacacttttctcgaattcgcgttatccatatcttctcttctagatctgggactggaagctaggttttctatttgtcttaactttagtacgaaaacagcattttttccccaaaacaaaaagttaggggttcaactgaaattgctcatagtagttccatcattacttggtactactacacaatttttcattgctctcactgtagtgtagttacaaattgtttagctgcctagtttgccaccttacgagaaacctggactcatgcaaaattgggatagagcaacttggtttggagctttggatagtagtaacttggtaggtgaaatggctcctgcgagtgacatggatgacaacaatggttagctattatttgcggagaaattgattgtgcaataatgtgaaggacgcggaataagatgtttgcttatagcttcgtgtgaagcatggtattgtgttttacttttggtgtgcttgttgaagtttgctaggtgatgtttgaaatggaaccgtgccctttcatatgcattatgagcagtttttaggtcccgagtcctgacacaactttctgaactcgaatatttattcgaaaagctctaactaaaacaatttgaggagactgatattttcatgtttttgaaccaactagctaggattaagcttaaatattactgaaactctgcaaaacttaaatactaaggttttgaagcaactagtaaggaaatgctattatactttgcaaaacttataaatactgaggttttgaaagaactagtaaggaaacactattatactttgcaaaacttaaataccaaggtttttatatcatgaattcatgatactctgataccgcaaaagacaaatactaaggttttcaagccttaacaagtttgcacatcacaaaactgattttgacatattgcatggtaagtggactagtggagtgaatgttagcctgatgttttagtgctctgatttttgaatcttatcaatcttctagatgagaccccgtgtttttgctgtgggaaaattgcatgataaaatggtaggcataatgagcgaagtcggaattttcttgttaccaaatggtttatttcatgtgctttgtacgataagaacctttaatcatttctccaaaggctatacataattgatatgcatggtgtggaaaagagagacaatttgtaccttagaacaatcacctaaaatactatgaaaacaattgaggtaatgtgtctacatgagagatgagagaattagcacttactacagttagtgggaggcaactatgtaagtataggatacaatcattggaggaattgttaactaaaattcacctgcgagatctactatgaatccacctatgacctacacgttggaggaaaaaaaaagaagaggacatcgaatcactcattccactaaagcaaatcctgtgtttacctttcggctaaaatccctatttcttgaaaagccttttaatgatatgtcatatgacgtattcgtcaaccctgagtgtctgatgcttggtaaagttggcagcgatacgtcatggacgtctcctttttatcctctgtcatgtccaacatacttatgcatattctcagttgtcagttatatatgacaatttcgcaagatgtaacacaaccctctgcatgagaatgagggaggagtattagatcatccatcaaagccttaaattattcttagttctgttttatctaggcatctgtttgattactgcaccatgtgttttgcaggggactcctgttaatattattgttggttctcatgtttgggtcgaggacccaattctagcctggatagatggagaggttgttagcataaaagacaatgaagttcatgtgcagacttcaaatgggaaaaaggtacagtttgcagtttcttatcttgcattctgcagatcatctctttctagttcttagtatttccttaaaatccttcaatggatctattttgctctgttttaatgtacaaggagaacttcgcaatactgtttgtttagttatttatatgtggcttcattgtaaccatggattgtatcattttgacataaaatggattacgagtttcatcacaagtaatgcttttgcacaggttaagacaaataaatcaaaagttttccccaaggatatggaagctccaccaggaggagtggacgatatgacaagattatcatacttacatgaacctggtgttctacagaatcttgctacccgttatgagctaaatgaaatatatgtgagtgccttatcatttctgcccaaaatcttactttagatgcactacatgactagcgcatgattatcattctgttgcattcccagacttacactggcagcattttgattgcggtaaacccatttcaaagattgccacatctctatgatacccatatgatggaacaatacaaaggtgcagattttggggagctgagtcctcatgtcttcgcagttgcagatgttgcttacaggtgaactgttgtataatattgatattgccatatatatgatcctgtcagcagattgtactttttatatacctacatttccctgatatgacctattaatgcgagcaaccagagcaatgataaatgaagggaaaagcaactctatattggtcagtggtgaaagtggtgctggcaagaccgaaacaacaaagatgcttatgagatatctggcacacttaggtgggcgatcaggagtagaaggaagaactgtagaacagcaagttctagaggcaattcattagccttctctttgtctgcatagtaatttatttttcaaataaaaaaaattccgttggctgattacctaataactgatataatttcagtcaaacccagttcttgaagcttttggtaatgcaaagactgtgcggaacaataactcgaggtaagttaaccttgttgctttcattttcttttcctttcattgacacttcttgctttatttggacatcaccaattggttttttgacatcctcatttgctttacgattctggtaaagtcgctttggtaagtttgttgagatccaattcgacaagactggacgcatttcaggagctgctatcagaacttacttgctggaaagatcccgtgtatgccaaataaatactccagagagaaattatcattgcttttatttcctttgtgctgcacccccagaggtatgttttcctgttgatttactgatatttgtctgatattaatctctgtttcgaacgtggaactgaatgtagcctaaagggtattctttactatggatatacatatgcaggatacacaaggtataagttggccgatgctagatcctttcattacctcaatcagtcaagctgtattgaagtagaaggaattaatgatgctgaagaatatttagcaacaagaagggccatggacatagttggaatcaatgaggaagagcaggtttgtattgtattgtgctgaaggcctgaagctgttggaaatactagtttgaggactaatggtaaatacgtaattaccaaattgtattacaggaagctatattcagggttgtagctgctatacttcatcttggaaatataaattttgctaagggaacagaaattgattcatctgtgatcaaggatgacaaatccaggttccaccttaacactgcagcagaactgttgaagtgagtaaatttcttcttttattattttcctatatgttcagggtgaccaaaaatcatattgctaacgactaaaatttcttaaaggtgtgattgcgataatctggaaaaagcactgataacacgagtaatagttactcctgaagaaattataactagaacacttgatcctgcttctgcacttgttagcagagatgcattagcaaaaacaatatactcccgattatttgattggtaatgatcctttccctttgccctggcagaaaaactcaattagatttcaactatgcatcttgacatttccccactattactgttatcttcttctcaggattgtggagaagatcaatgtctccattggacaggacccaaactcaaaacagttgattggtgttcttgatatatatggttttgagagtttcaaaattaacaggttagtgttttgcacctttttcaaactaggccaaaaatccatttcataacatacgctaaaacagcaacgtgttgcactcctctaaacagttttgagcagttgtgcatcaattatacaaatgaaaagctgcaacaacattttaaccaggtacatcttgaatttgttcttgaaagagggctttgctctagagattgctggtttgtgtctaacgtgagatgtttgtcctgcagcatgtgttcaaaatggaacaagaagaatacaccagagaggagataaactggagttacatagagtttgttgataatcaagatgtgttagacttgattgagaaggtacacatttcatcatatcttacatgctatgagatggcatattttggctatgcaaatgtataccaaaatcccttagattatggggcggatgtagtataatataagctcttcaaaagaatatatattacaagctaaatttatctagttccactataagcttttcggaatattagatgaagagatgggataaaatttcccaaaaaaacctattctcatcctacaaatgatggttgggcaacaaggcttgttcagctgttcctatggggttatatctgcagtactattcctgccaataatagtgtcagtaattataaatcagtaagaaaatgatccaatttgtgttctcattttgaaatgattatcatgtaggctcctagtctgtttgatgtttgctgctcgagatagcttaacttaggctagaggaaaatctgttttgtaagttttgaaccttcagggccctaccatctgggagtttactgatttcatggattaattaaattaatctgtttatttggtgttatgtccttaggttgtaggtctttttggtaacattgtacttgcagtgcatataatgtttcaacagacttgtgtcagatagtatgtggttggtagaagaaagtctcctagctataatgagctttacagattcccttcatacgtgcgatgcttctagttctaggatgagctaaggcttgtccagacagcatattgcttgttagtatttgattgtggaaattggaaacaacatattgcttgtaataaccttttattttggagttctataaaatggcaataacatatgtttccgtactcgcagaaaggtggtttgatcgcacttctggatgaagcatggtatgttctggaattcacaactatcattccaaaccacttgcaagcaacatatatatcttcaatcactataacatctggatcaattgtagattatctcaatcctgtgacatgtaactgcttgcgaattaataatgttttgcaaattttgttcgcagtatgtttcctagatcgacacatgagacgtttgcgcagaagttgtatacaacatttaagaataacaaacggtttgccaaaccgaagctttcacgcacagattttacaattgttcattatgctggtgatgtaagccttcttcattaaaacatatgtgtattgttacagaaggtaaccatcatactaattagacatcgttatgtatcatccacaggtgacgtaccaggctgattttttcctagacaagaacaaagattatgtagtggctgaacatcaggatttgctgaatgcttcttcttgtcctttcgtagctgctttatttcctgcactccctgaagagactgcaaaatcttcaaaattttcatcaatcgggtcacgtttcaaggtgaaactttacttgattttgttctagcttccacaatatggttggaaaaatttgtagtagcatacaccttacttatttacacatcctaccttgtttgtagccttaaaatggtaccaatgtatcgtatcagaagttatctagttaatacgtgcatcctttttaaatgttatgtactacgtatgtcgctgcatcagtgttattcaaaattcctagcatgtgagttctcacatatccttctgaccttcccttcgtactctcctttggttgccataatggcggcgtatgacaacactgttgctcacttcctcctgctatacatagtgacatagtcattaggtctgcatgtatatcgtacagaaaaaaaatggtgttgttacatctgtaaagattgctcaagtcttcactaattatatttataacctctagcaacttagcaagtcaaacaaggcggtccctctgtctcaaaatgtaagttatcgtgcagtcaaacttctgattcatgtaaaagtatatatagattcgctgcatgctaatgataccattcaatttgtcttcctaaataatttcatgtgataatataaatatgattaaaattcagtgcagaagtcttgctttatttctatctgggaaagtatatcttgtttacagtgctgctgaccttttttgtgtttacattcctgctgtccaactctcagctgcaacttcaatctctcatggagaccttgagctcaacagaaccccattatattagatgtgtgaagccaaataacctcctaaagccagccatttttgagaacacaaatgttatacaacaactgcgatgcggagtaagattcacatgttctattattgtttttatgctagcttctggtgaactaatcctgacaaaatgcagggtgttcttgaagctatcaggatcagctgtgctggatatcccacaaggaaaacattctatgaatttgttaatcgctttggtgttcttgctcctgaagttctagaaggaaggtaagaaatccagttgaatagaaaacatagttttttgttgcataagttttttttttttgatgtttcaagctattcacttttatcttgttcttgtacctagcaatgatgataaaattgcatgccagaagattttggaaaaaatggggctggagaactaccaggtaatacatgcaactaggccaaatgcccatggtgtatacatgagtttgcgccattgtgttaacagaatcagtgaaagcaatgtttgaaaaagatgcatgctgtgtatacacgttttgaggttttattgttgtcgtctttgggttagctcttacataatctcttgattgtctttcagatcggaaaaacaaaggtatttctgagagctggacagatggctgatctggatgcacgaagagcagaagtgctaggaagagcagcaagaattatacagagacaaatctctacatatatcgcacggaaacagtttgtttcgctcagaagatcagcaacacagctacaatctttcgttagaggtactcctccccttctgtataatgcagtttctgcagcactggacagattttatgcagctgtccttttccctttttttttttgtaatctagggaccttggcgcgtaaattatacgaatgcatgaggcgggaagcatcagcagtgaagatacaaaagaatgttcgtcgtcacaaagctcgcgtgtcttatttacaactacaggaggctgcaatcacgttgcagacaggattaagggcaatgtctgcccgcaaagagttcagattcagaaaggaaactaaagcagctgtccatatccaagtatgtacggtttcaattacattgttttgtaatagtatttcatcaattttacaaattatgccatggcttgagaagtttaggtccatcatgtttctgttctatttgtagttttcctttgttgttgttaaaacacttattgtaatattttttgatgaaacacattgtaatattgtgttatggcatttttaaacataggctcgatggcgttgccacagagactatgcacattacaagaatctgcaaggagcagctcttacttatcagtgtgcatggagacaaaggcttgcaagaagagagcttagaaagctaaaaatggtagcttgttatccctttgcaatcttcaaatattctttaccatagtatatgtcatagttgtgtttatccatgaatcgtctgcaggctgcgagagaaacaggggcccttaaggaggccaaggataaacttgagaagcgtgttgaagaactgacatggcgccttggactggagaagcggttaagggtatgttgaggctgacgtgacactatttgggcttggtagtttggtacttgatgcttaagtgtaacattctcaatttgcagactgaccttgaggaagcaaaagcccaggaaattgctaagctgcaagagacattgcatgatatgcaacagcaagttgaagaagcaaaggctatgattgttaaggaaagagaagcagctagaaaggcaatagaagaggcacctccagtaatcaaagagacccctgtattggtcgaagacacggaaaagattaactcactgacagcagaggttgaacaactgaaggtatggtagaatctgaaagtggttcctagtagttggtgcatgcataaatacagccttatttttacactgatcttttaatgaaatgatctttagctgaggcatttttcattgacaacaatattagcttgccttgtgaaaatttgcaaggtttatgccatacttttgcttatcttatgaaggaaatgttattaagtgtttagtgaaaaagaggtcatgtggtttttgttatgtgtgctaagtttgaagaaatccctatacgcttagaaatcccatttccacaatttgccaccctcttcagaaaaagactgatggtagtagtggaccctgtgtatttggaattcaaaatatatgttttttgtatagttgaacttacgtcaagtttgaagaaatccctatacgcttagaaatcccgtttccacaatttgccaccctcttcagaaaaagactgatggtagtagtggaccctgtgtatttggaattcaaaatatatgtttgttgtatagttgaacttacgtctgactgtgatgttttcaggctttgctgcaaacagaaaggcaagcaacagaaactgcaaagaaagaatatgctgaagctgaacggagaaatgaagaactaatcaagaaatttgaaggtgcagagaaaaagattgagcaacttcaggatactgtccagaggtgaagtctaaacaacgctatcagttgtcattatttcatttcgttgtttgtaatgcttttcttttgttaaggatgatgcctctgtttatacttgtattaactcctttttcttcattctgaatggtctttatgtaaaattgagcacaggctggaagagaaagcaactaacatggagtctgagaacaaagtgctacgtcaacaggctgttgctatttctcctacggcaaaatcattagctgcatatcctaagtctcccttccaagtattccatgaccctgactacttgcattctgtattaatataattcttttcaaatttcacattgatggtctaatatttcaaatcaattgtgctttgttagcttaaaactccggagaatggtgtagctccgtatggagaagtgaaaccgttacctgtaagtggaaagaataatttgtgcatttgatattcattcaaaagttgctgatatttggtatctctgcataggatatcacccctatctcactcaaccctaaagagcctgagactgaggagaagccacaaaaatcactcaacgagaagcaacaggtgtgtttttctgtttgtttgacatttctgtcctgaagcaaatttcacacctctgtttatttgaccctgaagttatgactattgtgagttatttttcatactgtatttgttttatgcttcaggaaaaccaagatatgctgatcaaatgtgtatcacaagatctaggtttctccagtgggaggcccattgctgcttgccttatatacagatgccttctgcattggagatcatttgaagttgaaaggactggtgtttttgaccgtataattcaaacaataggcactgctatagaggtaataaataatatattgcttgtccattccgctttacctcctttttcttggaagttggaaagctgcatatgatattctgtttgcctattacagatatcttaggcttttgctgtagaaattgaaaaacagaaatactggagcttaaaatttttaatgctgctataactcgcaccctccgtccccccaaaaaaaacaacttctggggatactgtcagattcatccccagaagttgtccttttttgggatggatggagtatagattaaaattcgtttacccttaatgttttttatatccttaatttgctatatagctaagtttaaattcttactttccaaaggcccaggaaaataacgacaaactagcatattggctctccaattcatccacattactcctactattacaacgaacactgaaaacaactggagcagctggactcacacctcagaggcgaagatcttctgctgcatcatttgggcgggtgttctcggtaaaacatatttcatctctgtttgttttactcttaggattttctagtccgaatatcttttaattcaccatttctgaaattaaaagggaatgagagcttcaccacagagtgctggccgtccttttctggctagccgcttgatgggaggaataggtgatcttcgtcaagttgaagccaagtatcctgctctgcttttcaagcagcagcttacagctttccttgagaaaatctatggcatgataagagacaacttgaagaaggaaatatccccattacttggtctttgcatccaggtatgaattgggggcactagcttggtatttgtttataaaaagagagtgaacttcaggtttgttttttttgtgatgcttattttttgcaggcgccgagaacatctcgtgctagtctaattaaagatctcgttctcaagcgaatgccttggcccaacaaaccctgattgcccattggcagagcattgtgaaaattctaacgaactacttgaatgttctgaaagccaattatgtacgtaagcaatgtgttctcacatacaattttgattgagttgacattaacttgtgctgtattaaatgtgcaacaggtcccttcattcttaatcagcaaggtgttcactcaaatcttctcatttattaatgttcagttgtttaacaggtaagatttggtttttgctttacctgttctacgtactctccttctgttgggattttgagatgctccttatcttgtagtctgcttcttcgacgagagtgctgttcatttagcaatggagaatatgtcaaagctggactggcagaattagagcagtggtgtatttatgcgactgaggaggtatttatggaccttttaagtttcctggagatcattttaatcttgtgctaacatacgcattaatatacagtatgcaggttcttcctgggaagaattgaagcatattaggcaggctgttggattccttgtaggtgttctataccgattatttgttttgtttttgattttctggatcaaaataggataatctaactggttgtattattaggtaattcatcaaaa

SEQ ID NO: 7885 - DNA, 17928 bp, Oryza sativa
aaaatcccttatatttagggacggagggagtattataactaaaaagtaagatattgataatatatcacaagaacgtaaatatacattactattacattgcatacagtatgcaatgaggataaaaaaagaacttgggatacaaatgactcagattgaattgcaagcatcaactaaatcaattctatgctgaattgcaacaagcagaacctttcaaccacatcccatcccaatttaccccaatctgattaatcatggttttggtttgatcatgttttgtggatagatctcttcttttaagtagctaatatcatatggatgatataatataatcataggcaactgtttgtgtgtcacgatttcttgaaggttgtgctatactacacatgtgcataattgggtgtgttgactcttcaatcagatataactgactaaatttcaatggctgataggtttgaaatctgcaacattaatttttaacgtgaggcttcttaatttcacaggtttcttacattgaaaaaccttgcgtctgtttttcttcaacaagggtcagcattttatgataatgctcttcgttgttacctacaagctgtagagcttgatgcaaatgattcagttgtatggaaccatctgggaacactttcctgctctatgggtttgttgagcacatcaagatgggcatttgagcaagggcttctatgtagcccaaataattgtatgatgtcttttttcattattcccttctagtttattcccactgccttttagttcatctattgttcctaaaatccatgatttttttctggttttcagggaactgcatggagaaactcttggaggtgcttatagctatctgtgatgaagttgcatgcctttctgtagcaaagttaatacttaggagttggccatcacatcatcgggctttacatgtaaagaagaccattgaggatgcagaaccagtaccctttgcacctcgaggtatcgacatacttgaacccaagcatgcaaaactcaaattttgtaacaaaagaaaatctggagatgatgaaacgcatcatgaaacagtgacaaagaagagtaggcagaatgctaaattgcagttgactgaagccaaatggatggcccttttagatggtatcctaagcttcttaagttcaaacaacacaaaatctaatgaagatcacggtgccaatacagagagtcaatgtgatactaagaggagtatcaatgggtttgcttataacatgatggatgtctccttatctacggaaacattgaaaactatggaatctgcaggtgggaatgaacatgatttgtaccatgatggtgaaagtgtgctgtctcatgactgcagaactgcagttaaagagaaggacaccaattcagatagagaacatcctcatgaaaggagaagcacacgtcttgagaggctgcgaagtcgtaaatctggtaaagatgaacatgaatccaatggaaaagatatatcacatgctataactcaatttctagattcatttatcttgaagcgcacaagtattccagaaaagatcgattgttctggaaatggtgatgcttctacccctgaagctctaacatatacacctgatcgtgaggcaagtgatgtgaagcaatttctttccaaaatatcaaaaaattgtggacctcttcatattggctatatgttacttgaggaaatagctcagaccaacataccttttcaagattactttgttaagttcattgaactagacaaaattactagaggctgggctcaagatagatctgcacaatgcagcttatttcttgctgaattatactatgatcaagctctttgttctggaagcccattagcatcctcagagttgtccaattcatcttaccatctttgtaaggtcatccaatcagtagctttggaattgccattcagaacctctgatggagcagcaaagtccaccaatttggatttgaatatggaaagccatatggaagaggtgtgttcaagcgataaaactgagaagaatgcctcaaatatgtccagaaactctgtaaattctgtcaactcggtttccagtaacattctttgtgatgaaacatctgaatgtgattcttcttcaaacactaattgtgttttctggattcgcttcttctggctgagtggttgtctgtccctttcatcagactgcaaagaaaaagcttacaaggagttcaacattgccctgtcacttatgagaagtagcaacgaagccaaaatcaatagagagtttgtccttctacctcacaataagcttgtaaaattgcttacagctgataggattcttcgtgaaattaacttggtcaagcttgaatctttactttggcataatgatgaaaacatcaataaaataactcatacagagttcatggaattgcttcctccacttttgctttccaccaaagatgtctatgttggcagtgcatatggtccaccaagagaaagtgagaaagttatttcactagagttaggtgccttggatgttttaatatcagcatgtgaaaatgctaaaccaatgaacatccaggtataccttgactctcatcgaaggaaaatgcaagttctaactgtggcagctggcatggttggatcggttaccaccaatgaggggaaaaaatcaagtgatatagagtttatggaaacaatgaataggaatcgactggaaagtgttgtagaagcagtcaaagatgtttctcgaaatgctagtaaagcgaaagcctttgttgatcagtgtgataaccctgtaagttgactgttctattttctgtggattttcttgactgtcattttaattcaagtctttcatacttggaacgctatctaccaagcttcacttttatattataggtcaatgcacaacactgcaccagactaaaagaatattagaaacaaggtataaaggaagaagtatgtgtggagctaaatgataatttcataaaattccgtaggtctatataagttggtgaagctgcatagaacagtggaggaggaggaagggaggaaacttaaatattcttattttatttattttgtggagaataggcaggagaactgtgtatcattgcggttagaagtgagctaggctcaagtatagggacacaccgctaagctaccagagagaaaaatgcacacaaaaaagaagctaggtatacaatttaagaattggtatattggtgactgccaaacttttttttactttgaccatttactcattagaaatatttgtattgcatgctcattgagtgctgtgaaaaataacctctatctatgattttaggcttttagtaacatatggtaataaataagtatcttgcagacagtataaaggaaattttcatgtttattttttgaacaaaggaatagataatactatgaataccataaatgatcacagggaattacaatatgtagaattgtatagcatgtcagaggtaaatcttttgagcttctctggaacatcaactcgcccccgagctatctaatatacaatttaacccttaaggatggttgttagggtaaaggttatgctgtgcattctaggatggtttgtactgtccttcctgactgtttactgctttatgtggaagttgtttatcaatggtgtgttccagtttagcttaacactaatgctatccagcatgagtgaaattagtatatgagcaattgtaagacgcccattattctgagatttttcaatttcatatttgtttctatattgcctgtatcagtttctttaatctatcaggctgaatatctatatttctaacaatctcggggatattattattgattaattcctcaaagagggctactgaaacgactgttttattgtcatatttgcaggatgggcaagacggtttcagttcactagtttctattgttggtgattttcaatcattgctcctcacaatcatgtgtgctgctgttaagatgatcctatccagaaaacactcgtgtactggaacctcctatcaggctgaccagttggagagttcctgccttgttgatgcagccatcgcattttgcaaacttcagcatcttgatcctatgatatctatcaaaattcaggcacgttctgcgcaccactttaccaaaaaactctctagtattgattttcatgattaactttagttgcttttgttcacatatgattctttgcaggttgacttgattgtggcagtgcatgatttgcttgctgaatatgggctctgctgtgctgggcgtgatggtgaaggggaggaagggacattcctcaagttcactatcaagcatctcatggcactagatgtgaaactaaaatcccaacttagtaggtgtttcctagcaaatttattatggtatcatgtttctgtcccaattaattactagaatttgtttattatctctatcttattgttagatccaaatgggatggaagaagatgcagcagaaaatgacagagcagaagatgttacgactgatgaggcatctgtttgtgacaataaacataattctgaggatgaggaagaatctggtaggccatattcattgcgtgtaactattccattttcctatatatcttgtggtagacatgatgtacaatgacagacaatactgtctgattatgtcgcatgcatattgacttactgacacgtaaatgcctggtgatatagtcaaattagaatccgacaaatgattgaataaggtttctgttaccgacttaccattgaccctgaaattctctgtttttgcagaattggatgaaatacagtcaagcattgacagtgccttggaccaggcctttttctgcttatatggtttgaagataaaccctgattcttgcagtgaagatgatttagcagtacacaaaaatacaagccgtggtgattatcagacaaaagaacaatgtgctgatgtgtttcaatatgtcctgccatatgcaaaagctctatctgtgagtaaattcatattgagttccttcattttgttgtttcagtttggtaagaagcatcaattgcagcgcatagtgccttggtcattctttattcattttcttcagaaaactggcttggttaaattacgaagagtgctgcgagctatacgtaaacactttccacagccaccttatgacttattggtcaataatcctcttgacaatttcttggatggacctgattcatgcgaaaagattctctctgaaatttacgaaactaatggatctaaggaagctgtcctgaatgtactgttcccaggtgaaaatggctacgaagcattcaagaaactgtccaatgctaggttggctttgtgcattgtacctatagtccctcctctccttttatttttcttttgcactggaacaagtttagttgtggatataccctaagtacatttttgactgattgctgcagctcagagccatactcagaagtttatgggaacctgtatcactacatagcgcaagttgaagatataagtgcctctgacaagtatacaggttttgtgttaaaaaaagaagggggtgaatttgttcaacagagtgctaaccttttcaagtacgatctactgtataacccattgcggttcgaaagctggcagaagcttgctaatctgtatgatgaggtatgtttatttggttacagcagttgattgaacctgttccattgtatcatgcatttctgttgcataacaagtttttgtcttgttcaaaaacaggaggttgacttgttgctgaacgatggtagtaaacatattagcattttggactggcgaacaaatacaactttaatccaaagagttgagatgggtcgtagacatagtcgacgctgcctattgatgagtttagcattggctaaaaccgcttctgataaggtgtgtcctcttgttctgtactcatctatgagatgccttaggtgctatttttcttctttctatcttgatgagaacttcactaatattggcaatgacgtctaactcattttctttcaggcccaaatgcatgaaatgttggccctagtttattatgatagcctgcaaaatgtggtacccttttatgatcaaagggctactttgccagtgaaggattcaacatgggagacattttgtcgaaattctatgaagcactttcagaaggcgtttgaactgaagtaatcttacataccttgttagtaatctcatattctgtgtgttgtttgccacaagtaggatgataatgcttatttccttcacagggctgagtggctctatgcattttaccttgggaagttgtgtgagaaactggggcattcccctgctgaagcattttcatactacaacaaagctgttgtgttgaatccaacggcagtcgacccggtttacaggatgcatgcatcacgcatgaagttactttatacccaaggaaagcagaatctggatgctatacaggtttgtctaagattcatgaatcagtttttgcttcttttttttttctttgtaaaagtgttacgcacggttgggttccttatttaatagtttgtgtacagtcttaactaggctattgacatgggcactggccaagggccaaggaaagggtgcagccttaaagaggggcctgctcctcccttggcctcactggtctagcttactactagcagtttctggttttcccctcgattgtgacaggctagtttataatagatattttgatattaactctattgatttatgttttttaggttgttgctgattatacatacaaacagtcaaccaaggaagatgtcttgagcatgctacagtccataaataatgtcaagaattcaccctctgatcataatgataaatgtgtccttgatagcacagcggagaataagtttgttgaccctgatctacttgataaagtgtggcacatcctatatgatgattgcctgtgtgcccttggtacttgtgtggaaggtgagctgaagcatttccataaggcgagatacaagcttgcacaaggattgtatagaaggggtgaagcaggggacctagagcgagctaaagaagagctttcattttgtttcaaatctactcgttcttcctttacggtgaacatgtgggaaattgatggttctgttagaaaaggaaggtaaagtttttttgtccttgtgtaatgtcgtaattacccatttacaaatgcatgttgatttatccaaccattacagcttacaatattattatcttcccaaaaaaactctggtttaccttccattttccaggaggaaaaatccaaatattggtggatccaaaaagaatctggaggtcagcttgtcagaaagttcacggaaattcattacatgcatcaggaagtacatgatactttacttgaaccttttggagaaaaacagggatttgtggaccctagagagggcgtacacttatctgcgaactgataagagggtaccccctaataatcacaacaatgatgttgagctatatttgttttgtggatatattataataataagtctatttttcttgtagtttgctctatgcttgggcgatatcgttcctgttggtcttgggaagtaccttcaagttctaacttcagcaatccgcaatcctgagattcgtagagtttctggcgatgcttccgttgagaacctacttgagaaaatgtttggtgtgttcatggaccatgcaaacttatgggctgatataagcactattccagaggtcaatagtcccgagctatcagaaagcaatctttacaggtaattactagattagagtgcaaaatacatagttactcaagccagatggttttcatactttatttccttgtggcagttatatccaccaatacatccatttgcttgagagtgatgtccgactggatgttcttgaaggactaaatgagaagataagaaagcgttttaaaacacccaaactgtcaaacagcaatttcgccaagatatgcaagcacgcttctctggcatggtgccgttgtattctcatcaaacttgcatccatcactccactgcctgaatccatggaaacaactgatcagcctgctccactatccagcggtctagtgctttacatcgacttgcaacctgatgagcttctcatctcgtctcctgatgggcctgctcaattcaaaggcctcgatatgaactggtttgagacttttaacagaattaagaacattccgatcaggcaaacatccgaagataacatggagactgctgttactgtcatgaagagcacctacaacttctatcgggagagctcttgcggaacattcccatcgggtattaatctgtacacagtcaccccatcgcagccacctgttgaaggcctacagcaagccccagacgcaattgagaaccttgacctcagtattccaaggaagctccttctatgggtttataccttggtccacggccgttactccaatatatcagccgttgtaaagtactgcgatgagatgaaggtatgaacatgatgcccagtatttaaccatataaccttcccccttcacctcaactaacgcctacccgttcttgttgcagtcaagaagtaaaagaggagccccgacatcgacagcgacagcttcacagcaaaccacagtttctccccaaggtatcgcatcaaacttccgccatctgggtatcccttctttccgtacccgaaaaaatgcctaatgcatgttgtgtgcttgatgttataacagttggctccaaagagaagagcacccacattgaccctagcgaagctcaagaagcagcagcccctactccagctccagcagcggcgattgctccttcccagcaagaggcaggtgttgcagttgcaagcagccctcatgaggcccagaaaaccgccgccgcggcggcggcttctcaactcacccgtagcagctcatcgagggcgatggagagcactggtcaggatggcggtagaggaaacgacggcacggcttagctttgccccatgtctactggctgctagtaggctaatttctgcagtgtgtgtgtgtgtgtgtgtgtccatgtgaatatgtgtgacctgtgtggctgtgtgactgaccccctcctaatgttgatgtctcacaacgctgatgattaccgtcgcaggaaaatatgctgtacagttattgaaaacctgtaacagacagtagtggcatgcttattgtcactcaatttacctaccaagatataggtggaaacataggtcaagtgcgaataggttcacaacctggaatgttgttcttacccatggtgtactcggtactccttacccattagtgctatgtaaagctgcgctcataaaactgagtagttttttttccccgtaggtgacttgataacactgagcattaacgatgataaattagcatacccatggctcaattgcacccaaagaaattcagaaaaaaaagcaactacaaaaagaagaaaaaaaaacggtacagtacaaccccattaaacgggctggcccatcattaggcagcaaagcttattgggccggtccttggataaactccaatcgcacctaagcacaccgaggtcgccgcagaggcagcagccgtcagccaccacccaccgcgaccgaggaagaagaagagaggagatcaggaggaggggaagaggaagtagggatgggtttcgtgatggagttcgcggagaacctgatcctgcggatgatggaggacccggggaagcgggacgcggcgcagcgggagcacgtgtaccggatgaaggagcggtgcgagcgcaccaaggcggcgtggagcctcccgctccgcccctacggcttctggaccttcgaccgcttcaactcccagctctcctgggatccccagatcagccacgcccccggccgccgcgacccctacgacgacgtcctccaccgccactccaacccacccccctcctcctcctgatcccccgattcgatccggaataggtaacttgcccctcgatttgcttcttggatttctaggtttagttgttcgttgctcgattcccctcttggggaggtccaattaagcgattagggctcgtttagagggtttaaaatgtcttagctgttcgttgctcgattcccctttttggggaactccaaagttaagcttgcttgtcgaacattcaatgttcattgcattcggatagtttgtatatgttccattaggttaggcttggtcacctgtgagttgctaagcttgaggtgttcactgaactaatttccaatctgactgcactatttccaatctgacatcaccaacagccactcaaaattcaatcccctaaatcattttttttagatctctaaaaaggatttaaggtatgagtatagctgtatctccaagagattccaaaaatttaatccccaaaacaaaaaaagtgggccacatcgacaactaccaacagaatggtcattcctctcctccactcacgctcgcacacattgcatcttcctcccggctcctttcaggacattcagtgatcaatctctttgacatcattactgacagttgaagcattgaacaatgtttctattggcctcagctaccatctgagtatttgtcccaaaatgatatttcacttgattattaccacgatctcctgtattttacatggaaaaaatattggttctgcaatcatcaacagtgggggtgtcagcccagaaaaaaaatcagcttttttagtgtgaatggtgttaattaacaacatgaagttttcagcagcaaacaacaagatatttcagcagctgcaacagtacttttcagtactagcaagcagcagtttttagcggcaaagaacaacagttttcatcagccagcaaacaacaaatttccattaccagcaccaagcagttctcagcaacagcaagctcaaaatttgagcagcagcaacgatcagttttcagctatcagcaatagcaagctaacgaacagccatgttccatcattgaattgcaacaaaaaagcactgaccaacagcacttaatcatccaaggtcgaaaatatattgtggagaatggaggaaacaattatcttattaaggagaagaataaatatttgaatgcctagagcaagtttgagcaatactccaaatagtttgggatcattgacctgcaccgctgaacgagtcgatggtaaattgttttgacggacgaactcctcttcatctgggcatcaccgcccagagaccaatgaaatcgactccgaccgaggtgcacgatgattcgatgaaggccagcgactgggcacctccggctgtcgccggctggtcgcatggggcctttgtctcctgcacattaccagagggcgccgggtggccgggagcctgagacagtgcagcgccagtctgacacgagggacaggctgtgttgcgggacgcggtagggtcgagggacgattggagatgaatcggggcgacggccgaatcgattcggtggtggttctggtgggagtgccgacgaaggtctgcccaattggggtggagatgggtccggcgccgccactgagaaaaaatgtcgatgctgtgaaagcttgggggagccatggctgctttccagacatctgcggggaagatgaggctgctggcatgatggattgactcacaggcggacgaacgcacaaagaaaaacctggtaggaaaatttttacccagcacgcgcgaagtgcatgctatcgaaggattgggcgccgagtctcttccctacaagtcgagaacgaaatatacgggtttggaaacgccaagcttttaggggtgatttaggtatactgttggagcgattttttcctgcaaaactcctcaaaactggtattgggaagagtattgggaaactgttggccatgctctaatacatggttgattgaatagattcgggagatgtcgccggaatgtatcgagtcaaggacagggaaataatgcttgtttggaacctgtaggttcgttcaactattatcctgggagtaggttgttgactcatacagtgcagatggatgtcacagctctaggttttctttaaaacatgaagttgagtgaggaagaaggtgtgttaaatacttaatggtttcttaactttgttttggtgtcacattaaggaaacaatatttttgaatttgaatctagcaacttgttagctcttccaaattcatagatgatgcatgacgtgttggtaactatgcctgtattcccaagcggtgagactaagactttaaaattttctaactacatatatatttaacagactcggattttaaaattgagcctaaagtagttattatgttttcagttgacatatccaaaaaaaaaatcaaatgctggaacatatactcatataattgctgcatatgctagaactgccaactttagtaatattttgtttatgtttattcctacaatgcttttacataactttacccaccaaattgttggtatcttcaatagtatcttgttgatgtttggatggaagccttttttttccaacactatcaaaatttctctcctaactagtataaattttaccctgacaaagtttctcgcactatcaaagttttgttaggctagtgtgcttatagtttcgcattatcctagttttttatgattagttggttgctgctattaacttatagactcctgtatgtctttgatagtttgatttacctaattttagagacagagtatgtccattgggattcctagttatgaaaatgttcgatgggcctctatggtctggatgataagaaacaattatagtttgggcgctggagtcagtgtcttactcttttcatgtgtttacctctcatgaattgttcagctcccctaatttgaaataatgggatattatataggtatattttacagcgtatccatgttaatgttgaatggggagtaagtaccttgactgccttcattgctcttttcttttattttgaactgttggattatgatatataaatagatgctagtaaagtccatattaatgcttgacgggaatctggggaagtgcacactgagtctctcagacccaccctcagttcgagtatggttgctacattatcagaagcttgcaaacaaaagaaaaccaagttgttaacttcaggcttatagattgcgagcaaattattgcaatattttgattttccaatcaacctacgaaaattatagagttctttgggtgttcattttccacttgatctaacacatttgttgaacatggcaatagcctcataaatgcaagtagtttgttcatggaaaaatgctatcagctcagctattgaagtttgtctttagacccctgttgtggtgtttagtatctctgtttatgttgcctgatgataggatcttgtaaattttatggttttgcaggtcacccagtcatgtgttgttacctacaaaacctgtagtccatttgtgttcttcgtttatcttttacttggagcgtcagatgatttgatggtttcttaattttcttttctgcagatgccgttcgtgaggaagtgtggtcgcaataagaaacccgtttccatccaaatgacgtctttgaaaattttatccttgaactaccgtgctttggtcatatgctttctgtttggttaaaagctcagatccagaaggtcttagagaggccgttctgtatttccgttcttgattttactgttctgtatggctgtaccacagaaggttttaataatcgcactgaggaattgcttgcgtcattaaaatttgaaaaccattccaattgttgtggtatacaaagcttgctagggcattttcggtgcaatattatgatgtgttctttagcgtgggttgggacgtggtacgtgaaacgagtgatggattagcgcactactctctccttcactcacaaattgatcatcatataacctcatgaatacggattttattggagtgcaattcatgcatcacaggaggagaatacgtgcatgctaagggtgtacttgtgcattatacgtgcatgctaagggtgtacttgtgcattatcttaatcaatgtaagtatgtatattgtacaaacattatatagaacattatataatgatcaatttggaataaagggagtattaattaagtattagcttaaaaattaaaaaatagataaatatgatttttttaaaagcaatttttttatatgaaagctttgttaaaatacatgccgtttggaaagcatgtgtggggaaatgagggagtaaaaattgaaaaggagaaaagaatacaccctagagccaccgtgtagggcatctatttgtcagcgcgtagtagattgaatgctctaagggcaagcacaatgttggctgtcgagttcacaccctccacattgttttagtgcaccggaggggaataaggcaggccgaccaaaaaataagtcacctataataatccccatgactattgcgtggctccttcccatgacttcttcattttttaaagtggtatatgagcttattcgatgggtgcgatctagtataaaaatcttggaaaactcgtgttccgatacacaaacttgtataggtgcttgctaggtgttggaactaattgtctggataaaaaaaagttgtagataaatttatgttgtttagcaccaagatgtgtttactaccccctccatttataaatgactagtgaacttgcacgtgcaaggcacattatcataatatatattattgccaactcgcaatgtgaatcgttggatgagaggatctgacggttaggaacgtgtgggtgtactaaatagaaaactggtgtttttttatattaatatagattgatatagatgtatgtaaagtttttaactctcaatccgcttttttatctcttcgataattaacgggaaatcccgcctaagatgaaagtagccatcagtgacggccaccttcttgaagttgatctccgccatcaagaagctgagccacttgctctttagctccgggcaatggtacctctcggcgtaggcgcgtagcctagagtcatcgccaccgtctccaccgacacactctcccacagcttctgtgcacacatcagcttcaacctctccaatgcgtacctgttcgccgccacgagcaagctctcgaaaaatccggtcgtcgtcgacgttgagccggcaccgcctcggtcggcgacggcaaggcgtccatgtacacgaagtgtagtagagctttgaacgtggccgggtcgatgttgtgcagggtgacgcacggcatggtggactccgccatggacccgaggagctccatcttgaacaccggcgagcgcgcggcgagcacggcgcggtgtgcatgaaacgtctcgctgccgacggagaacaacacgtccgagccgtcggcacggtccgcgatgtcgtcgagctggccgttgaggttcgaccgcgggatgggtatagtgccgtcgtcatcaccggcatataatatatatttaagaaaagtaaaaatagggggaaacagtgtgcgcaaggatatattcatacactgacttgagaaacatggcaaggctgtgtccacacgctgaatttagatacattccatgttcacgttcacaaaataatctggattttataaatacctagaaatccaaatcaattgttaagcatgaacttgtataatatgaatttagtatgaatttgtagagaataaattgtaaccttaaatggtaacaggagtatattgtttacacaacctgcaagggccaaggtcagacactaaactcagacaaaccttacatccattggtgaatttgtaaaatttcagtacttgagctataagaactcataactttaattagctcgcagcaaatcaaaacattgagcaacatgtagctatggtcatgtagttgtcagagggaatatagaactgagagatcaagcaatatgtaagtacaaacatgtgaatatcaaatattattctgacagggaaatatgcttaagtaatggtgtcctccaagcttacaatcgtgattaacttgctccacttaagtcatgcccatcaccttgcctaatgccatccaccaaacctgcaatcctgataaaattgctccactgaagtcatatgcatcacattgtgcctaattccatcctccaaacctgtggtcagaggtgccaccaggtatatattaaggttgtctcctcttgcaaagaagaaaataaaaggactacctattagcaacttgcgagcaatggcaggataatcccagatcaatgccgatataaaaatgaaaattatgtatgctgtagtagtgctcgatataaaaatgaaattatatatgttgtagtagttctagacttatagagcatcatggaatgcgttttggtcgcgtcgcatgcccctggggcagaggttggggatatagcacatcttctgcttcaaaataaaatatcttctttatctaaaataaggtttatctctttggaaaatatatttcaccaaaaattaccaaaattctatcaattcaccaacaactgctaattgggagcatttaagccttgctaatgaaaaggtacacactcaaattcgtagaccagaaaaggagagtagcaattcctattcagaatcagttgtttgtacctctacatacactaagctgagcttatctaatatctaataggttcatactatgaaaatatatccatttatccttgtctattcatagtaaaatagtaaaaaacctaaagtaaagaaataatcttgcatatatggatattaccttttttttttttgcctgtggagtacatgaactcagatatatcaaccaaaggccaatcaatggcaaataaaagaacaaaatctccttggccctcctcattgagcatcttaaagctaaaagccatcaaataaaggccgttcttccattatgctcactccatcccagcatatttgcatatgcttgtattaactgcagagacaattatggcagtttttttagcgtggctagctatagaaatcaaatggtggattgcagtaccacattaaatcagaaattcagatttacctttttaggctacataaataaaatataaatctttcatgttctcatgaataaccaataaaatcaaccttttcaacattaaccacatccttgggagtagtcataatgttgtatccttcaatttttgcacaaattagctttttatgccaaaagtaaaaaaagaatgtttcgttataaccaagggagatcgaaccaaaagagtcaaagaattagaacatctaaatacccaatatactaatcagctccacacacgctcttccaaagcacaggtcccgcccgaaatacttctgtctgatttgtatcacaattgggattcctctgaaagaacatgatccaaatttataactctcgttgatctggcattgctgttccataatggacctctagctttgttttcaatggcatgttgcagaacatatcatgatgtatttgataggtgcatgtacatgctgtcaagaaaaaaatcaaggtctattagaattaagttttacaatgggaataattataagcttccatcgagcctcttctctatcagtgatttggattatctgcacttaaaaagatgcattgtcagcttgcctcagaagtttgaaggtttcaagcggctaactgtcctgaatctgaaatatttctcctcaaccagtgacataaataatctgatctcctcataccctttgctgaatacattgtatttgaaactggtaatggaggattagaagatatgtctcagtacattagcagaaaagtgtcaatagcacaatcaacattggtcacccaggaaaacggttcattaatcaaactgatgaaaaaaaattgatagcatcaaaatctacactctgcaattcgttacagtatccgagaccacaggagaaatcgtctttacctttactggaggggaggaccagcggatgggaagggcccgcaggggcggatccaacgtgggtgcaggggggac

SEQ ID NO: 7886 - DNA, 42890 bp, Oryza sativa
cgcggggtgttttttctagacagtggatcccccatggttaaccgccgtgcataaatggcaatggcgaaacaaagtaaaggacagataaactttattgaatttcggtgatctaagcctggaagccatggaaacctcttctttatttttttggaagaaagctgggattgggcaagggccatgctttggtgatgattagagtttgttgaattcggaattctgttggagatcgatgggcaacgcgtacgtgtgtggatcaagttgcgcgcgagcacacccaatttcatacgaaaatggtggagtttgtttgaaactttgaatgggggtggagtgtgatcggtgatgtgacgccagttaggcattgtgtttaggattcataagttccacgtgacatttaaatatgaaactaaaaaaaatgaataaaaaaaagacttgagcctctccagataaagatttgaaagtatcgctcttaaggagtactattttcaaaccttgcactagtcacgcgttttcggtcctgctcctgcttgggctctgagttcataattttctcatgccaaacactatggccctgtttagttcccaaaaacttttcgcaaaaacataacattgaatattgggacatatgtatggagtataaaatatagatacaaagaaaaattaatcgcacactttgtatgtaaatcgtgagacgaatttttttatctaattaattcatgaatagctataagtgctatagtaacctatatgtgctaatgacaactaaattaggttcaaaagattcgtctcgcgtttccaggcgagttatgaaattagttttttcattcgtgtccgaaaaccccttccgacatccagtcaaacgtccgatgtgacacccgaaaattttcatttcaccatctaaataggccctattacatggcatatttgtaaattataaacgccctcatacgaaataatcgactttataggttttgatcaaggtagttcaattagaagtatatattaacgtgtaaaaatattggatttatagctattaaaaatataatttatgataaatcaatggtcaaaagttgatgagtaaatttcattttggtccaccttttgttatcaatatttcgctttggatcaccatttagccaatgtttttactttggaccggataaagttgtttttgttttattttagaccacccaacctacttctagagcatctgaacgatctcgattatgtcgattatgtcagttttctacttgtcaatgaactcctcagctatatatgagatcatttcttcagcatattataagtttaatatagatggataaaagaattaaggatggttcaaagtgccacaaaggtaaaagtatccgattcaaagtgaaaacattgtttttatggtggttaaaaacaaaacatcagtaataaaaaatgacccaaagtgaaatttactcctgaatttttctaaaaaaaaagaatatatcatacataaaatttttaaattagaatacatcataccgaaaatcaccaaataccggtagcatagtagtgtgtgtgtatatatatatatatatatatatatatatatatatatatatatatatatatatatatatatatatatatatatatatatatatatatatatatatatgcaaataaataggaattaggcaacctatatgaatcttcacatttgctaaacctttcggccgtgcgaggacctcgctaattaatattgtcaaaccatcgatcgagagactgatatacacaccttgtctttttaggatgtcaactgtcaagtgccccataaattacactccatccctaaaaaaacgccaaaagataagcgaaagagcttcaaataatttttaattagtccactgtacggcatcaaccaccgttttcgtctcccattttattccgtggaaatggaattgaacaacgacggtgcgccgcccatggaggaaaaaaaattgaaaattaaaagatgacaacgcatggtcacgtcccacgcgtagcaacctttgtttgtgcggcgagttagttagtccagtaatttatcgcgtaaacacaatgggacaaagcatattaatccaggtaacgcgttgtttttattaagatatggattttatctcgtttccgttaacacatttttcaaattactaacctatatatttcgtgaaaaaaattctatatagaagttaattttgttttaaactattagataaataacttaataaataataataataataataataataataataataataataataataataataataataatattcttgttttatgtattttttacttaatcttcatcctccatgaattcaaacggagccttacagcctttactgtttaagcttgcatggtaggagtaacacataattaattatgtagctaatgacaaggtctgctagctaatgacgaaggtttacactgtgaatttagctggcacacgcttaactaatttgcttcgtgattaggcaagaccagcgatagcctaaaaactaactgctgtttggacgagccgtgccacgtggcggccttcagcatgcttcgtgccttcgtctcggagcggaggaggcgaaacgaaagctgcgaggatctgacgtggcaagaggcgataggctcgatgacatggcggcggtcaaagatgccaaagtcaaacgcgcggtggaaatgcggtcaaagaagtctacgggcggaggcggaaagttgactttgtggagattttgcatattttaaaggtgaagcttccttccatcttgtttcctcgaccgtgttctcctcctcgacattttttttccccttcgaatttaattttttttgttgccgtatgttttcaacttctgaatttgcaccatggacgttgttttttaaaagtgtgattaattagtctttgttttcttttgtcatataggatattaacagttgtacctcaatgcactattgactttattttgttttaatgtataactttgacccgtttttcttattaaaaatatgcttccatagtctgtatttaacttcttaaaatagaaaggaaggtgatgtctgtatttaactctctaaaatgaaaagatgatcacccttcacctaggcattatcagatcatgccacccatttagctagcagggtcattctcctgcttgctcttgagttgcagtctcgctcaaaagatgaaatttgggagagaatggttttcaacttgtggagagtgagaatgaaagataagggaatttcgtttttgtgagagagcagggaaactattagtgtatttttttccgactgaaatccccaaaaatctatattgggaatggagtaggggcacgatgttcttagtatttcatctttatattttttgaaataaacaaataaaccgacagagtaatttacccatagttcagtcacgtggctggacatgtctttttttttaaaaaaaaagaaaagataaataaaccgacagagtaatttacccatcgtcgtcgccggagatgtctcacatgaccgagacaagatttggagctttcacaattgaatagctcgagtgagttcaccatcgtgccgtgaaatgcacaagacacagcatgactgcttgacattttcacctgaaaaaacgcaccgatttgattttcccaattcctatccaatttgcgccgtgtttagttccaaaatatttcttcaaacttttaactttttcatcgcatcaaaactttcctacacacgaacttccaacttttttatcacatcgtttcaatttcaaacaaactttcaattttagcgtgaactaaatacagccatgaagtgttttttcccctgtcgcttttttgaattcgttagcaggaaagtgccacgacgaagcggcagcaccaacctttgaagggagctagagatttttcaagagaacccaaacgagtacttgaattaattactcgactgattttattttcttttttaacaatactcgactgattttttaagagaatctaaacgagtactacttggatagttggattaattattggacttccttttttttggctcatatgatcgtgttggtattgtcttatacgccagtgcatgcaaactctatgatggaatcctactcatagttactgtatcagattcatctgacctactcctacttgtaaagcatacttcctccatactcgtaaagaaagtcgttttggactacagcgacacagttttcaaaatataactttaacttcttgtttctataaaaaatatttatggaaaagttatattcatataattttataaaaaaatttcaagacaaatctattcatataatttttatatttacaaactcaacaactcgagagttatttataatatatattttcaaggttcgacttaaatattgttttaaacgactttatttatgagtacggagggaatatatacttgcgtatatgcatcctttggtgtttagcattaactgcaacttgtgagcgcagacgaatgggcagtggatggcctacgggtttggagcaagaacagccatgcctttcgcctcggtgactgatgagtaggagcagtcgagcagaaccaaggattttgccattgccaccttttggttcccttctcttgtagtcttgtcacgtcgccgtggacggcaacttgggcagcacatcgacgatcttatgaattttgggtgttcttttaagtttgatttatctgttttgattttttttttactcttgtcctaggatgtcatggactcatggctaactttttttaaaaaaaaacaaaaaaatgtgttaggttactaaagaggatcttagcatccattgctgataaagtagtgagaaaacatgtgttaacatccaaatttgacatctagacatgaaataagaaaatatgatcaaatttgaataagatcgggatttcctacatagggctagtatgatcgccggtgtgtggctgatcgatctgattggcgacaaatggacggtcaaaccgtctaagtccgacttcgagtcgaatttcgtcgggtctcaggcttccttgcttgggttgaggtttttgagtttttattggtatctaccttgagtaagacgtggagaagattctgtaggagacaagaccagtctctttataaaggctatggccggttcaactgaacacataatctcttttcaatacaattagccaatcactttttttctttctagttttcatccatctttgtcggtttgcactgaaagccgtccatcctcgatgtgggtgtgcgaatctctttgtaggtctgtcccaaaaaccttccgttccacccacgagacaaatgtttatccctatttcatctaagccagcttcaactagtcagttttgaattacataaaccaccttggtttagatttatctagatcgagatggttgacgactttgtagcaccgcaaaacattaggtgttttcatcatgattgacggcgtaaccaaaaaagttaccaacaacatgcactgaaagggattcaaactcaggctggtgcactgctcgtctgctcctaacagctccctgccagtcgaggtaggcaccattcccatggctagctacagaaaactacggtgaaaaaataactctagaaaaatagtaacacgattccaagttctattatgcgaaagtttatgtcgatgacatcaatctattatattatcaaaacaaacttgaaaaaaaccactgtactcattccaaaggcctagaaattacaatattaatagaagacagagaactttgtaaaccagtagatcatgatgagtccaaattttaatagcgaggattgatcgatatagctgtgcatagaacagaaaattgtatttggagaaacataattaacaattatatacaagatacagttacatctgtgggatcagaagtaaaatagttgtataccgaattaacataatgacgtgatagtaccccctttttattttttttctaggcacaggagtttacagctgaaaaactagagggaaatgtattaacaacaccgacaaattaatctacttctttcctccctgatatataaagagtttaacgtattgtggcttctggggacttcagcaaatgataaagcaggaatatatataccagccacatggcaatgccctgaactcttctgacaaaaaaaaaagaggacacaaataatccccaaatctgcaaaggaagagacaaatggaaggataccgatctacattcagatgcatgcacacgtatcaaactgacatgagctaccaaaaagctttgatttgcatgatctctctctctctctctctccagataggctaacacaccaacctggcagtacttaattaagcaaatgatgcaccaatcagtgacctccctatcaccctatgctaatttcttattgaataccatagatttgtcagtacacaaccacaccaatccctttctaacaaactgcaaaaaaaaatgagttgatgccaaatggcaccagctcttgatgattcatacccaacaattcaacaaaagcatatatctatgggtcttaagacctttatcataacagagaacattgtttgggaaatgtgctggccacactactaaatcaacttgcctgtattggcatgctgacaaagcgataatgttgattagtgagctaaacacatagatgatgaaaggaaacatctaggtatcatagcttttgattgggtatgcactgaggttgagtacagtgagatgagtacacaacagcatgcccaacatgcaataaatattctatctgtatgtatcttaataacatgattagtccagaactggtttcttcttctgaactggtacgagaactggttttctcctttttgaggacttagtcgaactggtttatgattgcacttctgaactagacatgtgaaaaccaagctagaagcacatgatcacttcagtgatgcttagcagttagcacagatccagtattaaagtacacatgcacaaattgcgtgaaattagcaattatataacaagaatacagtgggcacaaggttgtaatagttgcaggtagagtaatttagagcatgctacagtacaaggcagagaattggccagcagaagactactgggattgaaaactgtccacattcagttctaaaatgagctggtgatgtttcgttttgtgagtaatcccaaaacaatcatcatttgaaatgagtatagctatcaaccaatcactgtcacaggaaaaacactgaatgtataacgcagaatgacgaaagaatcgcttaccaaagaatagcagataataaaatagaagttgacaaatgttgttccaccacttcatgtaggaaaatatccactgcctgtcattttaagtctgaccagctcccaaatccataattaatataaatgcccctagatcatcagaacttcttttcaaaagagcaaaactcagaggtgatttgtcatcatacagatatctcctttggtgagggtctcagcccatgttcttaattggttcccaaagctcctaagctgtgttcttcccccatctttcccaacttaccttcctcattttccacacacacgcttttcaaactactaaacaatgtgtgttttgtaaaaaatttctatatgaaagttgttttaaaaaatcatattaacctattttttaaaaaataaataaatcaatacttaattaatcaagtgctaatgagtcactcagtttctgtgcggaaggaataagttcccaacacaagaaaacgaacacagcctaacataacaagttattatctattaaacacaagacaaatgaatagaataataaaacagtagaaaactacgtttccagcactgcctctttaaatactaaatgcaaaggtcatttcattgcttttttcaacaaattaatattctacaatccacagtgccaaacaatgcgtcggtgaatcaaattcaactttatttccatcagtatgcctctttgtgtctcctttaggttgacacaggtattctatcttaaatttgtcatcagccactagcacttgggtgccaaaatattgaagtgctggctcatgtagaaccatcaggtttgattttgcacctagtggttggtttctcagcatacaacttatacataatgtaatgcctctttgcctacagaagatatgatatttgtcccagttgcagagtacaggaaaagtgaacactaacagtccataatgtatagggcactgcattgcagaagaaataaactacctaccaagggttaagaaaacttagccatcaacaatcgaaaaattgtttggggagccaatgatacttttccagaaaatacaaaattcacggtaagatgagcagttttacaccagcatgtatgtcgtcagaggaatccacatatcagctatagacaggagtacaggtaagtatcactacaagagaaacagggaaactggagcaccaccgtttcagtgaatgacagacgtgcattcccagagatgacatgtatagtacaataatcaaagaactaagtatgcatatgagatatgactcaggatgctctcacaggctaaacaaagaagctttcacctgaaaagacataccttcctctggaaaccaactaattggggctgaaataagttgtagtgctgcaaaatccagtgtgcaagatgtctcgattaaggacgatacctttttcagtcagcaatggtggatcacatgtaagatcccataataaatatgtggaaggtgtcattacggtgctgacaaagccaggagtttctgctgatcttatgtatcattaattagattacagtttgagtattccacagcccacagcagcgagaagcaatactgaaagctgctagtcatttatagcatttggacggtccagctcaagaaagaacataaagttggactcaatcaatgaatcatatctcaactggactaagtcttaaagcttcctattagattatttaagtttggaagattatatcaatagatacggaagatctaatccagtgtctaaatggacattttaccgcaaaatttgcataatgattcaactgactactgttaaatgtactctaacatttcaattctacatagtaaatgcttgggctgatagaaggattcctgtaacaatcaacaaaatttcacagataacttacataagcttgtggaccaggactactgatctggcctgttccaaaaggctcgtattgataaaggaccaccgtgtttgattgaagctactatattcaagggccaaaggcaaggctgcagtgattatggtggatccctttcataaattgcatagcgatcttcagttgtacaaatacatactacaagaattacacaaagttgtgttggttatctgaacaatgagttcattttaaaattctttcggcagttcattccatcatcatttactaggtttcatatagtgccatccaatgatccttgtgacaaaacaggtaaagtttgatcatataccctccatttagattgaagttgaggatttaccctcctggtccacatgtcagcgatcttagatgatcccacatgtcagcggcgcaggagggtaaacaattcatttcaatttaaagggagggtatataataaaatgttctcattttgttttgtttgtcaaccaagatcttgcattcctcttaacagtttgttccttcactttggattgatatcaagctatcagcaatgatgtcagaaagaagaaccaaatgtaacagattggacaagaacaataaaattattaaaaaatcaaggatgacttaaacagttaacgttctgccattttttgctgtttagtttgtaacataaataagaagataccacctgcaactgaaacattaagagattcaaatgtaccttgcataggaatgtttacaagctcacaggcttgaagggtatctgccgaaaggccattgccctcacttcctaacactaagcacactgattcactcatcagtgaatccgctagttctttagatagaacatgtgttctttcagatccattactgctgctttctggatgacctgccagcatcttcatatcagatttagccatcaaagcatgcagatcagaccagttaccagaaacaactggaagctgcaatgaggctccacgagctgcacgaagagctttttcattgaaaggatcacagcaagctggaagaagaaataccccatcctgttggtagttggttttaaatgctgttagaagcatagaaattggtaaagactaaccgaacaacactactgaaagcacttgaagagttagtataaatttctggtaggctacacaccatgcagatatttttgtgtgatggcatattggcatgtgctaactgctaactaaacttcatctgatgctgtataataggagcataattttttgtggaaatgtagaacacgtatggggtttctagccttctaacccagaatgtactaaccttttgctttcaaaatgtcattaatagcattacactatcatccttagatgtaaaaacaagtgcaaacctaataattctacatactaccagtagtattagcttttttatcacttaagttctaccttattattgagaagtaaaacaagctgtgataactactttatatgaaacaataggatggtgtgatccatgagaccatgaaacatcaagttttgagaaatgcaatcagagacgcttcaacaattagtagtaaatgacatacccatctgaaagcacaagcggatcttatcaatgttccaaggttaccagggtcctgcaggatagaaccattatggacacagtaaaaatttagaacccttgcttaagaggaatcaaatggactagttcaaacttaaaataaacaataaacaacatattatgtgccgtcttatgcacaaaatgacatccatttactatggataataacggaatattgcacacttctttttacctgaatcccatccagaaccaaaatcctctttgcagagccgagccactcatcaagaacagctccaccctggtcgctgtcaaggtcgcggaaatacttaggcatgtgaatgatagcgattgcctcagttgaatcaactgattgcatcccagaaactttcttcatcacagcggcgctgacatacacgacattgccagagaacccgtacaattcctccggtagctctatgccgtccaagagaagcaaggtttcgatggtggagaattcgaagctacacatctccctgcaccaaggcgtacgagtgcagaattaggaaaaaaattcatctcagaataaaacaaaataagggaatttcgcagcttagaatagagaaaagtttacaggatggggatgagtccgacgaggagaatgcggcggcaggagcggcggtacgcggaggagagcctgagcctaacgcagtgcttcaccagggggttcgccacgctcgctacctgcttgtggttttgctcgccccggaaaggagcagccttcgccacggcggccgtcgcaacggagccgcgggtccagggaacgcagtatgggcggagtatgctctcccgttgcggcggcgagctgaccgccgagggcatcgccggcggcggcggagcgcgcgccagtagcatcgcggcgggcggcggcgaggcgcgtgtctcttccctcgcaaatcgcaatacgcgccttatctactcggcggtgggccaaattaattagcggaaagaattcgttattgggcctaaactgtttgggaaaattaatgggccaaatgtacctgtggcccgatttcgttgactggatttaggtggccgaaatcatttgctaacgataattaagtgggccaaatttagtgatgggccgaaattgttcgtgggagttacgtcgttccaatacgattgagggcctaattcgttgacaagaattgagtcggccaaatttattgacgggccgaattcattgatgacaaattagcaggccaaatttagtagcgggccaaaattttttagaagaataaagtggtgcaaattccgtggtgggctgaattcgttattgggaattagtaggccaaatttcgttattgggaattagtgggccaaatttactcatggcccgaattcgttgaaatgaaattagtagcccaaatttcccagttggttgacggaatttagagggtcaaattttctctcgggctcaatttgttgacgggaacccatgagaccaaatctactcatgggccgaattagtttacggaaaatagatggaccaaatttatttttgggccaaattagttgacagaatttagtcggcctaatttactcttgggctcaatttgtagacgagaatctatgaggccaaatctactcatgggctgaatacgatgtcgagaataagacggccgaatttatgcttgggctgaattcgctaatgggtagcagatggaccaaatcttttagcgggccgaatttgtttgcgggaatttcgtgggccaatttcactgatggagttaactgggaccaaatttgttggtgtgctgaattcgttgagggtgggttgaactcgttgatggatgtgttgggccaaattcactagtggatccaatcgtagacttctgtgggtatttgctattttggtttgggaaattcatttgtggaccgtatttgctgacatgaattaagcagtctgatttagttgatgggaagaggtgtgccgaattcattcgtgggactaattcggtgaagaataacaagttggctgatttccggcctaattgggcagaggatttgtctgaattcatctcggctactccagtttcagagaattgagcattctcaggttggttccacgcagaattggacaacggtgtaacctgaggcaacatgaacataaaaccaacttgccctgcatcagtactctagtttactacaaattctcagctacaacgaactctagaagctcattttcaaactggttgtatagaacggaagtatttgaaactacatttgctttgaatataaatttaagattcaaattcactcaattcaaggttttcatggcagcatatcattcccaaactcataactccggtgatcattattcattattcgcactcaagattaggtgttcagtttacaactttacatgtaatccatggtgttcttcgtctgtcaggtgcgaactagaaaatggtatttttacaagaaagcacacttttttacatgccaaacaatcgctaacagagtaacagcactgaagatggaaaattgtgagctgaggaaaaagcccctttctccactttcaaagaaagtccttaagacaacatgagctcccgactgcaaacaccactgtgaaggacgagaactgagagttagatgagaatataaggggaaaaatgaacagattaaacaatgtagagattgaaatttctggtggtgtcacctctttagacacggctcactcatcacccattgcaagctccagtgcataatcatccctttcctgaaaaaaaagagcagtccactatgtctgagaaaagctagaagatataatttcatgtttaaagtggaattggaataacagtggtgttgacaaccacagccaacatcaacagttatgcgcttatgctataaattgtctacacgggagttcctaggcataaaaactatgagttgtgaaatacaaatttaataatacttacaacaggtcctcgtgcgaaatatcttccaaactggagccagtagacctatacattgaggtgttatgtgcttagtggaacatgtaggacttatcataagaattcagaagaatacagtctagttccttctgtatggttagataagacagttactactattaacaaggtggcttaatgcttgcctcatcttcatcttgtgtttcaacttcaacatcagaagttggaaaaccaacacacaacaatgcatagccctgaaaaaggaagtaataagacatgcaacatatcaccatttcagtttttgttatgccaaatagaagaatcagaataatgaatgttttataggcacacaactagaacacctaattcacacactaattaaagaaaacaatacaactctatcttaccaaaatcgaagggaacctttaaggatcctaacaggtcaacaattcatctccaaatcagttgttttagatagtaccatccaaactattgattacaaataaatgtgatacttttgtaacgaataaaagaaattgtgaagctgaaggccatgaaaccttgcaggaacatcaattgacttgtaaagaatactaactgggtaggatcgtgtgttactaatggatagaacatagacactgttgaaaccactgagtaaattgaggaatgaggcggatcaagtggcaagcaaactgtagcagaaacagtaaaaacatgatatacttaattaatagtgacaacaaagcataaaaagatggatgcaccttatcttttagttcagcagatattccaagtgcttcaggttgtcttatttgtcctgactttatccgaaccgcacagctagtacagcaacctgattagaaaaatgtgtcttcagtaattcagaagtatagtcgcctggttgtatttggttttttgttttggtcaatctgctggttttgcatgccgaattgctgatgatgtaacttttctttctccatcttaatacaaagtgagcaatccatttgcacattccctaaagtaattcatttgcttatctatattgtagatcagaagaaaagggagaaatgatacgctagccagagactacactggctgagtccaaaagtaagcaaccgcttgtgtcaattgatcaacatggtacggcacacgtttttcttgcttaatgtgttcctttgccgtgattaagcatacataatacaatacgaataacatttgacaaacaagtaaaaaaatgcttcctttttgtgcaactaaaatctagcagagtatgatggatttgtctaagcaacgactaagccttaaagtccagcacagattaacttgactcttagggcagtcccaactcataatatccataagcagtgtctatggtgccatgttaataagacatcacaatcaaaactacactctacaacccatggttttttaaagtgggccattaataaatacatcatctctcttctctaccaatcatatttaatcttcatctattatgaagacactattctctcccaatgtaaaacttgatagtgtctagtgcataggttctcgtgttgaagctgtgtcttgcatgagacccagtttcttcctctcttcaatctctctcttaattaatatagtgccgcataagctaaaagtcctacatggcaatgtagttaatgtcatagacaccatactaggtggagggttgggactgccctaataagcttgagtgagcgagtgagtagtgagggcaaagtgtagccaatcagaagaaaaaatgtgtcctgggaaaggcacgaggatgggagcctaccatggcggcacgcgaagggcagcgtgatgtcctgcgcctccgcggtgtgcagaatgtactggtcctgcgccccccaaccacggcacgaatcagacaaagcacaagaaggagaattgcgctactgctgcttgagacggcatcgaaggtgtgtgtgtattgattaacctgtgggacgacgaactcgtggacgacacctctctggcggtcgtggacggtgaccttgtgggtgggagcgggcgaggaggacgagtacgccctctccgacacggggccctccacctgccgcagcccggacgcccgcgccttcgtcgtcgtcgtcgcgccccgggcgggtcggcgagccgtcgtcgcggcgaacggcggcgccccaatgcgagttctgacgatcgagagagggagagaagcaaaaggtgataaggtgataaatgtcagagaggaggaggagtgctgggtgcagcggacgtacgtggtcgcggcggggcacggagccatggcgatggcttggcagccggagcagctaggttgcttgtcccgcgcgcggtggtggccggtagggagcggcgcgagcgagcggaagggggaaatcacgaggggggaatcggggcgaggctgtggagcggagcggataaggggaagggaagagggacggacgcgcgcggccgcgggggcggtgtgtgagctccagcgcgcgagtaggcagttggttggtttgggccgcggggatgcgcgcggttgggtgagtcggcggcccatcccatggaacatgtcagcctgtcgacggcgccgctaggaaaaagtccactttgactcccttaattgttcaccgaatctaattcgtgacccttaactagaaaaccgggtaggacgattcccccaattactagaaccggtacaaatcgactcctatggtagtattgtgggcggtattcgatgacgtggcaccttgaccgtggtcagcactgtgaacttagctgaggatggagggaaatagataagtagctgacagtggaccatcgtgagctaagtcagatccagatggggcgacggcttgggtggcgctgggggccgcatgcgtgttggcagcggtggactgcggccgtcccccctccccttctcgtccatatccggtgatggcggcggcgatggagaagactggcgcgaaggccgggcggagttgtggcgacggcggcggtggtggtggcgacaacggcggtggccccctctctccaccgtcgctcgagaggaatgacctggcctctccactttaggatgtccgcgccgcctaccccgacgaccttagccccatccgccccctctctctccccgcctgcgccgaccgccgccacctccccccagccgcttcctcgtgccttcctcgccgccgtatccccgatgccggcaccgcccacccccgcccttcaccggccgctgtaggatcaaggaggccgactagagggggggtgaataggcggttttaaaacttaatggcacttaaacaaaactaacctaagttgctaggcaaggtgaggtgcaaggttaactaagcaactaagttaagttttgcaaacctaagtgatatgggctcaaatatgtctctatgaatgtaaaatagcacaaatgtaaatgcaacaaataaatgagacaagagacaaggaatttttcaccgaggttcggaaactctccggtttcctaatccccgttgaggcgagcccaactccaccgctcaaccacgaagccaccgcacgcccccttcgtcaaggggtgggcaaggcgggagccggcccacggagaggactacccaagcctcgatcactcggggtagttcttctttcactccgaaggtggtgaactctaaaccactcacaaacggtgctgggcctcctccacaatctcctcggagaggtcactgggcaacacctccacgagccgtctaggaggcggaaacctccaagagtaacaagtctaggatgcttgccgaggatgatcaagtgccacactagctataacaatgaagcaatgcacttggattggcttaactcactctctaacacctcactagataaactaagtgcacaagggtgtgagagctcttgcaagggttcaagataatgcaatggaatgccaaaaccttacccttgctgctggggagtgggtatatatacccccaaccaccaaaactagccgttggaaccgaaatccccaactttgtgctctgccggtcagaccgccgttgtgaggccggtcagaccggactactttgtaacggctagaaaactagccgtaacggctagaaaactagccgttacagggcaatcattgagcccagtcaacctggccggtctgaccgcagtgtagtggccggtcagaccgtccacggctcggtcagaccgccgtcggctcggtctgaccggttgcggctctggcggctctgtatcactaccaaaaaccagaccagtgcaacagaccagtggggccggtcagaccggccttaccacgccggtcagactggctaacagacccggtcagaccgtcctaaggcccacggtcagaccgcaggtaacttttcagctcaaccgaccgttagtaaaacggcgatatctcttgactcgggtctcggaatttggcgttcttggactctatggaaagcttattcaaagggccatccaacccatgaaaaatccatccaagaaacacaacttaagtcaaggataaagggctcacactccaaaggatattcaccggacatacccacaagatgttactcactcctattggacatgcccacttctctcttggtttaggacttgagaaaactcatcacacttggttagacaagcccacaaaatgcacctacatgcatatgaactaatatggcacaagatcatccacaagctcgcttcatagacccctcttgatagtacggtgcctatctagcaaatccggtctacaccaaacaccaagaccgggaaaagactaagaaaacattcttagctacattatacctttgccttgcgccatccatcttggggtcaagcttgagccgagatcaacacttgtgaccatccggttgaaccatgtttatgccgaggtcttgtccatcatttgtcaagactttattctcatcacaagcttgacttcattcttgccaacatgacgatgtccttggcttggtgaccactaacccatggtgtcattcattagcctcatcgtagtgggacctattccttttcacacctcaaaggagaacattagtctcaacaaatcggttgtcatccttcacttgatgaccaaccggttgcatatgaaagatatggatatgtttgttgagtattcattaacatcacaagtgtcatatactcgtatgcaagctcaagtgcaaagatccgatataaataataggtgaacaacatggatctagaacatgcacaataaatgtataggatttgctccccctaaatatatgcatacaaataaatatacaagagatgcaagtgtatgcataattagagaatgaccaatgggggtttatcctatacatatagagaagacatatgtagtaatgatgtagaccaacataaaacatataccttcatgatctccatgttctcaatgtaaatgagactaaataagataacattcgagtaaacattagtctcacacttatatatcaataacatggaaatcatatatatgaacctatcaaaaagtaggagataagaagtggtacatatcgttttatctccatgcatttcatccttgtcatgattaaggtccatcacaaaagaatgcatgtcttccacatctcattatcgggaaataacctagtagacaacttatgcaaaagagaggttaatcccataaacatcggtttatcatctatcaccaaagtaacaattacacaaattatttaatccaagatctttcaatcttttctctctttggtgatggataataacccgatataaacaatatagagagatgagatgaaaactgatttcaaatcaagatagaaatcttataataaacaaaatatagaataagctccccctcaagatgtgcatacatatggatatgaaggaacgcatatgcacataatcaataaagatcaaataggaagctcacactatattttggatccacaagagagaccaagttagaatatgtgaagtttaatacatacctctcatcatttttacttccatatccaaatgagactagtcaaagaaaggctcataaaaacgttagtctcatataattagatttgtcattaatcaccgaaaccaaattaaggcacttgaacttacagccgctctcatgttaccgccgcccacggtatcctctatcccgtcgccacgtcctccgccgcctcctctcccctctcccctacacgaagatgagcagcggcggcggtgatgactggaggggaggccgatctgcatctgtgtcgccgctgtcgccactccagcccccgctcgccatcgccgctgatccgactcccgctcccgaggtgcatccaaagggggagagaaaagaggaagaagggagagagagggaggaggaagaagggaaggagaaaggatgacatgtggatcccacaatatattttgtgtgtgattgacagatgggtcccatagatattttttaattctaatgccacacaagcgccacgtgggacgaagactgggtcaatgccgccatgtcaacaaaaccgccctcgaaaaccgctggaggagtcgatttgtactggttctagtaattgggggagtcatcctacctgattttctagttaagagtcacgaactagattcggtgaacaattaagggagtctaagtggactttttccatgccgctagcatagctagctgcatgtgggctggctgtcggcacccggggagggggggtgggggtgtgattaaggtcatctttgggggttaagggattttggagtttttaaccttaaatttggagctgattttaaggtttttttcatcgaagtttatttttcagcatttgcttttagatcgttaagaacatgcatataaaagttttattcacaaattacttttcgtttggatatatgtcgtttcgcttattccgcgaacactcccattttgctctgtatcttactttagacttcatattttagcaaggtcattttcataaaatttaatggatttacatgtgaaaatggagagaaaaaagttacactaggcttgttggttgctttcaaaacctttcgacatgttcagcttgttgttttgtactaactgataacaataaagaagtattcttttcgaaaaaaaaaagtatataaatagaagtataaaaactgtaccctaaacttattttctttgtttcgatcacatgtgttcaactttacgcagttaaaaaaaaaagtcaatcagctgtacgttcccagatcctcattgatgggacgattatattgtttttattcttcactaccataattcggctgatctccggtgtactaaagaagttaggaatctgattcggatactcgtatgttattgtgccctagtacattctgggaaaaaaacatggtaaagactgatgagattcgagtttgcatgttaacctgttgtcattcttaaaagaacaaaaacattattgttcacgtactcacgttggatcgggtcagaccatcagggtagcacaaaccatgtaatcacattattcttagattagatgaagattcatctcatattacatctctggagatccttttttttaaaaaaataaaagaatggccaataacaatggtagataggactttaactagatgtttcaactcgtatcttagttttagtcaactatttgaatacggaacaattttgacaggcatgaacttctttcggtacctaaatttgcaccaccatgagcataataaaaaggctactagcccatccttcgatagttgtttattggttagctcagtggttgcctctttgatcagtcccaagagccgcctcctgtagtcctctgctggattctgtccttatttttctttcctaggaggctggattacaatgtcgacactcgacagccaggctatgggcacccggcattgcacatgcaaaataatttcaacaaattaagcaaattgcgcatgtcagaccccagtttgttggtggtcagaagttgtaaccatcttctaatgtaaggtgctgtaacgaaatatctattggagacttacagttggaacaacagaaaataaattctaagtagggctgaagacaatttgtttgttagtttttcaatcttcttccttcaaagattagaataagtggaaatgacgcccttgatcagcaagtaagcgagcggtagttcagtctccgacaagtgaggccgaactagcccctagatcggctctcatggtgggggaatcagagtcaagttaggtgcaaaagaggtaagtttggaactgatccaatgcaaacatatgcaatttttttaacgaatcggcgagccgctaaacaaggaaggagtaaactgcacagtataaaagaaaaaacaggaccaaagctttggtcctaacaaactaagttataagccaatttcccagatgttttgctcctgctaagatccatgctctggcctcctctttgattttcgtcagcaagctattcgacaagagctccttttgctggaaggttctacggtttctttcattccaaatctctcccagacgaccagcagcgtcaacgaacggagggccttcttgggggcttctttggtgcttgtgattaacatatgcaaaatttaagatggaaggagcagatactcgtgcagtacaaggaatatacaaacccataatttgtgaggagacaagaacaatcaatatcaaatattgaaatttaactagccaagttaataaggctataaaatgctcagattcttttctttcttaccggttggggatgttgtcagaacctgtggtaaatagaccatctctagcacttgccagcattgcggccaatgatgatcttcacaccaaaatataatcagatttcgcttggattcatgccgcccgtgtaacctgtcaccactgaccacatgaacagcatgtgaaagcaactggtaccatctgctgtggccagatagcgatgagcaagaagctgccaaggagcagcaacggatccatgcctctcccctgtgatccaaccagcatatgacctggatcaaaaacggaagaaaacatgggaagcatatgcacttgtcagtacagtagtatttgtttactatatacttgttcttattccaggcatcaacatctgcgactctccacggcgctgaagagctaagccgccttctcttcccctcacgtccacccaagaggccatccatctctctctctctctctcttgaccctatctcctcttcgccgctttatcctgcccatttaaatacccatactgtgcttcttggggagagagaaggggagagagagagagagagagaatggcattgcagcaacgaccggggatgctcggcattggctgcagcaacgtcttggcacgagcaagggtgcagcaatgtctagcagcggcgtcccactccaatatgccatgtctacccgtcctcctgcatgtcaatggcagcaagaagcagggtagcagcttcctttcttctcagaggatcggcttaagtaggaggaggaggaggagggacctgagcggcgtcgttgtcgcggaagtgagcgccgccgccggtgtcacgccggcgtcgtcgtcgtcgtcgcctggcggcatcagcgtcagcgatgttctttggccctccgccggtgagtctgaaacttgaaacttgtcttcttcgtcggccttcgttggctgggtctctgaatctccgtgctttttcgccaagtgaattcagcgagggcttggtttcctctctgtgatatatttttgttgaatggttgtgcagagaaaaaaaaagactatttcttgcatatagtagtggcaaaaccacaaaagccgtcgagagtttgatggttttgccaataaattttatagaaaagaaggctcacctgacatatttttcctcaaataatgataacgtgcaggtgcattcctagcaatggccgtgctgggaaggatggatcagatgatggcgtacaagggagtatcattgacaattgcccctctcggagcagtctgcgatgtgcttttcaccgctccaggctcacctgctgccaaggtatgaatagcttaacagttaaatattttagttacaacatcgacagtgactcttcaatactacaagaaaaattttctatgcataatgctaccttttattttttttatgggaaacaaatgttctattatccttttctaagatttttgggcaagtcggaaaccctaagatgcacagatgaattaatcgctgccacttactgtactgactgaatctaatggacacccagattatgttgatttgcaaactagtttctcaaattagaaaaaagatctactaaaaaatctgcagcatgtagtagcaatataatgcttctaaatttcagggtgtccatgttgtcgtcgactgaaaaactatggctcatagaactcagttgaaggcttggaaccatacctctgttttcctttctgtagtcatgactgaaccacaaaagtagttatgtacgatttttcggtgtagtaaaaatcattaggtgtttccatttgggttaattttttgagattggatgaacacattccagttggagtcctacaacaaatctaaaaacattcttagatcatacgtgaaatcaatactaatactagcaggtgacaaaatcttgcagaaatacaacatgtttgttgcccagattggttgtgcggcatttggtgtgttagccctttccttatttgggcctggatggttggcaagaggtgctgctctttctgcatccatagcattcatgacaattacaggcgcctcacaccctccaggtatataatctttctttcaacagggatgtggtgctttagatgtgctcagcaggatttaaaaaaatatttctgattgacatctgtttttgtactctacttaaatgcatcatagcaaagctcaccatttccatgatgattgcagctgcaagcttgcctctcttgtttattgatggtccaaagtttcaccacttgcaactctggtatgccctttttcctggagctgcaggctgcataattctttgcttgattgtaagtatatttcccctcccagcttccttaaagtaaatgagattatcaaaaagagaaatatagcattaaccctcatactgtacttgtttcagcaagaggtggtgatttacctgaagaagaatttcaagttttgattcaagcggtgcattacttctcgtagcaatgacatgactaaaattcaagattgtaccacaatttgctagaactgcattggggagaaatggaggaaatgcagatttagtttccttggtcttatttactaaacaggaagaggagaaaaagcagattgatcgatacctgattgtgaatttgtgatcacagtgcagaacatgcaaatatgaagtacataccaatatctcatttaatgaaatctgataagtgtacaaataaaattccttcttttgtgattcataattgctttcttcatgtaatatacaattttgcacaaaaagaaaaaagggaggaaggaagttcacctctgttaatctgagggagattgaactatttatcctggctcctggggcacgattgcaattgcatgtacagttgcaataattacagattgcacatgtgaggcaactagaattcaaaaggaattaaaattatgaaatataagtggaagcgcaggaacaccaaaaaccatctatggaaaacctacagcaggggcacgctaaactaatactccctccgtcccataatataagggattttgagtttttgtttgtattgtttgaccactcgtcttattcaaaaatttgtgcaaatataaaaaacgaaaaagttgtgcttaaagtactttggatagtcttattcaaaaatttgtgcaaatataaaaaacgaaaagttgtgcttaaagtactttggatagtaaagtaagtcacaaaaaaataaataataattccaaatttttttgaataagacgagtggtcaaacagttcaagcaaaaactcaaaatcccttatattatggaacggagggagtagaaccacaacaggatacattgctgaataacttaattacataattcctcctgcactagtcctccccctgcttccccaccttatatacttggctaatcagtctatttgagtctcaggaataaagctatccactaatatgtgtcactatacatcccagccatcacctcggctgttaaagaacctcttagcagttaaatttccatatatttctgaaaatttagccaggcatttgctcctaacatgatagtgtgcttgtgtgtttcggctgatggcaactcctgagaacttggacatatcaattgcccaagctggctttacatactccactgtgcttgtcaagcttgcatttgcaaacaagaaatttagaaggatatcctcacaattgaagaaactgtctacaatctgtcttcctacctcagcttccttgctccaatatttcttgaaggccaaaccatggtccataaatgctgcgcctgtgagtaccatgttataacctccttgttgccgagcatacctctcattgcggtattccagtgggctgccttcagaaaggcgtggatagtacccaatgatcctgtcagggtgctccctccacaccttgaacccacgctctaagtcatcgcatgtcatcataatatcatcatcaagctccataacagcttttgtcttaatttcactgtctatgttgaatctgttgttcagagagttcctatcctcaactctgatcctaacaggaacgactgacttcaattcaccttgagctgggggctgccctttgttccagaccactacaatatccctcaccgatgcacaattggaataatgctccacaaacatcttcagattccaaagccgggcatcgtaggtcatagtcaacaatgtgaactgtgagtacttgcccttgattggatacggttcttctgcaccgttgcccccatagatgtagtgagttccaacacaagttagaaccactaaaattaacattactacaactacataaactcgccctttacaggttctgtagttaatccttccacaaataagagatcccagtttgttcaaattggagatcagagagcttagcttatggtatagaaagaacctctgctctacattgaagagcccactccttttctcagtatgcgggagagaccatctgagtggtaaggaacagttaattgtaccaataagcccaccagtgacaagaactagtataagaacaactccataaatcatgtaacctatggtcagacggtgaactgagtcacctgaaggtactctgtcaccatccattacaccaatccaaggtttacctgatggaagctgctggacatcaaggtgatgtgagcgtgccccattccatgcattccggcccttgagttgcttgttgatcacaaatgggacttcaacttctttgtattcatttgacttcaggatttcaactttgaacacttggataccatggccagatccacccccttggcctttaccaacacgataaagattgccattgtaaatgaatggcctgcccccatttctagtgcttaacattttacctgtgttatgaatcagattctgcttgtgtggaatccaaggactaagtggagaattactgtaccaaatactgatctctctatttcgttttgcaccataagaacttaaatctgttccaaggagccaataggaaccctggaaatttatgataaccgaatctaccaatggcttctccaaaaggaccttttccaattcccacttgagcggaaaatctaatgcacgatacaaacgaatatctccattcttgctgctttcaggcatcatatagacctgtgcagttagtcaagtaaaagcatatgtgactatgtgagaatgattgcaatagcagttttctccaacctgtgagtgaaatatttcaccttgtttttgtaggtaaacacatatgggtacgaaagatgccattcctcatctaacactactcccagctgctgccatgtcactccggcgtcctcgctcacagcagcagcaatgtcgccttgcgacgtaatgggattctttgtctcaaaaaacatgtagatggcatccccctgaaaacaattcagttgcacatccatcagggctggatacagaccaccatgatcgtgagcgaggacgcagtaaatacacataaaagtgacatgaaaaccaataaatttacatcctcagatatcagatactccagacaggtgagttagagatttgaatgatttaatgcccactgaagtaatcgaatcgtgacattcctgccgagattgccaatgcgaagggatacttcaaaattgagatgggaacacagtgaaaagctggttcgaagaacctggaggaagaggaagggcttggcgacgaagctgctggggaacccggcgtcctccacttcggcgcacgtcaccaccgggttcgccaccggccacgccgcgccgtcggccttcgagatcccccactgcaaggcacggagatcagccaagtcatctggcgtcgttcgatcggcacccccccccccccacgcatcgcacaccgaaacctaataagcaggagctctcgcgtgttctagggagcagttacgtgttcgatgggctcgagggagaacggggagtcgccgaggaagacgccggcggaccaggagccctcggcgtcggggcggcagcggcgggtggcgggcgggtgcgggaagcggtggccggcgcgggagaaggcgacggcggcgaggacgaggagcgccgccgcggcggagaggtaggcctgcgcggagggcgggcgctggatcagcccccggcggtgcgccgccgccgtcgccgccggccgcggggacgacgccattggcggcggttagagatggagagcgccacgtgtgcttcgccctcactgacttccccttcgttccgcggctccgttcggctagtagtacgtgtctacgtgacgcgcggcgttagcgaaggcgagcggcgcgcgcgcctcccaacgaacggcgaattggtcgcacacgggacggggacatctaccgggataactacagactacagttggatttgtagttgttttactagtgtacgtacatcaatatttgcgagatcaaaatattttgcgatcggtttgaatgtcacaagtttagcaggtacagcagatcgttttaatcgatcatactacatgcatgcagactaatatgctgagttggcacttggcagagaaataagggggagagagtgtgaatcggtgattaatagttgcctactacacttccatgttgaggcgataatagtaacaacggattgttccttactgtcccatataattatggagtctacaaaattagcaaagtgtgaagaaaaaaataacagttataggcataacattaaaaaaaagactttggtaattgcgtgatggcaagcttgtagacttttgttgtacatgatatctgtttggtggagcagcactctatgtgtttgataggttttagagctgacggcttactcttctattgaaattgctcttaggccaatttcaatggtggttaatgtaacaaaaaatttctagtggtagttttatagagttttttctcaataaatgagatgccattcaaacaaatttgatgacatggcaatatcattatgaagagagattaaaagagtttcatatatatggaactggatgtacactgtttctaagactataaaactatttgaaactggcattgaggagctcgagtattccatttcatccaactgcattcaatcccatgcattattattaaatgttatgactaacctaaaaagccacaaaatgaaattgtacactgaaggttttatttcatttatcgattcaaaactcttttgacgacataacaatattggtaaccgtgaaatgaaactttttgctaagaatggacttatacgatttgttattaatactttttgtaatttgtaaaagatgtgcccattgttgtattaagaagatgttagtacaaattttaagtgttgtctactattttatggaacatgtaggttttatccacaatgataatgttttaaacctaatacgtaaaagatgtgtatattattttactaagatgtctctacaaactttaagtaatgtctattatttatcgaacatgtaaaatttacccgtaaagatggtgttttacacctgaaatttcatatgtcacattatcatagacgaagttagatcacaagatgcattcgctatacctctaagaatcagagacattgtttcctttttctcattgcatcctcgggtaaatctgttgagttatttcttttcttcacacctaattatgtatgtggcaggtgttttttttctctcgattatcacacacaccttaccttactaaaatcctcctgttgaaaaccaacttatatgtgtataatatttgtgaacaccagaatttaaagaatgatggatagaatcatgaacctatggctctaccatcaccccactggtgctctctctacataaatggtaggttattttcaattacatggaaatgcacacaccaccacatgtacccacctaccaatacacttgtcggagtacggaactcctctagcggggaagctaggcactccctctatgtgagtttggctgggggagcaagttttgagcttgggtcctgattatgcaaagggaatggacacaaagcgagtatacatgttcgaaccgcacatatacgtaataccctactcttgtatggtggacatggatgatgaagataattataagtaagatgtgaaaagttcggctgtgttcgggagtaagggttgggaaccctcactccccggcacggaaaacggagcagcgattagcacgtgattaattaagtatttgctaattttttttcaaaaatagattaatatgatttttttaagcaactttcctatagaaactttttataaaaaacgcaccgtttagcagtttgaaaaacgtgcgcgcggaaaacgaggagaaggagttgggaaaatgttctaccgaacgcagcctaagtgaggaggagaagatcctttctcacccaatgtttggctaacctagattagatgagtgtacgagcccttttatcggtggcatggatcctccttttatacgtgagggggggggggtcgtcaatgccgatgcatgcatgtaggagtggcgcccactccactaaacttgatatgtttagccttgtcgctatccctccaagctagttggccagatgtgacaatcacacctatagactaacaagtggattagataggcaaaagtcttcgttccaattgtccctatgtctatctatgctcacttctacaccttgaagatgtagatctcataggtctgtatactcttattgataccttgaaactatagatcttttgagtctcatactcttcttgacactttgaagatgtagatcttgtaggtcttagtatgagccacaacgccccgaggggaacccctgttcccacttctccgataacactcaatagggatgtcacttgcaaaacttcatagtggaaatacactgcatttctaacatcacaggcaccttcttatatccttattcagtcccgaaattagtgaatcactgatatcccgggaaactttagtgtgtgtgaggaaaaaagaccaaaaccccttattaatagaaaactagtacattaaaaaggggtgatttgtggagaacctaggtaagaaagtagaaataaacttatcttgagacaaagtttcaactctaaaaattaacttattttatgacggaggaaggttcaatcacgatgagccaaatcttaattacacgtggaactgacacaggcagcctgtatgaaaagtgaaagcacaaggggaaatccatgcgcatgtcaacgcgggacaaagttggatccaggcaaatattttcaaagataatcagtaacattgatcaatctagagttacactgttcagcactctcacccagtgcagtcatgaaaaccgccacggctttatgtaagagatgcgaaatactatggtcttggtgctaggctgctagcttcatcaggcgtgcagcgaacgcttggtccaaagttcagaaccgacgcccacgacagcattcgtgggagcatcaaagcaatctcatatgaatctgtacgtgcctccatcaatagctttcaaaatgagatcaaaaccgaattatttacattcctaggagtaccgaatgctacagagttttacaatatctttctagtctttaggtatgagtacatgatgaaaaatccagccactgctccaactactattccaccagttgtcgcccaaaatgcccactgctccaaaataaactcgtcatcaactcatgctatatcaagtagtgccagtacgtggcagaaagcagaattgaactcaagagtgcaatgctataccgcgtttgtctcgaggtacgatttaaggttcatgccaaatattcctacaggaaacaaatacaacggttcaattatagcattacttcaagaataaagagtgatagaaaggaactgaaatttgaaaatcactagatacaaaagcgctgacagatttttgtacctgcaattaatgctcctatggcgacgcagaatgttccaacctgaagaagcaactcaactctgcttacttcaagtctccgggagctgtaaggatgcccaatgtggtaagaattaagaaaacccataatttatgaaatgtttgtgatgttgagctagttcacataaatttcacatccgccaaaaagaacaagatcccacaattctcaaatagtttattgtgattgtatgctacacaaacagaggtgcaggaacacaccaccttataccaagacccactctcataatttcatcttaaatcagttctaaaaaaataaaattatgggaatgcaatttgaagcactcaagcagtccccctttcttttatctggttatgctttgataattgaaacctgaaacataatgctggcattttatgttgcaaagtacacaccgccatggcctgtggacacccgcacaccacagagagtaaaggatggaggataatgaagtcatgcccccaaggccccaacccacaaaagaacatttgcaaaattttgagactagtactatgtacgtatccggtacataattggtgcgtcctccatttccaagtaattcttgcatttgctttcttaatttcatctatgttggagacttggagtgtattgtttgctcttaattggtattttctcgctagtcgccacaatatagctataaaatttaagaatctgaaatgtccatttgtagtgatgctaattgtagtttggttgtactgcaaatatgtgaaagatcattttacagttatctgatggatataaattctatttccatattggagaacgtgtttctctttctttttgctgaaaagctaccatgctacatgatcttctagatgcacgcagcctagctttatgataagtacagttggactcagtcgcttggatgaagggttcacaaagaaatagtagctgctagaaacagtttagaggcagcaaataaaatgcgatgtctgtttagatgcagggcttgcaaatcaaagaccattttagtccaagttggagtgacttcagggtgttaaacaaattatggaccatgcacatgatttggaatataaatgtagagagaagagtagaaaacaatggttgattgtctggttgaactagtaatttatgttcggttgtcaccttagatcgtttattaaattcaaaatatagtttttattaaaattcatacatttacacatatatttttactgtccaattatattcaagagcaaaaaaatcacaaaagtgagcattgttataaattataagaacacatgcattgatgaagctaaactttgtgagatcatgtggtctgtgagagtagacagaccttaagttgaccgcaattgaatcttccatttctcttgcagaatcaagaagtctctctgcttgaccatggattgattcacatctgacagtaagaatacacaatgaaggtctgcaagaaagaaacaagacatctgaaaagattgtattgcagatgaatacctttgaagataattttccaacaacatttcaatttcttcctcttcttctgttaaaacaaaaaaaatacagatgaaacaagtaaaacagaatcaaacagttaactactgacaaataagtgattgcaacactccttgtgaattccgcacatgccatgcttggaaacaaaaaaaaatccatgaaggcagtaatatgtctccaaaatataaaaagtccaatgatgctctcaatccataccttcagcaatctgcttctctaaaggaacggagcactccatgttatcacttaatttgtcgagcgtgcaatttcttcccattatgcatattcgacggatttcatgaggatcatctaggagatcaataagcatttgtttgagatcacctgctcgtgaacccagctcaaccttgacacatgaatagagacaaaattaaacttgacaaacaagtccaggaaatgattctaaagcgcagctttaataccaatgcttgtttgcttagacgaagctgctccaacacatcagctgtcaaccgatttggtagaacttcaagcaaagcacccacctgagatataagcccagatacccaaattattattttttccattataaatagagtcaatttgaacactggcatgttcttgatccatacatgactgaaacacaaacacaagaatacgacaacacctaaaataccacatgaaaatgcagggtcagcttggtagggctctttccgactgtttcccattttttttaaaaaagaaggaattctgcagtgatcatgtggcacggacacatggtactggtctatgtcttgtctgtgatttacaagggacttcaagaagatccttactccctagtgttaaacttagtaagtgctcagcaaaaagctaggtattgacagtagcttatgatttgtgcagttgacttgtgtgaagatcaggtgcttcaattagtccatttggtaaagatgtataaaaatatagaggaaggcgtgcaaatctgcagtcagggacttctaaatgccaaaggaaagagttagggtgcaggatatggaaataacatgcattattattggttcagttctgtatatatgtgctttgaatgaagttttcaaggttgaaatcaagaaaatagaggacaggaacaggaattcgtaagtgtcttaagtcacctattgacaatatatcagattgctccataaattgaatatgcaccagaaagtagaactaacaacatcaggatatacaatcttgtacaagatgtagagctagcagggacttttctggcactcacacgaggctcgatacgcattagccttcgctccaacctttgtattctagaaagcagggcagcttcgacaacctgaatataagagaaggcaataaataaccagatcatcttggcccagtatttggcaggaggatggtactctcaataatcgggtgaaaatgcaagcatagcatgacatgttggcaaatgcatgatggcgataaaaatgttttttgtcagcaatatatgttaaatgatttaatataataactaatgagaccaaaaaagatattgtacaatcaaaaagaacttttaaaatcaaagatgataatcctattcttgttcaagattccattcgaccgttaagagaaactaggaaaactcatggatgacaatcttattcctatgtgagttgaaaacaaagtaaaccttccatggaggcaaatataaatgaaacaattgacaaggaaaatatcatcatattaagactgttccagaccacaaatatggattaatataagaatatccatatgcctgatacctcaagttgaaatggcattgctggtccaccattgatatttcttggatttaaccgtggcagtaatgaatctaagaaggcctttcctcctgggctactcaagtcagataaaataattgataagtttcataacaatagtgatgttcaccaagtaaaatacaatttatattaaaatgactagtgtacaaactgacctgttgtaattgaatataagaacgcgttcatgcatagcaattgctcgcaaggaaccaagatttactaatatggcttgttcacggacctatatgaaatggtacatagaagcaatatgttgaactgtgaagcaggttgataaggcaaaaaattaacttctacataaatctagaatctagtaaccatgcaaacatagagttcaaatatattgatatggaagtttacatgaaaagctatacacaaatattctatgtatgttatcagttcatagtaatgaacagtggttgtcaagattacaatcacaatgcaggttactgaaaaagacagctaaacgaaatgtgagctggaaaatattgcagaattaaaacctttttctttacttctatctttgaataaaaaaaattgaactctgactctgtgattgactataataacataggtaattttgacaggcaacctgagatacttgtaacagagcaattgtactatcttcagactcttgtacatacacaattattagcatcactcattccattgtttgtgtaactgaaaattgtaggaaaagatgggaaacatatacagagtaaagtctacatgattaattattgaaagtatcttattaccagcaaggatggcattgaattcattagccatagcgatgggtcaacgcttctggtatctcgtaggcggaggcctataagaaaaggtcggtgatcaacataaatactgtcaatgagcttgacattcacaagaatgaacaaaaccacaagaaatggcagcattttcaaattctaaaactgttaccagtaaattatcaagcactatatgagagtttggtacagactacataatcatgttttttacagtccttgagaaacatattctttctacctaccacttgatttcaatagctgcctccggcttatttttttggtagacatcctcccattagattttacttctatcacctgagtaaaatttgatatccgggaaagttaatttgcatcttgcaatttgcagaagtcccagaatatgtaacaggcatttcattccaaagcaaacctacccttacagaaacatgcatcaaattagcatgacaattgcagatttattttagataagggagatgattacatccccagcctctgcatctaggatgcacacggccatttgagtttgcaaagaaaatgatctcaacgagggacataactccccatgacttgaaaaaaagagagagcaaaatctgaacctagagaaagatttattatgcatgaagcctactggtagccctccatccaaagttacacgtttggattaacggcatataatgtattgtttatttacgtttggacactcacaatgatcatattgcaatatttccatttggcttgttgagtggacttaagaccttgagaacatgagctattgcaatccataattctgactaggaacagaagttagctgatgcacgaccttgcaaccttatccgaatcgcttattagcaaataaaaaatcatttgtgagtaaagcttttatatacgtatccttagtgactaaaaaaacaaatgcggcgaataatctacaatgaaaaaaaatcaaattcaaaattaagttctaaaatttaaattttgacttatatgatcataagaatgagtcccttgctgtctccaatttaccattaaccattacaaggcgttcgatcgccgatcggttacctcgtagacgggctccctgatgccgagcgagatgtagtcggcggagaatcgccccgaccccgatcccctcgctgcggcctcccttgacccatcgtcccctggcttgtcctcctccctcctcacctccacctccccctcctcctccaccgccgccgccgccgcctcctcctcctcatccttggtcacggcccgcccatccttcccctccgccgcccgcagcgcgggcagcggcggcagcaggaggaggccccccgctccgccccgccctgccgcggagagccccagcgacgtagctacggcattccccctcccctgcgactgcgagccgcggtaccggaggcacgcgccgccgtgcccgtgctggtgcggcggctggtggaggaggaggaggacggcggcctgcgacgagtacgacggggacgacgaaacggacgccatgggcgcgggctccgcgggggcatccacgcgcggcggcggcggcgacgccggcggcgaggtccacgtggcagctagctgccgcggcgcttctcctgttcctcgcttgttttttttttctattttttctttttttttttttgggatctcgcgcttctcgcctcgaagttgaaggcgacgacggcgaggcgagaaggaagaagcggcaagggaaaatgctatccagtagatgagctggtggctgagcgggctcgcgcgggcgggggcgatctgggccgtccgatcgcggatcggacgggggcggatgctccggtgggatgacgtttgtccgttacttctggctggtggggcccagttctattcatggtggggtgggctgccagctgttcctctgtttcgtcgtcttctccagcccggaatatgaaggtactggagatcagaggacccatgtgggtcccactggcagtgtccaccggcatggattagatatgatctggctactactataccgtcgtttgagttattgagtactccgtagcgtcgacgtcgtatagcgacggcggagggtcgctatatttagccccgtcccgtctcggcttgtttgtttggttcatgctattttcagccttgccggatttttttgggaaggacaaaaattggtttttgctaaaattttcgagaatgattgccatcgggtgatcgggcgggggagcagaactcgggcacccccccccaccccatgcacgcgcgctcttccctggtccaccacgtgtccacacacacaaccctattacaacaaattacccacatattttaaaaaccctttgttaagagaatttggtttatttgttgttccaccgaaaatgtttcatctactacactcataatgattcactatctatagatctaatgttgcagtgaattgaaatactccattgcaacaaatcatccatatattttggaaaccctcggaattcgtttcttttttttccaccaaaaaaatgtttcacttagtgtacttataatgtttcactatgtacggttctaatgttgcagtgaattgaaacttttttttcgttatttgctgaaacattgtttttatataaggtgaaacaacacccgattctaacgattgaaatatttccgttctacttagtgaaacaattccgatataactggtggaacatcgtgcaacattttaaaaaaagtcaataataagctaaaaaaatttcgtcgaaatatatccatgtgtggtcttgttttgaatatttaattacaacgaatttaatggtgcaatcggatcatgatttggataaataatttaagagaaaaaaaattttagaagagaaaaaaattagtttaaagtggttttacacatatgggtagcactgacgtcagcgcccgatttttggagatttggatcggacgaccgatccctagtcacctcctcaaatttttggcgaaaaatagctatgatttgtctggtctgcttaccaactttaagaagttatactccctctggatataattaattgacatttaggacaaccaaatatccaaattacaaagaaaatgaaaatgctcccgatgccgagtagttcaactcaatgagcggtaatttctggaaaatccctttgaactgaaattacaaagaaaataagccaggacttttctctaaaaccatgaatataactggccggaggtagtattttgatattcaagtaagccaaataatttggcaatgccaattttgttggctacaaagcaaccaggtgagacaaatgctaaagcgaaccctacttactattcaggtatacgccataaaaaagtttgcagatttctttcatgttatcaatggcacaaaaaggatttctgagtgcatctgagaattcattctcttttaccaacatgaaaggttagtattactctggacaagtttctttgggataaaagtttacgtctcccaaataaacccatccacgacatgaacgaccacaatgtgagatgctcgaaggagtacatattagccctaacaaaaactacccgttaaaaataggcactggacaagtgttaggaagggctacagcctacaggcctacagccaaacgaagcatctgagcactggagagaacaagaggtcagggacactagcgcttcatcagtgggctagcagccgagaactgcaagtaaaagaagttgaaggcctcaactacttccatgtaccacattgattcacggtcgggctgcgcggaaagatcgactagcttatgcacctgcaacaatcaagttcaaagtcgttaaaagcaagatgctgataagagtcctcaggaaaactaatgcagtgggtaatgtttaagtgcttgtacgtcttaaggctgaagcccaacaacagaacttagtttctagttcttttttgagaattgaaagtgacaactacagtaatctgcctagatatgttttgccaatgcctaaatctaacccaagcaaaagtgtactagattaaaagtatgaacaacaaaaatgagccaccatcttatccttgtcttttcatgtcaccaaaatagaagagagcgtggttgatacttaatacatgcaagaacaagccttccacatgatttcagtagctattgcaagcctgtcacataatcaggaaatacatggttcagcaaagatgaccattgcaaggggattacagattgcaacttgtcagtaacccgtcactctgctgcaaccctgcaactgttgttaccaccatgctgattggtcaatgtcaaagttactagttgtttctactatggtcatttccctcaaatttaggttggctcaagaataatgttatgtaaaattgacagctgagtagaaagttcttcaaatctccagatctaacacccacttttgcagactaatgttggccaaaattcagaaaaattatctcgaatgtaatcaaccaataaagctccaaatgcagtacatagtagtattagtaatcccttgttctttcaacaaatgtgttcagaatgtcaggttatgtttcatatcactaactaaaccgaatggagctttctaaaagaaatcatgtattcatggtttcaagcttttcagctacggttatcacttgaacacaaacagcaaccagaaaggcatgaaccaaagatttgcattaagactcctttacctattaaattgtctcttcaattataatgaatacatcatgaagatggcaattgcctacaaattgaacacagggtgttgggaacaaaatagaactgttggatacgcgaagttgagcaaactaacaatcgaaagagatatgataattgcatttgcttatagagaactgacagagtaatagataatggaaaaattacacttcaaataagattttgatatataaatggctcctacaatctgatatggacagataacaagcacaatgatacaatatgtaaccactttgtttctgtaatagtaatacgaagttgaagtaatatgatcccggatgaatcaagggtcttcttctcatcagtatcaccaaatttaggttaattaactctaatttggcactaattatcaatatgctcgtgtgattagacacggatcttgctcttcaactcgttcttactcctaacgctatagaatctagagattgaaggctccagaaagtgagatcactaggatggattagtatttattttacaagctaaatctaggagtctagttctcttttcctttcttttaaatcatttgaccaagcaaggtttaaactgcaaatgttggcgatgttcaaactttgaaataactatatggacagaaaaaacaaaataaatatactgtatagaaagaaatatgcatgtgaaaaccgagaaggtagggacacacaaagaatgagggaagtaaccttaatcactggccgattggcccgaggaagagattcctttccactatatgacccaagaaccatcacatacatgcctacagaataaaatagggcatcaactagagcaaatgaatcaggatccaggaaaagtaccaaaatggctataggtctacagcacaaacagagtaaaaggctaaaagctgcgcaaaagattaagtagcactccactccactttgccagcaaattcggcatgccaattggatggtaccatagcaccacatggcagatgagaaatcaagcatgaagcgcaaaactattttgaacaatatgcttgtaaaccaatagcattctcgtaaataacacatgttaccatctaaggacaaacatgccctgacaataagttaggttttgatagccaccctaatggcgaactagtgattattaggatagtgtatggttccagagttgatggaaatctcaatccgtcccgccatgaatcacatgatacaactaatatgattaatccacaactgcacaactatatgtgcattttgacgattttccaacaaaaaaaaaggggacgccacgagcaaagaaacaaaccttctcgccatggctgcccctcggcctccttcggtgtgagcgtgatctcggcgacgcaggagccgtcatccacaagaatgtgcccggcgccgtcgcggtagtccgccagcaccaccacgccctgcctgccgccacaagtcgtcagggagagatggagctaggagatggggggaatagggaatggtggggaggcgacctggagccagacgcgctggaagcggatgccgtagagcatctgggcctgcgaggtgccgtccgactccgagggaggggcctcggtggcgccggccagctggcaaccgaagagcttcagcgccgcgagggtgtagtccatgttgttccgcttcggcgccgccgccgccgccgccgcgccgccgacaggttgagcaccggaaccctccattgcggcgccctctctctccggtgctctctcgggtctcaactctcaacaaacagttcaactacactgatcgcagatgggccgtgtacctgggcctaattaggcgagggccactacatgatgc

SEQ ID NO: 7887 - DNA, 6254 bp, Oryza sativa
agcattggaagcatgaggtttttcagtcctcggccaaaaaaaaaagggtatcgaaactacaacttctgaatgactagtttggtacactcccaagaacactaatcactgtatctgtgcctcaccaatcagtgtggctttgtccatgtccaacttagtaatttcattgctgttgcgacccctatcctcaatttacttcacctgcagctattgccttccatttcgtacctttgcccgcaaaaggattttcaggtgatttcaagatttaggataacatattgttacctaatctggaatgctttcttattctctgtttgagacaagaaattagtgctttggggactgggcagtgctccttgtcctcttcagtagtgaggacttgtttttttttttttcctttcaggttctcattcttttgtatttgcctaataatttagagtgggacctttatcctgtttgagatactgagacataactatgggatatcgttactccgctatgcatttacttttaagtaaaaaattgatcctaagtaattttgtatatacctcaaattctcagtactggcggcatgcatgcttgtagtcctgtttattgacatatgaatgttcatttctccaattaacctacaatccttcttttgttaaggtgactaggaaacaaacttttcaccatcggagacatttccctgtcttattgcaatggaagccaagtttttccggtttctgaagcttgtcggggtcggcttcaaagcaaggacagagcgtgaaggccgtgagttgtttctgaaacttggttacagccacgaggtgcagttcactgctccacctgccgttcgtgtcttctgctttaaacccaacttaatatgctgtactggtatagacaagaatagggtacaccactttgctggcgctgttcgaaacagtaaaactccagaagtatacaaggggaaaggcatattgtacattgatgaagttataaagctaaagccagggaagaagcaaaagaagtaattaaatttgatttttagcctgctaagatgctctgtagcacatttttagtggcgcttatgttcttactgtttcattgtgttggatcatctttgtcccggtaccatacttaaaggcttaataattcgctgtatgcaatgtatgtgaatcatatgatgaaactgcatccaaaccattgggataatccaccatttccgatcataataactttcaattgtttttttgttgttactatactatccagcccaactgtcctagacattgaactcagtgtaaaacaagcttagatctttgcatttgagggcgttttttttttttactctgagctaatctgtacctttatatgtatgatgttatttgtgatagtgatgccactaaaggcaaaactcaaaactccgctcgcgaaatttccccatgaaagtaatatcttactctatttggtaaatggagtcatgtagttagacttgaaaaacatttagcgtctaatatgcacaaaaatatgaaaatttgtcttgtaaaactgaggtcaatagatttgggcaaatctattctcatatctatttgaaaagatgagcatttatattttttttagttgtttagacaatagatactacttttgaaaaactcaaaaacttgttcggcatcgagctacattgtagcatcacccaaaccactcttaatttgggccaagtttatagagtgtaagtgtttaataccttagtatttgacaatatctgaatttgaaattcatgatattttttttccaaactttaagtaaagcccagcactataaagcatactgtttccctgttttaatatatttttattaatttgttacatacttttttcctggttttaataactttaatgaacatatgagaagaaaaagtagccctatgtgtgtcctgaattcctgattgataaggaaaaatgaaggacgacagtaccgcctaattaagcaccggatggtgatttgacggaaatgtcaaaatagcctagatgaatgtacagggtagtaggtacaagtatcaaacagccggctgatcattttccataacatatttttgtcaaaattttgaaagtgaaacgcatgactaattggaacagataggtgagttgtccaatatacacgacgcttactccttgtctgcatttacacaattagctaacctgctatcaaggaaaagcatttgttcatcaagtcaatattactacgaatttctccacttaaaagtctatcaacaaataaaactgaaaaaaaagcaaaaatactagtactacaggacaaagctcatcatgaaattaaatggtgtacccctaattacaaacgaagcatagaatcgcacaaaattgtttcaaccaaccataattttttttgcgactttgtaatcgaagaagaataaagttttgtgactttatgtacacacaaattgccgccgaaaagagaagagaattaacggtgacgacaaggacgccttcctaatattagtggagtacttctaatactttgactaacaatcagcgggacacgtcatcatacatggtcaccaagtggacgtgggcacgcgccgccgccgccgccgtcgcagtgttgctccacggaggcggtgcagtcgccggcgaccttggcgccgtccttccccggagagtcggcttcggcgccgcgtcgagcggagccccacgccggcagcctggccgagaacgtgcgcatcagcgacgacacgttggaccacctcccggactggccgagccggacgctcctcccggcgcgggcgccgccgccggcggcggcggtggtgcggaacgattggaggctcgtcgtgcggcgtagcctcgccgaggtgacgatttcccggagcacgtgatcggggagcctcagcgtgtaccgctccgcggcgtcgtcggcggtggcgggcacggcggcggcggcggcgagcgagtgccccgtggtgtgcgaccgcgggaactgcggcggccggcggccggacttgctccgcagcgcgcgcttcacgcttccgatccgcatcagctcggccgcctcctccctcctgatcctctcctccgtctcctcggcatccgcgacgacgacgtccaccgtcacctgctctggcgccgccggctgcggcggcgcagccgcaacatcttgcccggtggtcaacgcatgcggcggcgccagcggcggcggcgggacgccggcgtcgaaggcgaggttggcgcggcagacggggcacgtgacgtgggacgccagccacgcgtcgatgcagtcggcgtggaacgcgtgggagcacctgggcagcagccggagcgtctcgtcgtcgtcgaactcgctgaggcacacggcgcactcgagcgcgcccttgccggccttgtgcgccttcacgtcggcgtacgccatggtcgggaacgcgcccagcacggcggggtcaagccccctcaccctcctcgaccgcgccgccgcaaacgtgaacccaccacccacacgtccaccgccgccgccgccgacgccataccccccgggcccacccaacggcccgccggcgcatcgccggatgtagatcgagaagaacccgaggaagaagaaggcggtgaccaagaccacgatcacgacggccatggacgggttgaagctcttggggttgaagtagttcgggccgggcccggacgtcgtcggctgcgccgcgccgccgccgaccagcgaggcaatgacgacggcggcggcggcgaggaggaggaggcggccattgtcgccgcggcggcgtcctcgcggcgaccccatcggagtcagtggctttctcctttgcccctttcgggtggggcgaattgatgggagcttagctaaggcgggagggagagagtggcacggcaagtgttgatacgtgagaggacggggataaaaagggcgggagttaacgaggtgcagtggcacgggcaagggtttgttaaaccaccctgaaggaaaaaacggaacgtaccccgccacccattttcctgcacaaaatgtagattttagagggcggctttagagggatggctgaggtgtaaaagatcggtggtggatggtagtgacacgtagatggtgctagagccgtgggatatgagggagggagggaggtgggacaacatcgaaggcgagagcatcaaatgtaaagtggttatcacacagaagcgacggtggcgtctcggcagaggtatcagagaagatgggtgcacctcaccactgctcggttataggaagagaagggttggaatgaaggaggccagtttggtgggccttgctagtactgtcgaggcagaagaaggctatgcacagggggtcattggtggtggtggactggtgggtgaccgggagggggatggggattgcgtcagcggcggtattggggtgaaggaaaggagaaaggaggcagtagagttggggggtatcacacaaatcttaaagtcatcctatccattaaaaaaaatcgactagtgctctcttccagttgaccgactaataataagccttgtaatgtttcattttgaattcccacgaaacactacggtggatattacttatgtgggcaccatgggtaatatgtcatcacgtgtccaaagtgaccaccacatgtattggatgagtgggatccatgcacgcataaatagccactcatcctcggtgtatctatgatcgtgattggcacctttcaatattattaactatgatgccaagtagtgagtacgagagatattcgacggaatagtttatcggtcaacttcaacccaagataggcccatgaaaccactcgaaaatgtcccaggggacttgaaccaagatgctacattccacgatcatcttaattattcaaaactcttactaatgctttgctaggccctaggaacaacgactagcctcgtactttctttacaagcaattgataatcatcgtaaatgtacaaatatggataagaggtttcaacatattacaacttgccctagaattttttaggaatccaaaaactttttttttaaaaaaaacatatatttcaaactgccctggcggtagctaacatctagtctgcatatgaaatagagattaacaaattgggcagaatctttccaaaccgtttccgtttcaaagaaacctaagcataggtgacgagtaagatggggagttctcactaaagtctcatcatcagctctaattcaaagcaatgtttctaatattaataagcgtctttggaaattaaagataccccttaaagttaagatttttttctttgatacttgcgtcgtggagtggtgttaacaaaggataatttgacaaaaagaaaatggcaaggataagaacgattgtttttgttgcaatgacgagacaattagacatcttttcttcgaatgtcgttttgtccattttgtttgttccatcatccaaatagcatatggacttcttccaccgcattgtgtagcacatatattggggagctggcttgctggaatccataataatctaaaagcacatgacctgttaggagcgtctgctactggtcgctttggctatgcaggaataatatgcctttttattaaaaaaagccacatcttcaccattgcaggttatatatcatcttatccattggcttcatacataggcttttctatagaaacctgtttcgcaggatatagtgcttgcggtatgtctacatttggagaagttggtcagggagttttttacctagggatatgggtggtgatctagtcttaagattggtggttcttaatactccgtgcttttgatggagatgataaatgaattgttcatgggtgacggttgagtcttggattgatggccctcaatactccatatcattttttttctttttaatatggatttgtatgttcgactgtgtgtatcttagttatgtagagaccgaaagtgttctcagaaaaattgtataaccttgttgtaattaattcagtaaaaacttccattattaaaaaaagaaaaggtgacgagcaaggtacgggttccatatgcacgcacgtggaacatgccaagtgcagtgcagagaccagcatcttttcttccttaattgtactcagccatgctgtgcctgtgcaacagagcaaaagcttctcctaagtcctaaatcttgttctcttctgcttgttttattgaggcttgcagctaaggctgaactgaatcgacgacgaccaaggatagcgacgacgctgacgacgaccaaaacaaaaaaacgatctttgcgtgaggag

SEQ ID NO: 7888 - DNA, 48035 bp, Oryza sativa
cgaggtgccgtccgactccgagggaggggcctcggtggcgccggccagctggcaaccgaagagcttcagcgccgcgagggtgtagtccatgttgttccgcttcggcgccgccaccttcgtcgccgcgccgtcgacaggttgagcaccggaaccctccattgcggcgccctctctctccggtgctctctcgggtctcaactctcaacaaacagttcaactacactgatcgcagatgggccgtgtacctgggcctaattaggcgagggccactacatgatgctatacctttcgaagacaataaacacaagtgtatatcatagcatacaggtagaccaatcgtcttgtttaagagggcagctacaaaatagcatcccgttacaacgggatagacatgctaactattctcttacacgagtattacatgtatcaggttctaggtattataggtatatcataggtatcgggtaccatatagctggtaccacagcatgcatcaagtatcaggtaccgtctcatagaaaggtatcccgtttcaacgggataccgttgtctaggttttctacttatttaaaaaaacaactaagcgagatattgaggtgtgattttattagaatgctaaatttggtagtaaaatgagcatataaacaatagacaattggataatggttttaccgttgtagttagacttgtccaggcttcacaaaatttctagctccactattgctcatatataccatacacgatactataggtaccatgttgatgtcataaattgtaccgacatgatacacatgtccgatactagatctggtatcttacgatatcatgctactatcattttagcattaactgttacgttagaacggtataccgttttgtaatatgtagatgtagtacatacataattaactgttacatttgtatgggcctaattagacccagtgtgatctatcagaaggcccggcccggttacaagcccgagcatttcttgcttgcgagtggagttgaacggaccgcaccggcgtcagctcacgaggcaggaaagaaaccccaaacccgcgtcgccgacgccgtcgccggcacactcgccttcgcctcgcccaccaccaaaccacctccgatggcgcccggctcctcctccacctcctccccgggaggaaaagccgccgcggtgggcggcgaggcggggaaggagggcggagccgtgccctcgcccgcggcagctgcctccgaccacgctccggtggcgcccgacggctcgccgggaggtggcgcgctgccggcgggcggcgaagcggggaaggaggacgagggcgtcgcctcgaccggctcccgcactccgctggcccctggctcctcctcgggagaaggcgcgctcggggaatgcggcgaggcgaggaacgacgacgaagcgccagcgccagcgccacggctcatcgcctcgcccaccgccgccgccgccgccgccgccaccactgactacccacatgaaggcggcgaggcggagcaggagggcggcaacgcgtcatcaccatgtgaagagcaggaagaggatgacgacgacgacgaggaggaggaggccccgacgcatctccccttcgcaccctcgtcggaatcggaggtacgtgcgtttgccccctcagttcttgcggttcatcccctttgtctctcttacccgtctctccaacccattttgcgctgcattgctttcacactctcgccctcgtgggcatttcgtcaagcacctggtggcgggtggtgcttcgttactgtcatttaactcgtgggcatttcgtcaagcacttggtgtgcttccttactgtcctttaactcgtgggcattactgtcatctaagtgtccccaatgtcattcaagtgctttcacggagcgtatgtaccatttacagttgaaaacttatatatcatctttgcatgctcaaaattctcgtaatcaagtgttccatgcgaatgtgaaggtttaatccacaattccgcatggttctagataatttttagtgagatttctgtgtgttgcgagcttctgctttagctgacagttgacttattagaaatgacttctggatattttcaatcggtgttccattgctttattgatgttttctctcctgcttgtaattatatgcagttacctgatgataagtcaacagttgatcccagcttcaccatctctctcataaggaagctggtacctcagggaccagatgtggataaagagttaaggtgcaatttacttccagagattttattttcagttagagttctctaaaagtgaaagccgtgtgctagattttcatgctgattttgttatcagctgctaacctctgataccatgtaaacagtgtgaagcagggacgaacagaagaaaaggatgctagttctgatgttggggaaccaaaacagcctcatgacaaagatctgtgggacaatgaaggttgcaaactgtgggacctttcagttattgaacctcaggcagaacttatggtacttatctctatacttgatagttgatatcatgtcatagttgataactgtgcattgaatttaagttctacgatgagatattctgcataattattgattatgattgtgaaattttcggcatgcctctatcccaatagcatgccagcatcaatcaacatttgaacaggaagattagtatcttctactaggagtcgattcttatctattaaaatatattatttacaagaaagcttttcatgatctgcgggcatgtactatttgtaaaagattgtgctactgcaatagaaggtgaatcatcaattgagttctaagattcactgaaactactgcttgcaccatcatcgaatttttgtactgttgtattgtaagtctttaagtgcattgactgcttgcgggaagcgctaactgtgcggatctttaattcttgtaggttaacaaccttgtacttgaagtacttttggcaaaccttcatgtgagacaatttcttcgagcaaaggtgaagtggaatatccttctactactgcctccacgtttttgctagcaaatattttaataagtcttgcttctctgaattttgttctccacaggaaatctgtattgggatcataggaaacttagcttgtcataaatctctggccaatgcaatcacttctcataatggattaattgctactgtcgtggatcagttatttcttgatgaccctggttgccttactgaaacattcaggttggtattcatggaatatggtgaatgtgcgcgtaattatgtagtggaaacctggaaaccaccacataaaagtttccaaaagttttttaaaaaaatctcaccaacgaagtttgatattaaaattgtgtgtggttttctaatatcatctttactatatgtaacatttttcttgaaattttttggaaacttttacggggtggtttccactacatatttacctatgatgcacggcttgtgctaattaagactatctacatagcactttcttgtttgctctgacaagattaaaaacaataagcacgctattgtccctttgactcctttagcaaattgtaaattattgaacctgtaacaatatgtttttagcaatacaagttcttttatcacctgaaattaagcatttatcatgtggaaatgaatcaggcatcttactataatttatgcttacaacatatgttacatgcagacagatagtcatacattacacatatacagcatcactatttagtggattgtggattaaaatgcttgaatatacagctgttcttaagaaaaaaaagtaaaatgtaacttcttttagcacttgtaagtactccttattatgattccttattatgcatctccttttcttcatacacattcatgttatctttctactttttttttccttttctatttttgtatatagactatcatgacaacccgagttctgttctgaagtttactagttgtgcagtcatagtcacacagtctatttgtatacaggttattgagcaccatttttcagagcaacgcatctatgtcatgggctgaagctctcttacctgatgagattctttcacgtattatgtggataattggaaacacagtgcatgctaccttacttcagaaggtgaagtacttgtctatccagtcaactagatcctaataggttgataacttgtattgaccttagcttgatgttgaacattttaggatgatttatctatttgacattctatgtaataattgctacttttattcttttacaaatgatagttagttagatgtgtttgcataatttgttctttttcagttgatcttattatgattcagtgttagaagggcgttatgtaaatcatttctgttgattgttacatgtatggccactatcaatgtaatgaccagacctcttaatccattgtaatgtgtccaggacatccaaacaacttcttgattgcccttctgttaggagttcttatttatttcatcattattggcaactttgatcttacctgcagttgtttctcatgtttcccatgaggccatgagtctgcagacactgaagatataattgcaaactagttttgaccatttatggcctatgaactattttggaattcatccaaaaagctgtgcacttagatatttgatttagtataacttaatatatttgatttagatatttaatatagttatatggtgaaattgtggtacggctgaaatcatctggccaactgacttatggcattatcttttgaatcctgtacatgttcaaaatttgtgactatttcctttgtaaattattgggtgcagatactggagtttctatcagctcttgttgatgatcaagatgtcattaccattcttatcgagcccttgataaaagtgggtttagttgactgtgctattggtttgctattaaatgagcttgaaaaatcaatggatgggaacaatctagacaggtatgatttctgtgaattgaagtctgaactaacttcaaaattgcaaaagtgtacagttcatgtaaaattatctaagaaataagaacagatgactgtcaaatctagtgaactatactctatttacagttcataaagcatacaacatatcctcttgctataaatctaatgcatggataggtccataaatgccatctgaaatgcgggcacttgatgttcaccgataatttagtctttgtattttacagttttcatgttccttctgcttagtctgtttgcattaaccaggaattatggcatagtcatatttccttctaatcacttttttttgggttttcaaactttgagtgaatagtctagcacaggaatggaattttagtaccttgacttttttttaacacatttcaggtcagattctcttgattcaatccttcgacttattgaagaactgtccgccatagacaactgttcaaaagtaatgtcatcaaatgaccaattgattaaagcactaagtaatatagtcaagttaccagataaatttgaggtgagcatgatgctactaacagttcatttatttgattgcatgtcccatttaacgtcgtgtgcagttgaccctgcttactaaatagttttagtctgctgtactaattgatacaaattttaaggtatgccattctggattaaaagcatgaaatatatatttcaagaatatttttttttcttattgaatatatttcgggatcgtagttaggttgataagtgctattacttgtgagtcctcaatagcctcagttcttacctggattttagcacctgaaaatttatgcagattagatataattatgttccagatgagcatgctgatcatgttatatattcacaaactatgcttcaggttgagggctattgtgcttctgtggtaatcataatagcaaatgttttgtctgatggagaacatctcacacctattctgtcccatggtatgccacattttgctgagcaatatctcataattcttagccattgtttgcgagttgaaaacatgactatttagatacagtgtcacagtgtggtgttatattcattgtttcagatttacccttactggagggcctatttgacattcttccattgatctctgatgataatgaagctcgaaatgcattttggtgtatcttgacacgtttactgcaacaagtagaagaaggagaaaccatcacgaactcttcaaaactcgagcagtttgtgtctatcttcttggctaagttcaccctcatgaaagatgacattgaaagacatgggattcaaacagaagctgattcctcagttgagggtgtttctttgaagaatgggctacgcacatctgtatcctttataagaaaattcaatcctgataccatcatgcccttcatggagatacatagatcttagttttcattcccatgataaatgcatctaaacttaatatatcattgcttttcctatgctacatttttttaaaaacagctcaaggcgatctgcagtatcacggagagatggattgcggacaagtcctccttgggcaaagaagatgcttcactgaccgaaaacaccattgaaaatgctaaagagctgctgactttctgccggcgtgcaatgggtattgctgacctgtgagtttggaatacggaggttttgacgtagagggcaaccacgtacgtgaaaaattactaggagttttgctgtatagcacgagatcatccggaagtctgttaaaaccaactaggagttttgctgtagaggatcacagtgatgcatagatcatcagttgctaaagtagatcactactcacatagctctgccaatttacattgatgtggttacattattggtgctagcgatgtaatgaacgcgcataaaaatgatacggtgctagaggtttctgatcaacttgtgctcatggcttaacgagatgctggcaaacctattttgttgcgaccgttaccaaattgcttcttgttgtttcgtgtggtaacacaccaccacgattctattgatgcaaaatgagttcatgcaactccgtgatggtatgggctatgtaggttgaactggaaaggttactttaagttgggtatgaaaatttgggaatatttgatactaaatttgataatttgcaaagcactgtaaaacgtatatgcatcttcacgaaccttgtctcgctttagggagcttctagcaagtataattactcttacaatctccaactctttgaatagttcaaattcctattccagattgtatgacggagggttgttaatggaaccttaacagtgatggtgtttttgggacaaagttgcttgtacgatggtatttcataaaactcgttcttgtcgatgacatttcttgaaattgtgcgcatgtcaatggtattttttggattttctcaaaaatgaaatagacacccccattaatgaatgatggcgtaggatgtggattggggtccccagtattagaatacaaaatgcagaggtgctatagaaattacagcaggaaaaacctgcaccatctagcacaattctagacctatgattaacatccacaggatgaatgtgatagtactagctataagataaaatcctgatgctacaatacatgactgatttaaactattagtttttattgtgactgctcaagtgctttgtaaaggcaattgagtagcaactttgtattagcaattcaaactgcagaggatccggatcccgtaggaatctgctagtatatatacacatgcgtgaattgttcagtattgtcgtgtgccatctttgaaaaataccttttcttttaaggattatgagagattttgtgtgagcattgtgtgaatctcacctatttcctgcttagcctctccaaatacaaacataccaatgtctagtatgtacgttgggtgagttttattagcttatggactcggttactttctcttttattataaacatgattctcaaaggactcggttactttctcttttgttataaacataacatgattctcaaactgctagaagatacattttggataaaccaatttaatatagaaatttatttaaaaaatctaaataataaaatatttaaagtagttaatatttaactaattatatgttaataatccattttgatttttgcaccactaactaactcggccaaacacaacctaagatgaatccatagatttcaccatagcgtaaagccgtaaagttataacttataagcatatattcaattgcctttacaaagcactccagtttacaatggaaaaaacacatgctacaaaaccacatatttcgatggttttaactgaaaaaaagaggtgacctcgttttctttcctcaatgagagcagaggcaagagaaaaaaaaaagagtaaagtccatcaccggtccctaaactttaccgctgtgtcatcccagtccctaaactcgcaaatcgatcgttcaagttctcaaacttattcgactgcgtcatcctggtccctaaacttgcagatcacttatttaggtcctccaacttgttcggttgtgtcaccccggtccctaaacaggacggtctaaaaactttatatcaaaaaataattcataactttttcatgtaaactctaatgaagacaaactttatatcaaaattgtagccctcgacacgacctacaactttgtagttgaaaagtttttgaattaaaactgtttagggtcccaaaatattgttgaatatttatagattttgaaattttaattttaaaattacatattgggacaaaaaatgacttaaaataaaaaaattcaactacaaagttgtagatcgcatcgagggctacaaatttgatataaagtttgtcttcattagagtttacataaaaaagttatgagttatatttaaatataaagtctttagaccgttctatttgacctagatgatattcaaatccaaatttaaggaccagggtgacacaactgaacaagttggagaatctaaacgagtgatctgcaagtttagggaccgggataacacagtcgaacaagtttgaggacctgaacgatcgatttgcgagtttagggaccgggataacacaacggtacaagtttagggaccgatgatggactttacttaaaaaaaaaaaacaaaacaagtgaagtgacctcagctgctgcggtgctgcctgtccctccgcatcaccacacagcacgttccccgagctcggccacacccagtaccaagtgcacagccgcagcgccgcatcaccgccttccatttccacatctagggtttcagttgagtcgagttgagtccccctccccccacggccccacctcgccaccgccggccatgcccgacgcggcggccgccgccgccgccgcccaggacgccgacgccgtgatgcgcgacgcacccgccgacgcagcagcaggcggcggcgacaacgacgacgacgacggggatgacggcacagaagaggacgaggaggaggatgacgacgaggagggcgatgaagaggagctgccgccggccgaggatccggcggccccggagccggtctcggcgttgttgccggggagcccgaaccagctgacgctgctgttccagggcgaggtctacgtgttcgaatccgtgacgcctgagaaggtcggtctctttactccgctcatcacctcgtgtcgctttccttccgcaatcgtcctggaaatgtttagctcaaaaaaatttcgtgggatacgatgaggaatttgacgtgttagtgttcgtgcgccgcaatcggatatatgattggtatattgtggtttcttgtttgtttcgagtcattctgtgggtaggattcttacagttcaggaattctggattagtgctgctactcccacgaaatgtccctctgttttttttttaacttgaatctcctttgctactgtcacttcagctagtttacaatgttgattgttggatactgttacaccaaaaaacgcaacactagaaatgtactaatttattctatttggataatatggttgatttggtttgaagtataccgtcatgttcatgtagacttgaatattggatatacctatcttagactgttagtaacttagcgcagagcggtccagcctctgaattagtgtaagctcgcagttgcaatacaacaagtagccactattatcctctggctcatagttttagtaacggttaatatgattctctctccatcccaaaatatagcaacttgatactacgattagacaccacctatattacaaatctggacaagatgtctatccaaattcatagtactaggtggtatctatcgtattacttgattgctatattatgggacggagggagtatgtcagttcttatcactcacgtagattactagtaacacatggtgatgacttgctatttcctacaagttagtccttggaacttttcagttgtgcagtttgtgacccgagttttctgttgtttttgttcttggctggaatcctgattcatgtaaacaatatgatggcttgtataactgcttgctataatcccaagttaaatttattccagagttgagttttctgaatattcatttaggtataggtatttcttttgttcccttttatggtcctgtcttttcataagatgaagttttttttcccaggttcaagctgttctgttattgttaggaagaagtgaaatgccaccaggtttagctaacatggttttaccaaatcaacgtgagaacagagtatgtggaaataaatagttccatagtcgcttggcaatctgtattgttttcttcgtttatagttcatgttagaattatctgcagggttatgatgatttacttcagagaacagacattcctgccaaaagggttgcttcactcattaggttccgtgaaaagcggaaggaaagaaatttcgataaaaaaatacgttacgccgtacgcaaagaagtggcactcaggtttgtatctagtctgattgagtattcaccgatcttttgcaaattctaccacagaagaaggcatagatgaaccatgtggatttgctacagtcttctaaatttgtttagatcaatcatcattctttttcattcttctagttgatggaactgctttagtgtccatggggagcacatgaacattttcattaggggttctcaatttgattagcaatcaatgtgtctactgcttgattggttccatgatcataccatgaacatctaccaatataatttgcaagaaaaaaatgcaagctcaattttttgttgtccctggatgctagttgctcaatatgttccaacaattaattgcatggctccattagaataaaaatgtaacaaattaactgacttaagactggaggtctggagctgtacttctgtgtagctttaactaagagcaagatgtaccatatccattgtatcaatgagcaatggatggatgttatgagtcttttttgtggtaaaaaaaatctaatgatttatgctgctacctattactttctgtgtccgattgttttagccatcaccattgttgtcacctcaatctttccagctccatctcctttgtgaattttgtgtttgttgaatactgacagacaagaatgattggggccctggccagcagtgatggtacaaatagttcgcatacatgctaggcacagcatcaatggatagaagctaggctggagatagattaggcataggtaggaggtaaaggatgggatgatagatcccgtggattacattgtttgcagacccaggcgcataaaattctgcacatcaagctatggaatcaactagcaactaaattgtatgactagataaacattacttggcttgaaaaaattgatgttgcttctacttactctcaggatgcaacgtaggaagggtcaatttgccggaagagcaaatatggagggagagtccctatctccaggctgtgaacttgcttcccagggttcaggccaagattttctatctcgagaatcaaagtatttcttatcttttgatagtctatatactcgttctgtctaattattgtttagtagaagacttatcttctttctgtaaaatacttgttgcaggtgtcagaattgtggcactagtgaaaaaatgacaccggcaatgcgccgtggtccagctggtccaaggactctgtgcaacgcctgcggactgatgtgggctaacaaggtattgttgcatgtattaatgagctagtttattgtttatctttctttctgataactaatgggcttctcttcatctttgttttgaggacacctatcccatttcataaattgatagcattagaatacagtaatattctcgtggaggtggattgcataattacattgcttggttcaactggcaaaaacattcttcatggcatgcatgcctcttgttatggcgttacagtacagggcatgttaaggcagtggccctgttttgctatcttatgcggttgataatgcacttgcagcaatggtgtatatgcagtaccaactagggtaaaaagagtcatggtttttgaaccatattatgaagacatggacacatggttatatctgtcatattgtaccttttcttttatttttcgttggctttctaggtacgccgttgacttcaatagctatatgtcagaattgcgggtatggtcattttggaaattagggggtatacgaaaaaaataaaagtaaagagagcctaccattgttgttaattaagccgcttgtttcatgttattgttgactgattctctgtgcaaggaacatatctcaaacatcactatgtgacttcttattctgatgtttgcaatttgcctttgctggcactagtccctgtgtctggtaattgcctaattggtatctgcagggtaccctgagaaattgccccaaggcaaaagttgaatcttctgtggttgcaactgagcaggttcatttttttaataattattatcaagagtttgaaaatgaaatcattgctgaactgtcaatatttccatacccgcagagcaatgcagctgtctctccgagtggaatcgacaacaaggaattggtggtaccaaaccctgaaaacattaccgcaagccatggcgaagtgtaagtgccacatttcccgttccaaattttgttcaggcagatgatttgattgacagtggatcatatcctttccagcatgggcgacagcactccggcaaatgaagccgagataggagcgccaaaggcgcagtcacaataagtttatgtttaacctgtcatgattgaaaccaaaagattctggattctttgcctacaggctatacagctaaacatcacaatagaaggtctttttcctgaccaaagtatactgattctcctcaagtgtacaattcttgcttgccagcacatgtaaatgtaattgtaattaacataaagagcctgattggtgcctgttgtgtaaacccctcattctcatgacatctaagatagcacatcaagcagactgtcatgtacttccggctttggagctgcttctgaaggggagttgtctgatggtgcttagtgtcccttcctaactactacgcctgtaaagttgtaccaactgatccttgtacagtttgtattaatgtgtcgtctctgtctttcgttttccgttttgctttgtgtatgcctctctaaaattggcatttcgctgtcaagatgggaatatgggatgatgccatcgcaaaagggaaggagcccctgtgatgatgcgacggtgcctgctgggttacgaaatccctggggaaagaaaaagcatccactcacagggagctcgtgctacggttgatgaattatgatgatggctggctggttggctgctgtgtgtagagcaccccccctgacccaaacgtccagggtgcatcctcctatttcgtttgtatccaacgacgttttctttctgaagctaaacacgttacacggacaaatattgtaatggtacatatgatcttaacagaacaatcgatcactttaaaaaaaagaacaatcaattttagtactctctttatctcatattatataaaacttttgtattataaggctgcattctttcaaaggagattggggagagattggggagattgtcactcgttttccgcgcacacgcttcccaaactactcaacggtgtattttttgcaaaaaaatttttatatgaaagttgctttaaaaattcatattagtctattttgaaatttaaaatagttaatacttaattaatcatgcgctaatggctcacctcgttttgcgtattttcccaatcttctcaatcccctcaccctcaaacacagcctaagttgctttgattttttaaagactttttttacctttaaccaagtttatagaaaaaaattagtagtatttacaacaacgtataagtttcattaaatttaaccaaacaaatatattttgataatatatttgtttggttgaaaatattgctatattttttatacatttaattagacttagaaaatttagctaaaaaaaagtcaaaacaccattgaaaataccaaaagtaaactcgaaatagagcagtaacaagaaactgaaaagtaaccactctcactgaaatactactaagcaagtctaccggaatactgttacgctgacgtagacatgagtaagcgcccagattacatacacacacctatccaaaccccatcatccagttacgccgactttggggattattcgcgtcttcaccgacctaatataagcgtggttacaaatctcaaaaccaacaaaacgaaccatcttcacctaaacccgtccacacgccgggtggccgccagttcagcgagtgacgacgacgaccccccacgcgcggcggccgcgcccatctccgtcgcctccccgccggccatgtcggtgccgcccgccagccaccgccaggttccccctcttctccacgccatggtagattcctctccctccgcatcgctctaccgtggctgattttttttttgtttttttctggttgctgtaggtgtccctgaggggatcgagcgcgagggagatcacccgcgacgcgctgctgcagaaggtctccgaggagcgccagctccgcagccacctccgccgcgccgccgccgcggcgctctccatccaggtacctctccactcctctcctctccgcggcctacctaccagcctcccgatcttatctgggaatctcgtcgttcttcatgagatatacttttacttttacgttttattcttttgcgaacttcgattagatcgtgctgtgccttgttggtgtgttagaagcaatgcttttctggagattgtgtggagatggatttgatttgtttgaattaagtgcgaggtcatatgaagattttttttgggaggttgatgtaattattggtccacaatgattacgaatttaggatgcgcatatcaatctgaatgaaagtgttgctggtgctaaattttgagagttggtttaagcatgggtgagaggtctgacaggtagagaatattgagaaacccataattgctcagtgcctttctagatatttcattaacaaagtcctgcaaagatactgagaagcttataattagtttttgcataaataatatcagcagctaaccaagtctgcgaaccaccttatgtggccatttcaaaaagaagtccacagagtcattaggcatgtggctgttgttcatatgtgggtatgagaaacacaaaaatgatggatggttaaaacataaaagtaggatagaagtcttcatgatcctcttgttgctcgatgtggttagattggcaggatggttttggtgctacagttgtctgtgaggtggagaaatcatggatggctactagagtactagacaggttgataagttgattagtggcttgatatgtaatatatttaacgattttgtgtttgcacgaatttgctacattagggtaagactttcaatttgatgcaaacttgtgaggagtttgtgataatcctgtctttgtaggtagccttaacacacaatagatgtgcagatggtcaaatcaaatggattaatttattgcaggttcaacatttaaaattaggtttatatgtgattttccctcagtgcaaacagcaccgggagttctctgacaagaaacttgatgcccttgcaagctgctggagtacttaaaatatgtcttgattattaacgtgtttggagatcagttagtcgattgttatctcctttctctttatagacacaacctcagacagtagaatttttttaggatcatgctaatccactatgtttctttttcctgtgtgtgggtcgttcttctgaccattaagcttgatgcagaaatagttatttttatcatgggaaatatacatccaaagtagacataaaggccctctcagtgctcttgtatatgatctagatttctgctgtacttctttcaaactactctactgttgcacttgtacacttatacaattgatgcttttgttttttgctttgttatgccagcgtgtttggagaagatactcagtcataagaattgtttcagaacagctccatgaagagtgggaagcattaataaaccagcctgacattaatctgacaaaacaatggatatcaagcatgatgcttagaccatttcttttcttcgttactcaaccatcaagctggtacaagggacaacaggacaagactctaaactcgatttcggcatgcttcaaaatcatcttgaatagcataaactcaatgggtatgcctttttcataatcaaagtttgactttaccgacttccatcttgacctttttgtactttattttctcctccttaatgaaatgacacgcagctctcctgtgtagtttgaaaaaaaatgttttactttacccattccactagttgtggttaactcctataaaaatttatttatgtaatacttccttttgctgtaaggattataatcctttatattattcaatccttgtatggcgatgacctaattgttagttctagaatggaattatgtacttaacagaaaagaaattgcagtcgacgtgagataagcagatactccctccgtccctaaatataagggattttggttggatgtgatgtatcctagtactacgaatctggacagagactttaatatatatcatatatttagtactaggatacatcatatccaaccaaaattccctatatttagggacggaggtagtatttgttttgatatatatatatattagtactgtttggttgagcagtgcaatatggaaggaatattacagtaacttttttcttgaggctcttgatccactgagctggcacaaatgggtagtctcttctcggtgagatttttttttttttttttggggggggggtggaatgtagcctctagatattactgtttcaagaaaaaagaagttctttgaatttgaatgtaaagtgcatgctatgctttgatagacaagaagtatgaagtgggtctacgatatgtaaccttgtttaataatggacagatgcatgctaagctacagagcgaagctcccaaccagctggcctccatgtttaaagataatacaaatattaccacataactagtttagaatgcataggtccataactgtccttcaattatcatttggtagatgaggttaaacacaaaaagcatgaactatcttggagagctagctttcctttaaccattacagtaacaataagaacagcctttagtcccaagcaatttggggtaggctagacaggaaatccaagtcaaaccacatgaaccacaagaaaaaaggaaaaaaaaaactacttaaaccacaaaaagtgattttctaggccatagttctggcacatggatagctactttccacaaactcttatccaatgccaaatctttcgatacattccaagccttcaagtctcttttaattccttcatcccatgtcagttgtggcaggtcatgctttgatttaaccattgcaccttccttttcaactgacatgtatctttcctctgtagatgcaagcaaaaatttatgttcctttgctgtgggcacgccagaagaaaggtctatttggctttatcaggcaaaaaagttgatttcactgtgctcattcattcttgccaggtgtaaccattcttgctgtaaggatggaaacatggttcagattactgacactgctatgaggttggctgtgtctttaactgattgcaaaacatggaaaaaaattacaagtgaggatactagagctgctgatgcatctgtggagagcttgattgaatttattggtgcaagccagagtggtacatatagttgtcttaggagatatatagtaaatcttggttctcatgccttggagaagaaaatttcttcaatctcaacagatgatcagttcctgattactgctagtgcagtcaccattgcgctacgacctttccattctatgagagcagggaggggtgctgatctaaatggtgcttcaaaggaatactttacacttatactcacaattccggatctttgcaaacgcttgccacctctgttgttgcctgctataaagcacatatctatactacaaccatccctagatattttactggtaagagtttcaagattttgatatggacaagtcactctattgcattttgtatagtatagcatttagctgccgtggaagccttgactctcctagaagtcataggttcaacagttcttttgctgctaacatgataattgcacactatagttgatctactgattttcaaatgactctcctagaagtcataggttcaacagttcttttgctgctaacatgataattgcacactatagttgatctactgattttcaaataataattaatttgttaatagcaggtatttattaggtttattgatgtaccatcataggagattgattttaaaatattgacatattgtgagtgcgaaactgatcaaggcatggcaggtggtagcagatctccaaggacaaaatatttgaggaaataactaaattggagaagtcaggggtttctagtggtggttctggtaccattccctactgtggatgggctcttggaaatcttgtaactttagctacagagcatgatgatttatccaattcagggtgctttgttcaagggctagattgttgcctatatgttgatgcaattaactgtgtttcccaaagcttactgaaattttttgaggagaacaaggaaatgcttcttagttttggtgatagtgttgatacatctttcatcaaggaaaatgataccagtgacagctgcagcagaacactgtttatggatcttctgaagccaatttaccagcagtggcacctcaggaaacttttggtgttggcaaaggaggatgctgtgtgcaagaggcaaaataatcatgacccagatacacagacccattcgcgtagcctaaaattgctggacattgtatgcttttactatcacatgctccgaattttctctttactgagtccatctattggttcattacctattctcaacatgctctcattcacccctggatttcttgttgatttatggggggcattagaaatatatatctttggacaagcagtccacaaattacaaggaccaaaacatgaaagagaatcagctacaagtagttcaggtgagcatgtatcctccatgaggcaaagaagaaatttcaaggatacatcaaacaagtggtcgaatgtgttccagaagattacaggaaaatcaaatgacgcagaggatacaaatttggttgacaatcctttaaattctgagcagaatggtgaagcattaattttatgggatattgaagccatgagacaaggatctgagtgtattggaaaggatttaatgcaaatgttgtatctgttttgtgctacgtatggacacctattgcttgtgctagatgatattgagttttacgagaagcaggtaaagattggctcacaaccacaacctacttcaccccacctccttttctgcacatcttggttatgtatttaaacttctctgaatccgcaggttccttttaccctagagcagcagcgaaagattgcatcttcactcaatacgttcgtatacagtactttcattcagaatggtggaagcagcagcaaaccacttatagatgtgactgtgagatgtcttaatctactgtatgaaagggacagcagacacaagttttgtcctatttctctgtggctggcacctgctaggaatggccgaattccaatcgcagcggctgccagagcccatgatgcagcatttgctacattgccaggaaatcagttttttggaattcctatccggagctctgtacttactacaataccacatgtatatccatttgaggaaaggtatccaactttgtttagctcttgaaaaaaaatctaaacattctaaactcaataagtcattactgtatcatttagatattcgattattgcccctagtggctacttccatacaccatttgtagatctaacagcaatacttgcataacctaattcctgcagcatcagttctctcttgccagttgccatgtaaatctcgtgtttcataccgtgtaaaatatttttttaattattatttttggaaagttcagattgccaagaggcgatgcttcatttgatcaaaaagtttagatttttttaattatcatttttagtcttgctacatttgttggttgaggagagttgattagcccatttattttccactagcgatgcttcatttgaccaaaaagctcatctcaatttcatcacgctatctgaacattttcacttgcataactgtttctaacattttcgtctgggatttcttaaatattagctcaaatgttagcccttagcaggacatgttccatcatcagaacttatctagaggctttatttactaatattacagttaagcactcgatgcaatgctgttctagcttagcagtagtactttaatgcacaacacctaatttattaaatattttcaaagagtcaatccataaggattgattcttgtgtcaaatcatgctattcaagtgaaccaccctattagtgaggcccatatgtgtacaaaacagggaactccattaatattttagcacttttctctgttacagaagtgctatttgctcttaacatatttaatggcttttactcagagtgcagatgtttagagaatttattgagttggacaaagcatcccgaagagttactggagaagtatctgggccaggtccaggatctattgagatagttattcgtcgaggtcacattgttgaagatggatatagacagttgaactgtcttggatcaaaattgaagtcttgcattcatgtgtcgtttgtcagtgagtgtggccttcctgaagctggtttggactatggtggtctatcaaaggagtttttgacggatctgtctaaagctgccttcagtccagagtatgcctactgtggaaattttagcccttcaatattttagttttccacttcagaatgtttatatatgttttcactgacttgttttctgtcccctcacaacagatatgggcttttttcacaagcatcagcatctgatagcagcttaattccaagcaattctgctaaacttttggataatggcatcgatatgattgaatttcttggccgagttgttggcaaagcgctctatgaaggaattctattggactattgtttttcacctgtatttgtgcagaaacttcttgggcgctatagttttttggatgaactatcaactcttgattctgagctttacagaagtctaatgcaactcaaggtactgtttttttctttaagaaaaagattctgctgtaatcttgttctagacccaaaaaaaacatttgaattattatgctactgaaagtagcaatttacatgctcttagtacgttgatgaatatcaattgagctatggccattgctgcattgcctgttttttcaatctcgaaacatcatccattctttatgttcaagacatgtcattagtttcggctgactcaatataaaacatggatctaaacctcaattaagtttttgtggttttctgttgactgatgtttaccaagtatatcacttctaatatagagaccatatatgatatttaattttcactgcttttgtgtatgatgttgtcacgaccggtaattcacaatacagaattccagacaatatgtgtattaaatccccatccaggactagccagggacccagggaacacaagagacaaggttcactgtgcacctccctccagcctcaaactccatggaggaaagttatgcttatgcagactctccaggcagcaacaatttgacatgacaagtctcctcctctcaatgggatctaccttcgtgtacttagggatacacgctggtggaccccattagtttgtgatatgtaagacgtgcattgtataccaactgtctcttttgtaccccagctggtcctggacggggatttaatacacatatagtctggaattctgcatcatgaatttctgggtgcgacaaatgttatggggatgctatttttgtgtcatcttttttacacaaacaatctagtgcctttctgatgttttcatccttatgttttcaaactggcctttccttgaaacagcactatgaaggggacgttgaggacctatgtttggattttactctgactgaagagttgggtggtagaagaattgtccatgaactgaggcctggtggtaaaaacatctcagttacaaatgaaaataaattgcactatgttcatgctatagcagactacaagctcaatcgtcaggtttgttacttggtttgctttcttgtatgttctaaaaactgttgttctttatcaataagcagcctttttgataataccataatctcttgcagatactgccttttgcaaatgcattttacagaggactcggtgatctcatttcaccatcttggctgagcttgtttaatgctaacgaatttaatcaggtaacatgaatactgaaacaaacttttcctttacaagtgatgctaaaaaggaatttaaaatatttaagttggaaccataaaacatagaactcgtaaacatagaacttgaagactcaaatattgtgaagtccacatgatcatattatattttgaaattgaacttggtctaagcaacagaattccaaacggaacaggtgcatgtgctgacgtgcatgtccttccattcacacatgtaataaaaacagactaattttcacacagccaaaaacccaattatatcaggtataacccaaaatgtactgtatgactgacatgcagttcctgctatttcctgctatgtgctatcggctattagtttgtatttgctatactgtttcagaaataaaactatgatagtctgcacttttggaaatactgctaatgtatgactatgattgccacatacagctgctttcaggcggattacaggattttgatgtcgatgatcttcggaacaacaccaagtatactggtggttataccgagtcaagtcgatctgttaaactcttctgggaggtatatattcatctgaattcgttttttttttctcctaatgctatcagaaacatcaagtgcaaagttatgtataggtagaacatacaaactaatatgtggatatcagttggattttcgtttgtgttggagtctaaaaattacataatctcaatgtttagcctatacacggtcacctctgcttaatgcggaatactttgatctactgacctgcttgagaagccatctgggttgaagttactctctgttcttccttccctttctaattcttttcttcctttgactttccttctttttcttgcgtcaatggaaattcccgagatcgccgaatcccttccagcgctcaagccgatcaggcaaattagggttttagggttttggcagagaactcaaagtccctttcctttgcgttaagaattaattttacccatcacaaaactaactctacctctttgttatgaaatggatttcccaattaactaaccggcaaatagctgataaaatcaaccaacaatttggagtagacatatctacccccatgctatttgttgttttacttgtaggtttataataagggaagtttttttttttacttatcatcagcttgactgccaagatcgatgcaaacacatgtcagatttggaaattgcttagttcatctattatattctactgtgtggtgaggactgaagtcagtattttactgctgcgttgcaatctcccctctggttggaggaagttggttgccagatgcccagacacatgttgacaattggtattgtttacttccaaaaaaagagaacaattggtattgttctagatggagaaactaatttagtctgtggtctttgcaatcatttttactactatcctgggctgccgggggcttaaaactgtcacatttttttttccttttgtaaaacagtatctccaggctatttgcttgtggcgtatgcacttgctcgtacatttgttgaatatgatatttttctctcttttctttttgtggccatatggtcttgctctttagtgtctgttggcatgtgatgcacaaaatcaactggtctttagctaaatacaactatttttgtttttttttaaacaagaaacagcatgggagggcccctacagttaaatttttattgataaaatcagaaggtacaaaaaattacaacgacaagatccaatctttcatttaatctaagaagaagagatctcccttgaaaaggtgcctccaagacaaaggatggaagctactcgtattagcttattatcaaagatgaagctatttttactgattgacaataaacaaaagaaattttggtgaaggctgaagtggaatgatcataataaaaatatggtttttggaatgtgcaggttatcaaaggatttaagccaacagaacgttgcatgctactgaagtttgtgacaagctgttcccgagctccattacttggattcaagtatttgcagccttctttcacaattcataaggtttggtttttatagtcctgtgtgtacattgattgttttgtactgctcattgttcaattttttatgttctatcgtttttgtctaggttccatgtgatgttacactttgggctacaattggaggccaggacgtggatcgtcttccatctgcttccacgtgctataacacactcaaggtaaaaactatattgcttttatctatgcaccctgctaatatgataatttttattacatgtttctcatcgcatgttcctaatttcttataggcatcgatgccaaattgctgcattttatttgacctgttctgttcattttattactttccagcttccaacatacaaacggtcaagtacgctgaggagcaaactgctatacgcgattagctcaaatactgggtttgaactctcgtagaggtatgaagattttatgtggatagattaaaaaattgggtttggcacgtgaattgagtgccatagcctagataatgcacttgtaattggtatgtgcatcgctgtaaatttatctgcctattccgatgataacctgcatattcgcattgatttaatatcaaacttgccatcgaaactctattgaaagttgtatgtaaattttggtttaagttctcaggaaccaaacaatttgattttattaatagttcctaaaatcaaaatcagtaattataaaattatgtatagtatcatgagtcatgacacagtgatgccttttgcactagctttaaagttttcttgatataataattctgagattaggtttaaatcgtagtttttttcttaattagtaaatagaaagttcgtttggagtgttaattataattttttttcaggagtcgggatttcaaaattcggaattagtaagcatcgagtcgtacttgtcttaaaattgcaatgtattaagaaattcaaagttaataattacagagttgtttctaacatggtctcttgttttaatctgagccattataatctggtccatggatagccagattttccaattttctcctccttggagcatccaatcagcaattcaagctgttgtaatttggtcccacctaaagggattaatagatttattacttactattttttgagtaactttctgaaatcccctgttttatatggtcaaagttacacaagttacacaaaaccacatgtattatgacgtgtaacacataaacacaggtttgatggtatatatgttttacaaaacctcacctttattaatgttaacatactaccaacattcttctttaaagtagcgaagagttaaactgtcaaccttattcaagaattttatagttaacaattttatatgcacattttgttttagaattataagtaaatttgtgctcaatgtatatcataataccgaggttgtgccatatgttataacgcctgtgttttttctggaactttaaccttaaaccacagggttttataaaatttactcttacttttagattaacgcatgaattttattagattagaatgtctaattagtatatataggtatagaataggtagagcaataatctcattagttagcgtggttgtggagttaagcacatatatgttttcacttatcgtctctcaaatcgtagtgttcgtgattgaactgtcacgacctacgtacgtacacgtgattgcgctttttatgaggctcaaccatctatgtgatcatggatttctcatcgcgtatccatggtaaaacacgccacatatggatcacaaggtaccaaagcacacagctgcaaaacacccattgctagcgggatagtacaatccaagcgcatgtacatgacatattacaccaagcaagcagttcattcatactacagcaaaacaactaagcccaagcccgtgcacatgactgcacgatagagagaaaaacaaaactaaacaagcagggcaaccgaaacagcagcatgcagcacgtacggcggctactcgatcgatcgctagcaggagaaacaaatagcaacttaactaattaagttcacaggagtagagtagagtagttgagaagcagaagcgagagcaagaagctagtagcgctgttggctgtgcatgcgtccgtcattctcaggaaacggatggatggatcaggagatgagctggaggccctggaggaggagggcgtcggcgagcaccttgttggcggcgtccgtggggtggaatccgtcccagaacacgtaccccgtcgcgttggcgcacgtccccaccgcaccctggttgcacagcaccgacgtctcgatcgtccccgtcccgcagcacgctctccgagactcgaagaaacctagttaattggagtagtacccatcatcacataattaattatcagttcaatttctcactctcacaacatcttcttcaaaacaaaaaaaaagagagagaattcgtgcattgctgccaaagaggaggcgtgattaggggctgtaaatagctagcctgcgaacccattcatagatagatcgaaacaaacgggtttgtagtttgttttgatctataagtatgcttcacggttagtcacttacacctaaatagacgtaattacgtgtacgtaccggcggcagtggggttggtgacgaggtcgaggagcgggttgtagatgtcgaagacgacgagcttgaggtccgagtgctgcttcctgatgctgtcggaggccgcctccagcttcgcgttgaacgtccgcgagtcgttgttcagccgctccacgcacccgccgccgcttccgccgccgaacagcgtcaccgacgccgggaggcaccccatcggcggcagcgacgtcacgccgatccgcctcgccccctgtccgtacagcccctgcacacacaccacgcgttcccaaaaaaaaaaaaaaacccaagatcaaaatcgttgaattgattcggtaccacgacgaggccattttcactgcacggtacacatgaatgcatttctacctcaaataatatgaaacgcgggaaaatgtttgtgattttgtacctatttactccccccgttcatctttgtttgtttgacaacagatagtacgtactatgcaagtacagactttgactgctcatcttcttttttttaaaaaaatacgaacatttgaaaacatatcattatctatgtaatttggcaatttgcatgctaaagaactggatatactactacttgtatttatcaaaacatcgtaattcagaaaaaaaatattattgaccaaaattaaaattatactagtcaacagtgtcaaataaaaaaaaacagagtgtacttggtgtactggctgtttcagtaaattcaaagaagtaaaaaaaatgtcctgcgtatgtgagcttggtggatcgactgcgttaagtatgccattacacccaacagtagctgctagctgtggcattgtgtattgagcagtgaaatcggtggcaagcaagatcgacaacaccggccggtgcagtaataaagagagagattcatgcttgtcttgaatctttcatccacccacatccacatggtcaagacagatctgtgaaatggcaggcagcagcaataggttttctgccactgccactgtccaatctttctttctttccttttcagtgaaaccactcactatacatgcatatggacaacacggcctagcttggaactctagcatggaaatgggtcaatttccatggtgcatttactagaggggattggtgtgagggaattgtggatttactagcttggaaactctagcatggaaatgggtcacaatttccatggtgctgaaaatgttacattggcaggggcagatcagatcagtccggaatgtcactagctagagcattgtattatagggggaaagcctctagttgtagctatataattgcaacttttgtagtaatctcgtttagctttctctcgcaaaaccggggtcaatttgggataggactatagtaaaaatgtctcttcaacaagggctaatcaacaggcctctgacccccttaattagtttgcctttgtgccaatgaccagattagcaattttaatgtactaatgtagcgattgctggcaagcaagcattcgcattggatgatctccctacatgtgacaccagcaacagtagtactccatgtaaattagaaaattaaatgtgtatctgcgtgcattaactgatgctagctacaacaacgtatgtactgtggagaatggcaggaacatgcatgttttggaagaaaagaaaaccatgggaggttgaagaattgagatgcaggccattgatagctaccggtcctacccatagaacctgtgaccttttgatccatccatttactcctctaacctcctctgcaaaggctattcaattgcctgtctgtccgctcaagatcgatcgatatgtcactgtgcactacgagcagggactgtcccatgccgttactcctatagaagacttctttagagtgaagtaatttttttttctaaacaggagaagtaattaccatgaaaattctactcgtaaacaggaatactagctacttacgagttctaaacttgttgctaatggccaatgggatgaacaatctgacactacaaatattgctccatgcacattttacaaaacgtttagctatttcagttatcctgggattagcatgcggtttcatgaaaagtctaactgtaatttggtgcagtaaaagataaattgactgtgcctttcttcaaaaaatggaaaaaaagaaaagaaactgattgttaatttagctgggtttttttttgctaccttacatttagattcatttagtatagtacccttgcccattgtgtcatggcaatggcatggaccattgtggaacaaacggagtataatgacttgatgcatgtaagcatttgcatgcatggttgcatcatttaatcaagtgatagattggagaaccaaatgtcaagtgctttgcatgctgtgcttaatcaatcagtgcttagtggtactaatcaattacaataatatatggatttgattacctcgatgaaggtggtgaagggctgcatgaggacgtcggagaactggtcgggggtgtaggtggcgcccagcatcgggttgacgtagtagttctgcacgaagtcgctggtgccggcgctgaccacgtagatggactccgacgtcagcgccgccgccttcttcccgccggccaccgcctccaccttcgtcttgtactccttgaagtaccccagctgccggctcagcgatatcgccccctgcatacgccacaaaacacaccacatctctgatcatcgattaacatatagtgattttggtttacaagctagtattatggcttaattggtcccgtttgaactggctggagataaagattaaatgcgggcaccaaaaaacatcaacatgtaactaattaagttttaattattttaaacttaaaaaacaaatttatctgatttaaaataattttgtaatacaaaattttcattgaaaaccgaggtaaattttgtatcttaattagaaaagaatataacaatttgaaacatatcattgagcacattgtttctgcagaaaatattactccctccgtcccattttaagtgtagccatatttttccgcgtcaactttaaccatccgtcttatttaaaaaaaaattaaaaaaataaaaacataagtcacgagtaaagtactattcatgttttatcatctcataacaacaaaaataataattataaaaaaaatttaaataagacggacgataaagttggacgcgaaaacttatggttgcgattaaaatgggacgagtgagttacttagactgaacaactaacttaataagaaatatattgaagacgaaaatgcattttttttaaaaaaaaagaaaaaagaaaaaaacgtgaagcagataaacaaaccgtacgtagagggaggcggtggtgtcgaggtagccggaggcgccggaggcgaagttggcgccgtggaggagggagcggttgtcggactgggcgagctggccgaggtagggcggcgggtaggaggtgagccccaggttgtcgacggtgtagtcggtggccagcttcccgttgcagaaccgccccgtgggtgccccgtgcgtctccgggaagtcgcggccgtagggcgggaagtcggcgcgcaccagcgtcgccagccggttgttgttcccggcgtccaccaccgagtccccgaatatcatcacccccggcaccagcgccgcctgctgccccgcagccgccgccaccagcagcaacgacaccaacaccgccgccgccgccgccatcgcggtcatgatgctaataatgctactagctgcgttctctctctggttagtggagtgaggtggtgatgtggtgagcgaagtgaagtgcgtgggtttcaatttgttggcctctgttatttaaattgagacgtgcggtcaagtgaggccgaatttagttccaattttttttttaaaactttcaacttttttatcggattaaaactttcctacacataaacttttaatttttctatcacatcgttccaattttaaccaaacttccgtcacaccgtttcaattttaaccaaacttctaattttaatgtgaactaaacacacctaagttattgctggctggctgcctgctggaactactacagtaactactgcaacaagttacaactattacaggcatgtgcgcattcaatgggctaaccaaaatgtactagtgcgaaacttatcttcctatgcatagtgctccaatacaacgaaataacacgtactggatccaactttccacctacagcgtcatgcatatcgtcttgccttgttttgccttttcttttccccctacgtgcgtgcgtgtgctaatctggagcgagtaaatcgtatctaaccctatactgcttaataaactaccccaacgataaattaacagaattattatgttgagatttgtgaaacggcttttaatttctgtgtgagaccgagagcttcactcgaataaaaccatttttatccgtgaaggcttttctgctactcaaataactagtactttttaaaacttcccctgtgaaacagtgagacctcaagattgatccagtaggccagtaattatcaactaatatccattagaagatcaaacggaagataaacgggcaatatttaagaggttaagattgcttacgacggctcaagaaggctttacagccgcatgaactgttccaactcaatacggttcatagtactagatcgtacggctgacataactccattaccacggctgatactttactacgggtcaagctgggcaaaaccttgaatagctgatttgagtgcggaacaatagcaaacggctgcgaagtaaatcacttcatcgacttaaaaacagaaacatcacaaaaataagctagagatttgtcaaacattcgttctgttcccgacatttctgatcatgatttcacataatcacataccaccaaaggaccgaatgaaacaaaaaaaaaggataatctaaaccttccatggtctaaagcctaaaacagccaattaatcaggccaaatgtaccagaactagtgtataaatgctgtactgcaatcagtgggcatcctagctcctactgttaataatacacaaatgttacatgaacttacaagcaggggagcggatactggacacgatttccaggtcgcaaggccaagacgcattccattggctgtacagtatccgaaaaatccagttggttttgcaaatcaggtggcaggagctgagctgggaatcttgaattgcttcttcacatagtgcgaagcctccgaatcatttctgtggcaaaggaccctaagcagggttttggaatcggttccaaacttacttttagcgccctgagtaacttctcgtaggtcatcgatgagcacacgtgtctggtaaaaacatgcagaagcaaaccgttacagatgatgattatgacttggcacgcactagtcttttttgggaaataagagtttcctacggctaaattttactcccttcatttttaatatactagaaaaattgtacgtgcattgccacgggtgaaggttattttaatcatattattgttagatctttttgtctaaaaagtatatgggatttttattttgataatattgatatctaatttggaactcttattaggcctggcaagaattttgtagcaattaggagtccgactcttgttccaaattaacatgcgagttttttaaggatttcttatacgactccttattatgtattcccaaaagtgaacaaacttaaaaaccgactcaaatacaaatgacgtaccaaagtatcaacagaaacatctttaatttttataataggagagacagagataacgccattgacattttaagattaaccttttaagatacgttgactattcattttattcaaaaactttatgtagttatcattcattttgttatgtcttatttatcgtacaaggttcttttaagcgtgacttataagacaaatggacaaacgtatgtataaaaaaaatcaacgatgttatatattaaaaaacggaggtagtgtgattttgggactgatttctgctctagggcaaagggcatggaacaatgtggcacgattacatgcagcttgggttgtaaccagatctgggcggaccagctacctgaaatcctgaattggtttgtttgctgtgccaacgacttaggctgtgttgaaccccttctccccggcgcgcaaaacgaagctcatattattgcatgatcaattaagtattaactttttttttgaaaaatagattaatatgattttttaaaacaacttttatatagaaagtttttgcataaatcacactgtttagcattttaaaaagcgtgcgcgcggaaaacgagagaggtgggttgggaaaatgggggggaagaacacgtgattaattaagtattaacttttttctttgaaaaatggatcaatatgactttttaaagcaactttcgtatagaaattttttgaaaaaaacgcaccgtttagtaatttgaaaagcgtgcatgcggaaaacgagagaggtgggttgggaagatggagtgccaaactcagcctgggataactagctaatggaacagagaagttccatctaaacgaacaagttatacaggtgcctataatccaaacagtgaagattctactttttttttaccaaaataagaaatgggacataattaggttcgtttgagtttgacatgaagctaatgtgtgttctgtgcctacgacttagagataactagctaatggaacagagaagttccatctaaacgaacaagttatacaggtgcctacaatccaaacagtgaagattctactgtttttttttaccaaaaataggaatgggacatgattaggttcgttgttgacatgaagctaatgtctgttcactaacaactgctagacacctatgtaaccattggagctacgtcattatgttacctccacgatctggagttccacaccctaggttctgttcaccggtttacccagtgtcaaaatgagaaattaaatccaaacttacctcttgcttgatcagatctattacagggcgaacacgtgagaccaaattctcgacagttccacgaggtaggccatctccaccagatataaaaaattcctatgcgaagtgaaaatttacatcaagactaacagttttttgtttggccagcaaagagaagacaacattaaatgttccagaggcataataagcacaaaacaaccaacatccaggtaatactatgttccttataacgcaaaaaacagccaggttgtacttcagataatgatataccttcagaatttcaagatcttcttccaaaagagtggcatcacttggagagaagacacgcgtaggacctccatccaatatcacacggagtaggccatcctgccaagcaaggtaactttaagataacatatagctcacaagctgtcacaacaatcctacagaatttattatccggaaagattaccagagatgcttgtagaagccctgtaaccacacgatcccgtagttgctccacaatgacattacaaagctgattaagcacctaaatattgaggcgtggaatcaaatatctccattagttcaagcgaatcttacaaaccaaatcacaatatatatatttatcaaaaaaacactaataaccagaggtacaggattcaagattgattatcgatttttgtgatatagcaaatggtttgcactttggccacagataattaacttatccatatcttttgaggaaataaactatattcataacagaatacaatatgtgttctgtgaaaagttgatcatctaagtagctaaccagcattagtacatagataaatggtaggtttcatgctagctgtcagatcatagggttttgtttctccaatttaatgttcctgaaaggttgcacgattcatgagcataccgtatcaagtacttccataatagcatccagtcgagcttgagaaacattgtttttgtacaaattatcaataaatggctgctgtaggtcccagaagataacctttagccctaagaaagaaaaggttaacatgttaatagatatctgtcagcttccaagaaagcactggggcatgtatattttcttacctgtaaactcacatatccgatcaattgcagcattgatttcttttctgctgccatcaaattgattcttctgactcgagacagcactctttgatttttcactcattgatcgtcctgacaaagttcaaatattttcaatataacagatttagtctgatgttatctataaggggtagatcaaatagattgatttgcaaacttatcagaatattcaacagataaattggcaactaaaatattttttttctaaagaaaatcataacagtatacattttttttcttgaaaacgcataacagcatacttactgatgttaatgctctcacttttcctcctagcccaccgctcatttatgctgtcctccagcttgcttagctggctgataccatactgtttgacaaaaaaaaaagtgcttctggttcaaaactaatgaaaatggacacaattcaaagggaagagaaaagtcaaaagatgccatgaggacactgatgtagatcatgaaaaaaaaaactagcaatagctaaattcaaaggaagccaggctggaaggtgaagatattcacctataggttatagcagcataattatcaacacacttgaagcctagaaaataattttaatgagatacatacactgatccccaaatgtcatagttttaaattaaattttttattaagattggcatataaagaagatatatcgttttatatctcacagaaattgctcgggaacttgacaagtcattctagtcaaagcaacaaatccatatagcagtgctctgttgtaaagactcacatataggctgttaagccgtacacaaagctttggcatagtaagttgtattatttcacttgctttcctctcgtcaactgttctaacttcatgtatttccttttttacgaaagccttgattccaagctcctttttatatcgagtaagaacagggacaggtggaattaaatcttctctatcaactgcaagcaaacaaaaccaacaattacagaaaagttattctggcgtccacatccacagtaataacttttaagttatgatcttggaagcgatgcaccatctacagcattgattatttgccatatactcatgtaaaagagaatattttcctttgaaatcactcagacaaggaagaaaggaacaaaaatatgatgaccgaaagatatacagaaagtacttcacagaaaaagggtgccatgcaaacctatcggtcctgtaacaagttgtgtgtaaacttgaaatgccttgtcaaaaccacggcagaggctatttagttctccagttctcatggggaccttgaatgcaaaaaattgatctgcagtctgcaatagtttgcaaggggcaaatgattgctctttagagacggatggaaatcaatccataacatattcaactaccaagcaaaaaaaataaatctaaagaaaactaagggcatctttgggttgcaacccaaacgaacactaaaaaaatttggtaatgccaaattttagcacattttggtaatgccaaattttggtagcattggtggatacatttggtttgaaaccttaccaaataaaggtataaatttaagagtggtaagcttccagaattatggaattttgttatggtagcaattgttgggatatgtttgttttattgccttaccaaaatttggtaaggctgaaggtggtaacaaaccaaacaggccctaaggcatgcaaatatctttgaaatgttgtggcataaaaaaatctctacatgaaaacaaaaacagactttatcccgtaagataatattaagcaaaatttattcaaggagataatggagtgagggacaaaaaggagcacctcttctatgattctgtagacttcgacaatagaagccccatggcgttgttgaggggatataggatcccaagtctgttgagcaaaaaaaagtttggcataaaaaagatgacagaatgaataagataatgttgtatccaaataatgtataagaagcgatggcaggctttgagagatgtaacatgacatttatgtttgaaatatatcatgaaaaatagatcactttcgcaatataccacgaaacattctggttcacttcactaaccgaaaagcatgggattgaaaggtaataaaatggatataaataactttaggccattcgtatagcatgtggaatagaccagaaattactttaggtcattcatatcatggtaagaaagaggatgttggatatagataaatcaaacatactgagacagtaagagctttgtaaaaaagtaacttgagtcaaatagtgttacctcttgttcagcagctcttttaacccaagtttcaattctctcaagctgcccatttacccagcgtaatatcaacgtgccagatttactttcaatctgggataaaacaaggactaggatgaacaacatatgaactcttaacacaaaataaactaacagttcattgctgagcatcgtatgctggatgataaaatggcaaatactgacataaattgataaacacatcatgtcaaggtgaacaatcaagcaaatggattggataccattttgcactgttgtgagtgctgctacttgaagaagatacagttaaataagcaaacctgataaggagctagcttttgtctgcatatgctgtccaaaccatcatctcccacaacagaagccatcacagacattatgtactgctccaaagcatcggctgccggaaatacagaaaccacatcctccgtaagatgctccgcgtgctcaagaaacggtttctggcacaaatgtcatgcaagcattaagaatcctatggtggtggatatacagacatttcagataagagtgtctgacatagcttaccaatttgcttccataaagtttatggagaagtgaagcagaaacaactgcagactgtgggtgccactttgacaaaaccgatgaaaacacagttgtatctttcttcagaagcttctttgtctcctcagctagagatgctaaaacatgttcatgtgatgtgtctgctttagcctctactgagtgtgccatctgaataaaaaaagaaataaatgtttctttagtccatattatagatataattcataaggggaaggaactagacaagtctatgacaactccaaattgcagaatcttgacatggatgatgctgtccactttaggtgcacacagtgagtgtccaatccggtaaacaaaacaaacaaaaatattggtttggacagagcatagttacaaggtttagatcccggagtttctatctcttgatatgtaaaggacagccatgtactgagattttgttatatgaatgtggcatagtaatattgcattcaagacatttcataatgacttttcaggaaggtagtggtaaaaaagcggaattcagtttatttaatgctactaaaagatatagacaaaaagtaatttggaaaatataaaaaactgaaattcaatcacataaaccataacatccaccaatatttaggcttggacatctctcatcaaactatggtcatgttataatttctaatacatgaaatagacatttcaataattaaacaccccaactacaaagaaaattgctaacgttgacaataatatggtatgatgatttcctacgagcgaacatggtcagatacgacattactggaacttcaaaattgaagtacatgtacaaaataacggattgagactgaaggtttcacatacatacaagcatgattatgtaagcgattttacatccatctcaattgcgaaaagtgtaggaggcaaagtgtatagctctgctatcaaaagaagccgctaagaaagtcacctttacgaaagcacttttgacagaagaagtgatgtaacggtcaatctgatctcgatcaggcgactccattccctgatgtacaaaacaaataaagcgcgacatcagaattttccacatgtgcagatggtagaagtattgctttctacattccagatggcctgtatttactatttagaacagaatttattatatcctttttttttgtgagagccacccctgaattattatatagcggaaatgacttttgctcatgaaatatctagctacactagtgcacgagccggcaataaacgatctaattttagattaaaaatggtgtaatagatgaaaaatgaagtgaagtataaataccttgttattttcttcaccaagaattctcctaataagcattgccactgttacaatatcagccatcatgctagggccctgtaaatgaaaataaatattaatatgggaaaataatcccttgttgcaaacaaagtccagatataatggttcagtgtgatctatggacttggtttcagtaaacaccaaatgttgaacggctgaagtctgaacagaaacagcagcgtgaaaagaggaaattgattagaaggaaattacagctccaagtcatacacataaaaatgccctaagaagaacaattgaagaaaatgataagcttaacagtgaaagtcaaaaccatgaggcacggaaagtattggtacaatatgaaatcgaggatctaaaaaagacaatatgcatgaatgactaaatagtactcagctgtaatgattgactgccttatgcatatatgagttgcacactaacaaaaaaaaaagaagcaaaagccaataccaggggatataattgatctacactgaatgataaatattttatttataaagtacgaacccaatggaataaaaaagatgactgtgaaagagtaaaggagatcctttccacaactcatgcatgttatgaagcacgtgagcaaaccaggagttggcaaaacaaacctctgagaagtgtaggtgataatcattcaatttcttgtccacccatttctgaacgggagataggaaagattggaaaaatgtgaagtcttgaaagctatcctcagcatcaacagaactacgcaaacttttcaagtgtaatctttcctgtggaccacgctgttccttcaaaggtatcttcctcaaatgctcaatcacaactttcaagagtccttgctcacctgtaaaaacaaactgtattgcagaacatccattaaataccatactattgagaaggttacttagtttataagctaaaaaggtcaattgcacaccatgggatatggtttacaagtatatatgggccatattgttagtgaagcagtctttatgcaagagcacctatggtatcaagagacaaatgatccactggcaacgaacactagtgatggatcatcctacttcatgacatgcttaactggaactacacatcaccatttccacaaaatagtaaaggctaaccaagattttgcaccgatctccttttcagatgaccgtgtctgacattatgaacagaaaaggtttgaaatcatttcataaaaaactgtttatgcttgaggaactcacttgcttttggcttatttgggctattaagagaagaacattagatatcagagtagacctcaatcagtggttatggaaacacatagggttattgcagaatgtagaggtacttagggcctatcataaatccataatgcaaccacaaaatattccagtaagggtaacctcaagtaatagtactgcttggctagagctatacctgtctaaataatacccatgcataacatgtatcatgaatcgtctctgtaatgcctagtatccgccaagttgattttaggagctccaggatttcttccacttcctggtagattgaagcaaaaatgttaagagaaatacctgcaactgatagtgtatctagacagaggaaaattacaaaagatgattttaagtactggcctctgtaagctttccctcatccaagatatcaaaaacactgccgagcattttctcatacagtgccacattcagatggtagccatcagaccaatgacaaacctcaccagtaagatcaccccgtgcaggtctttcagagagagaagtagcaacttctctcagtgatcttaggcattcagtgcgttgaacctccacagcagatggttgcaaggactagcaagtaaaacaccacgatgagcctcagtatactggatagttttacacaattgttctaaaagtcaactataagagtattcactgagtaatctctaaataataaaacctcagattcttcaatctttctgaagaggtttcgtagctcattgacctttcgacctaactctccaaatccaacaacaggatggtttataaggccctcctccagcatgtttagctaagcaaagatacaaatgaaacatataatgttaaggcatgatagggtggccccaaatactgtagaattcaagatcatttaaggcacaataagatggctaacctgtctcttctgccaacgaagatatgctttcatgtctgaaaactcggctcttgagatacagcatagtagttccaatggaatcaagagattgtccatccgttttccaactttgcctaccatagcattgagcaatccttgtctagttctaatatccatggattctgttatctatccaaaaacagcagggaacacggaggtcaatgtatgtaagattagcatgctgagatgctttaaaaaacctggatgcacagaaacataatgaagggactgatggccttaaactcaaagagttgtagtttatggactttcaagcgacaaaagaagcttataagctgctaacactcaaacttgctaatctaatttaagttgtgtgaagcattaatgaacatcagggaacagaaaggtgaacttcttttattcgtttattattcagtcaccagaagcagaaggctaagacaatatacctcaagttgtgctcgcatggtttcaagcaaaccaaccaaacctggttgccgctgagtttgggattgagtactctcactcttactacgtccgagtttcctcattaatttgtttctcttctctttcttcttttctttctgtggaactataagtcccctgtaggtatggaaataaggtaaatgatatggtatacctggaagactttcaatcttctaattggaaaaaaaaatgagcacaaagaaatgcataagcctaccctgaagcaccagcagcagcaacaagaatttcatatgctgtttcacggaggtcatcatctgttatacctggaaaaacagcacagtttccgttgtcaataactttcttgacccaatgtatgtagccataccagcatgaagacttctaaagaaaataagtcatgaaaatttcacttctatctgttattggatatctgaataccataatgacataacagtcatcactattacctgtttcaaatagtggtaaccgcaatgataaatcattggcatcactttgatgtcttctagaagcccttcggctatcgaattcatcttcttcatcctcaaaatcttcaatgtcatctatggttaactccttctcagttggagaatcaaatgattgtgattttgataaatttgtggtagagactggtgagtgcacagcaactggtggtggatccacaattggtgccggtatcacaacaggtgatggtgcaatagcagggacagggggtggttctctcgctggagctggtccagagtactctggttttgtaagtaaaaagaattcctccacagttccactgttattctgacaaaagtataatgtcaaggcattcaaaatcataagaaatgaactttaatgattctgaaatgatgtgcacagcatatcaactaaacatgaaacattctctattaaaataggaaaacacatattaaaatgtccatatatgaacataattgtatccatggagtttagtggaatggttaggtcttttatcctggagctttaaaatgggcaactcaaatagctcctacattgcaaaatggctgacaaacttttcaatgaaacaaaataaatgcagcagctactatagatcagctcaccacgtaagggtagtcaaggctgtcatgaaaaagccggatggcatctccaaggtcaagtgcttcacctacacggtcgaataattttcagaatatacatatgaaaaatacagagtggcatacttgggtaaatctaaaaccacctcacctttcttagcacaattgaggacgtaatcaacactgacttgatctatatccacatcatccaaagagatcgcaccaggaggcattacaactttcttgatcaagttaccagaaagcatgtagttgagcaatacatgacggtcacggcgataacgttgcagcagctcaacaacattttctctggttaagttgatatatagaaaaagcttagctcacaattgaacatgcatatactgatctataatacctattctgaaacgatcattactcgtccatatcgtgtgcaggggagacagcaatctgagttcagaaacactgttggaagcaccccaagtcgctttcagccagcatcgctctcctgcaaaacaaaaggggttaactacatgaaaaagtgctggggtgcgtaaatcggttggggctgaacagtttatgttgaaaatagctagtgaatcatgaatctgatcctacaatcggtccattttgcctgtacaaattcacaaactctcgctattaaaaaggaaatggaaatgacagccatgcagtggccaactgatgattcattcaagaatgcacaaactgagatgatccatgcctcctctcagaccggccaactcaacctccctactaaatcacatccgacatccaccagtgacagaactgagatcgcattggcccgcagctcccagatcatacatacccgatccatccatccaaaccgaattcgccacaccacagcgcccccgcatttcaaacaccgcaaaaaccacaccaccgcaacccaaaaacaagtcgagccgaaacgaagaggaagcgcatatccaagcagctccgcccaccaccaccaccaccaccatccaaggccggagggcgagggcgagggcgagcggctcgggggctgggtggatctgggcccgaggcggaggcggaggcgggggtgggtggctcgtcgagctagttacctgcgcgcgcgcggagagggagatctccgccggctaccgacgacgacgatgccgctggtcactcgccgcggcgcttggggagtcgggcaaggtggtagctggcggtggtgggcgcgactcgctttcctggtggtggtggtaagtggaggcgaggagaagacggccgcggccggggatccgtgcgcgcaggctgtggacgcgcacgaggtggcgaggccacgagggcctatttttcttgggctacaagggtttctttggcccatctcacctgccctgggcctttgggcctaattttctacgaccccagtcgccaagctttccttgtcagaataagtccactttgactccttaaagttacccgaatctagtccgtaacccacaagaatgactcctgaactattcaaaccagtgcaatttgactccctcagtggttttggataacggttttgctgacgtggcgatgttgacttggtctgtggtattgacgtggcgcttaggtggcattagaattaaaaactcagtgcgccccattcgccattcacacaaaaaaaaaattgtgggaccatatgttatccctatctatcccttcttcctcctccctctctcccttctctgtctgtttctgcgcaggatctggagcgacggctgcaccggcgccggcaccggcggcaggacgaggatcggagcggcggcggcggcactccttgctgtgtggcagcctctgcttgccggtggcgtcgtcgtcgacgtcgtagagcatgttggggtcggacgacagcgccgcggcaacgaccgcttgctccatgcggcggcggtgacggcggccacctgggtgagcggtctccagaccagcttcttgaacctgtacttcctggtccccgagaggaacacgacgaggccggcaaggatgcccacggcgcagatgtcgtacccccactggcggccgacattgtcctgcacgtacactagcacggtgattgtgagcagcgcgacgaggctgacgaagaagtagaaccagttgaagaatcgcatcattttcttgctctcgtcgtcgtcggactcatcgaactggtcggagccgaagccggagatgctttacttgagcccccccccccccccccccccgtgcccagcgctgtcaggtagagcaccctgagttgtgtcccgttcgtcaccatgcaattcgcgctcggccccttgagtcgctgcacgccggcggccgaagccccaacatgccgtcgagatcgtcagtatcaatgtatcatcagttcatcaccccctgcagcatgagccaagatatacaatcagtatccatccgtcatcgagcacacattagcttggttgaacagaggagtaagaggaagacacgaacagtagcttggacagcttcaaagatggcgatggttaggtagcggccgaggtacgtattggcacagtagcgtgcgggaaatgggccccgactagtgtggcgcgttgctctagcaccgctccggccctcgccccgccgccgccccagatcctgcaccgaagtggggaaagagaaacagagaagagagaaggagggaggaggaagaaggatagatagggatgacatgtgggtcccacaatttttttttgtgtgaatgacaaatggggcccacatagtttttaattctaatgccacctaagagccacatcaacaccacagaccaaatcaacatcgccacgtcagcaaaaccactatccaaaactactgagggagttaaattgcactggtttgaatggttcgaggagtcatcttatccggttttacggttgagggttacggattagattcgggtcatttttaagggagtctaagtggacttattccttccttgtccggtggagggaaaaagtacaccgaaggtccctcaacttatcatcgagtttcaaaatcgtcccccaatcacaaaaccagatatatgacatccctcaacttaacaaaaccgtttattttaggtcctttggtggttttcaccccggttttgtccgatgtggcggctgagtcagcatgggacccacatgtcaggatgccacctcatcacttctcttatttcccctcttctccctttctctctctctctcttctcaggccagcgacgggcgatgctgtggggaagaggccgccgggggggaggggagaggaggaggtccggcggccagcgtcgcgccgatggaggaaacgccgccgtccgcatcctcgttgccaccgtcgtggcacagcgtcgccgaactcatcctggaagctatgcgcgagcacgtagaggccgtagaagtcggtgggctggcgatggcatcgcaccaagtagccgtacagcgtcatttgagcgacggtgaacccctctgccaagtggaagtcctgcgtcatcgtgatcgacccctccgtggggctcgtcctctacctcgcgccgccgtccacagaacctgctgacttcggcgagctgtagtcctagactgacgtcgacggcaaggtgcacacattccgcatcaccaccatcccgacatagcactacttcatatgcgacatcgccgcccgcaccgcctcctacgtccctgacttggagagacgcgtcttcaacaactatctgagcatcatcgtcgcgccaggaggtgggggaaagtacctggccgtcgacttctagttcatcgttggcggcgacgaggccaccctcctatgcttctcgtccgagaccagcctatgggaaaagaagcacgccaacaaccccctgccccgctagatctggagattctttgacgtcgtttcccacgccggcaagctctactgggtggacactgcgacaggcatcctcttctgcaacccgttcgttgacgagctgcacatggagtacgtcccaatccccagggtcgacctcccgctagaacacgacggagactgccacggccgtggctactgcgccgagagagcgctcgcctcccgccactgcgtgcagctgagcgacggcaagttcaggtgcgtggacatgggctctgcaagcgatggtgttactaccaaggtccccatgcacacgcagattgatccagggaccaaggtgtggactcttgagtacgccgtgagcttcgccgacatctgggccagcgagagctacaaggcgactgggatgtcggagaaggccccggtgctcgcgctcgtccaccccaagaaccccaacatggtgtacttcttcgtagaagtcaccagcctgcgcaccaccgacttctacggcctctatgtgctcgcgcacagcctccaggacgagtctggcggtgctgtaccacggcggtgacaacgaggatgcggacggcggcgttgcctccgccggcgcgacgtcggctgccggacctcctcctctccccccc

SEQ ID NO: 7889 - DNA, 7819 bp, Oryza sativa
tcgcaggttcgtccccgcgcccactgcggccgtattcagtctcccatctcccaaggcaagcggtccgccaggtccctctccttcgcgcgggcgcgctcttccagcgccgtggcgcgagcctcaagggcctcttcgcgccgccgggacgccgcctcgttctccgccgcccgccgttcccgggcagcggcggcgtcaaggaccccccgggcggcgtcgagcttcttccctagctccgccgcccggctcccgtattggaggcggaggtcgtcccgcgcctcgttcagcacggcggtggcgatgagggcagtctcccgctcctcctccacctccctggcgatctccgccagctccctccgacgggcctcgagctctgaggtgtgccggcggtgtgccttgcggcccgcctccaccatggcctccaccgagcgtcgcccctcttcgacgcgcgcccacgccgcgtcgagctccgcccgctctgcctgcaggacctccatctgggcacttaacccgtccaacaccgtggtgttcgcggcggccaaggcctgcagaaggggctccgcgctcagtggggcagcggaaggcatgggggagagctgcctcggtgagggtgccgcacggctcggcccaccgatcgacgtgccggactcggggacgtcccccgaagctggctcgtcctgagcgtcgcccgaggggtcgggcccgagcggtgcgcccgcggcctcgtcgtgggtggcctcggaagtcatcgtcgcctcgggcggagtcgggtcgggggcttggcaggccgcctggcgtgcgcgcgccgcctccgcctcccggacggactcctcggcccggcggagtctggcctcctcccgagcggcttcctcagcctggcgagcccggatggcctcctgggcagcttcctcggcttcccgaaggcggtccgcggcttctcgccggtcagcttcccgcctccgggcctccgcggtcgccgtctccccggcctcagactggccggacttggaatggcgagggggggcgcgacgggatctcgctgaggcagaagaaaaaccagaagacaaaaaacgggtgagtgaaaacttgccttgggagatgggagaatgaatacggccgtagtgggcgcgaggacgaacctgcgaggaggtcggttaaacgaccaccttggggggagatgaggtttccccggcatggttcggtccccccatcttgcggagccgcttcttctttcgctccccctcgggttgcgacgtcggcgcggtaccctccgggcgcctgctgctggcacgtaccgccccgccccctcggggaggagatggggaaggggtaccctcctgcttcctcttcccccgggcgtcagcagggcggctgctcccgtcgcggggcccagaagcatgaccccctcccggggtagattgttcccccctgcggctcacgcccgcgccatcgtggcctcgaggggcccgctcccctgacgccccgaccgcttgcatgacggtcaggatgttggcgcgctctggatcgctgcagagcgggaggacaccttgggggatgagggatgcctccacggagctgagattcagcacccgttggatcaccatcttgaagtcttcagggacccagtcccacttgaccccctggtgggtcctcatgtagtcctcggacccggtgtactcccaggcgccccgggcgcgccgctggagcggcgcgatccggcgacgaaggtagtcgccgtacaccatggcccccgtgagcccctgggatcgcagacccgccaggcggtcaagaacggcgtcgtagccgtctcccagatctaccggcgcccgccagctggaggcctgcgccgggggctggctcggaagtcggagacgcgcttcgtcggcgagaggggtgtagaaccagtcgctcttccagtcgtcccacttcttgcgaaggacgcagggaatgtagcggttcagcaccggcccctgcggctggaagtagcagccaccgactaccgacggtggcgacaccggctgtacggtgaagaaccaccggaacagccggagagatgggcgcaccccgatgaacatctcgcacaggtgcgcgaagatggccaacgtcattaccgcgttgggggtgaggtgcgccatctggagatcataaagctccagaacatccatgaagaaagaagagaatggcgggaccagccctgccattgcgaaagagaggaagaagacggaccgccccgggtagtgtggcgccgggcgtccctcacccagcgcgaccacctcccggccggtggcagattccggcatgaatcggcgcggcagcccggcctgcctctcgctcacgatgcgagaaggcggcagcacgctaccgtcgagcggtgcggagccccgtgccatgacgccggcggaggaggagcttgagagcgagcgagtgcggcgagggtagggcgcaggaaacgaggagttagagcgcaagcggcgaaggcaaggggaataatggcgagaggaaggaaacgaatctcttcctcggcgtctttatacccttaccaacgctatgcccggctcctcgcttcccgcgcccactatctcgccacctcgtttctcgcgcccacgcctccaccaatcccactcgcccgtttgcggcgcacgaggcggatgtgcggccgtagcagttgagatgggacagatcgagcgcgcgttaaccatgcgcgccaaacgcgaaaagcgccatcattacatctccaggcgaaacgaaccggctcgtcccgattcgcgcgctactcgagtaatgtagcggtcttgaagaaggccgctcattattatcggtcggttttcccttgccgatgcgcgcgatttgcgaccgctgggttcctgcccgcctgtagagaccggccccacctgtcaccaggcctaaggagtggcgtcacgcccgagcgcttccctcgaggggggcgatcgccctggcatgacgccgggggctactgtcggtgacatgggaccgagagtatcgtgactagaggcttgggcagccgcggtcacccacgtggcttgaccccctcgagggggtcgggcccgagggtgatgtcgaaactagatttcggcaataataaaagggggtggctatcaagctggaaaagtgtatgggtttggagacgaaggatttatacaggttcaggccttcttattcaagaagtaataccctactcctgtccggggatgaatccgccgagtgtattattgattgtatggtttggagaaaatcaacctctgcccctagaggcacccggaccccccttatatatgggaaggagtccgtgttacaaaagataatctatatccctaacggaatatgcagatataggtaaaatacagtcgtaaccgactaagtctcaaggtgtttccttgatgtacaagttaagaaacgaacccgagatacaaataagatattatatatatattcggtatcctatatccagtccaaatatcatcgccgtgtagatatgggatatccataatctccacagtagcccccgagacctttgcagtcaaccatcatagccttctcaaagataataatccgagtgcttcaaacttttcatgccaaggcctgccgagtagcgaagacgaagactgtaaagggcgaaaaaataaggaatatggtgcatcaaatagatgcacctaattaggtgtagcccccaactatgtgattagttaacaaactaaacatatagttgagaacaaaataatagcacaatcgtgcatcatatgacaaaagcatatgcggcacctaaagaggcattctagccgactgctttttagccataataaaaagaatccgagtggttaacactctaaaaggttcacgaatgaacacacttgacaggcatccgaataaaaaactctaaagattacccaccaaatattataaaaattatggtaatgaataagtctaatagcctaagctatgactatccaccataattaaaacaggcatatgtggtgtagaatccgagtaaataaactcataaaggatttaccaaccgcctaaaaaaaatgactacaatatataatcagcctaagccataatattggtcaataaaaatgcacacttacgtggcaaaaagcaacgatattgtatccaatcaattgcttaaaaacccaaacaacaccatgactatattaaaaagtcagcggggcagctatataaagctttactgtttgacaccttttaagatgcattgtaccaactcctaaaaagttgagtaactgcggtataaaaggattttaaggtattgggcacttgatcacgcgcactttggcctaagcgaaaagtgcctgagtccctaaaagaacatgacaggccacacctgaaaattcgcattgcaataattccgaagaattatatgaccgcgtaaaaaaggattttatcagcattgggcaacactattgtgcgcataagttgccaaagcaaaaaatgcctaagtccctaaggagcacaatgggccacgctgtcaaaagtattgggctgaggtactgttcaggcctaagcccattcgcacctccgatacccttaacaaaaaatcccgtgatccaagcgccacttcgtcttccccgccggaactctcgccattttccccactccctgctacagtacggagctgcgccggcaaactagggttcaccaatccactcaaatccacattcgaaaagttcatcaaaatctttcccgtaattcaccgccttaatccctcacctctccctagccatcccccgaatcaaatcagcgcattcgggtaaaatcaatggcggaagagaaagaaagctttgaaggccaatgggcgccatccgacgtgatggaggagaacctgaaggagatggtggcgcacggcgttctccctgccaaggagatcatcgggtggcggccagcgtgcggtgaggcttttccgtcccccgatacacacgaggttgtggtcttctctcatttcttttatggcggcttcgctcttctgacctcgaaatttttccgcgggatattaagcttctatggaatcagcttgcatcacctaaacccaaattccatagtccacatcgccaatttcatccatgtttgtgaagccttcttgggaattaaaccccacttcgctctgtttcgccgaatcttctttctcaaaccccaaccaaacaagagcaagccatgtgtagtcggaggggccggatttcagctgaggggaactctgagccagaagtacttctcaatgcccttcaagacttcaaacaaagggtggcatgcgaactggttttatgttcagaatcctgagcctgctcttcccgagtactcttgtcttcccccagtgtaccaagatacttggaactctcttccgattggggacgaagcagcccaagccttagagttgatggaccgcatgctaaaactcaaagaacaaggcttacaaggagagcagatcactcggcacttcatcaaatgccgactggcgccagttaaagaaagatctcgtacagcttttgagtttgacggcaagcatgatcctaatcgcgaagaaccagactccctggattttaaaatcatgaaggagagaatgtataaaatcttctcaaatgctattgtcgtcagctactcacatcagctgccagttgtgccatataatgcattcaatccgcccccgcaggtatgtatctgaaatcttcaacctatgaccaaaatagtatcttgtcttcatgttgagttaactaaccatggaggcatcttaatcaggaatatgtattgataaaatctgatcccccaatcactcagcgccggtctcctcgccagcacaccgttcagggaggtggagggccaacaatcagaccagattcgcaacctcaaacctccaatccaattggacagacaggttctcgcaagagaaaactggtgcttgacaacgatgaaggcgacgacgacaacaaatctggggacaagggctcgcctaataaactcccgaagcgtaccatgcccaggaaaaaactggctggccgtcaaatgccaaagattagaacatcttccaggtataaacctcttggtaccatttccctttgacatgcttctctcatagaaattatactaaatattgaaagaacactttgcaggaaaccatccgacatagatccaactggaaaagatcctgatcaagctgtgacagagccaaatttatccaaggatcctgagccaactgccgaaagccagccgactggcgcccatgcttcgggtgataaggccgatccgagtgaccagccgccgactggaaaccagtcgacagcagctgaaactgcaacaacccaagagcccccgactggaaaccagtcggatgcaggtcccgatcaagaaatccctgaagttggagcgcagacgacaacttcccaaggaccagagactggtaaagactcaatgattgggtctccaaataaagaacaagggtcacctcacgctcagctaggaacatcctcaggtaactcgtcttctcaagtgataccgatttaaataactccagtttatttgcctaatgtcttggaaatacatcaggaccaccgggcgatggcgaagaagaaattccccgcataaaggcggctgatgattctcgtcctcctatcttgctcaaatggtgggacgagaactcacaggttgccggcatcgtcataaaccgtcaaaaagaagatgaggaagtgtgccagctgaagaaggcgcttggggaagccactcgtattgtgaatgtaaatctttcaggcgactgcctttgatgactttgttttctttttagcagaactaaaccatgaaccatcatgcagagaatccatcttcgtaacgaagccaagaccgcaactttggagaagctggttcctcatttgggaactcttgaagcagttagggaccagctacacgaggccaaggagctcgccaaaaagacggaaaaagaattaagggagcgaattgctcagctccaggattcaaacttcgagctgagtggttcgtcaaaaggtaatcttctagatctgtcccattaatctatgctgtcataactgtatcctcaaccatttggatttcaaacagcgcaagccaccaagatggctcaaatggagaaacaaattgaagccttgaaaaaagacaaagtagaactggctgcgcaaagggactcggccttgaaggaggttgaaggtactgccagctagcaatctggacgtctctcttttaaatgcagcagattcttatcataaatgtgttttgtagatcgtaaaatcaaatctcaagctcagtttgacgtcctggttggtaagatcaagaggcttgaaggggcaagagatgaagtcgccaatgtcgctacaccactcgtccaagctatgttcctcaataacagtggtctgagtgcactcgacgcaaccgaaattttcgacaagctgaaagttgctccggatgtatatttcaagaacatcaagaaagctagaagtatgggagctagcatggcattggcgatgaccaagtccttgtacccgagaattgaaattgacgccattgatggctttgctgacgggacaagcgaagaggctgctcttgatcttatcagcaatgctcaaaacgcggctgacaagattgcaagtgacgttgtagagcaattccgcaacaacgaccttcagccgagcaacaataactctgatgatgaaaggactgattctgactgagtatgaatgtaacaaatggaggctcaatttgtacaatactggtgtatatatgctgtgcttgatagttctagccaaatctttgatttcttaaaagcttttat

SEQ ID NO: 7890 - DNA, 1109 bp, Oryza sativa
attatgaaacttactgttaagacaaccattgcctgatcaggcccaagcccattagcaagttggtaatctccatgtaagttgttggcaacaatagtcatttcaaatgttgccataccatcatcccatcctggctgggaaggataatttgaagtaagctgattattgtttgtgacctgaacaatggaatataagtcaactatgtcactatttacgttggtactgatgaaccaaaaactaaaactttttttttctatagcaaggtatctgatgacagggctttctgccatttgacatcatgaatgtatgagattgagaacatgagaaaacctgcagatagcccccatttaaaagcttgatatgaagcattgaattgttcctttcgatgtaaaatgattcagtgtctcctggtgaatctgcagttgctgagatcacatctccattacttgctgttaaaaactgacctttgatgcaccggaattgatattcacggtaagaaactctccaaagctgacaggagcaccaagaaaatgcaattaggatggaaactcggccatttattaaccagtgactcaagcacttgatggtcttgttgatttttttaataacactttgatttctagctgtttcctaacttcaggaacataagtagtgcattaacagaaaaataagctatgggcctaaaaactgatgaagataatgccatttttcatgcagctttcacagaatctccaagtaggaactgagtaatatatgcatatgataaaaaaatatacgcgtaatatcgatttatgaatcgtcaaaatctttagcattgacacagaaaagacaacaaaccctgaaggtctcccatgttgaagcaacatcctgatccactgtcaagttcccgccgccaccaccatttgcgctcaggtacttctggagccccactgacttcagctgcacctgagtgccatcctgaggcgaaaatccgacagtcacatgagaagaaagtaaaatgcaccgacattgccacaacatgagctccaaacctccaagaaccagagagcctacaagcatgttcccgtttgagatgccatcaaacaacgaaggcttgatccacccctccacca

SEQ ID NO: 7891 - DNA, 6532 bp, Oryza sativa
tctagccaggtatcccactgtccctgttcttctctttcttctcttactataacttagaacaatataaattaaaataattataacttttcaaatcatatattcaacttacgatctgtttgaactattatatttttagtgaaatcaatactttcatattcatattgactatatttaaatgccaacacaaaaattacatcccagacccacatccatcttgaggccaacactaaataaaaaagatattaaaattcatcattgaaaatcggaatatcccaccttaatttttaataaagccggtgcacccattagttatatctggttagacacctaaaaactttctatcaacttaattatattctctcaacatgtatatgggggctatttgcccatacaatttgatatttgagctttttatcaatagatgatcgacttaggagataaataaataatctttagataatcatagcatctaaattatatatatgatctatgaagtcactaataaattagagaaaaactttaaatgatattgtttttagtcataatgtgtaccccatctagtgttatttttttatagacaacataatgaaaataaaaacatgctaagttgaacatcatattgatcgtataagcatgaggtggccttaccaatataatgagtcacttccatataggaattaaaaatcatgtcatttatttcattttggtagaacatgctacgctacattgtaaactcctaacatttagtatagaacaatctagaaatgtgtatttattacatgacctctattttaatatttcttactctattgaagtgagataatttagaagagatgactttaccccatgtcaggttgtaggctcaacccacttatgttttcaacctaaattgcagagatcaaataatttcaaagatgcttcatagaatggaattctccaaaatttctttaaaaaatggacatgaaaacaaacaaaatttatctgttttttttaaaaaatggttttaaaacccattctaaatagaaatattcaaacttttagcagcgctattggaatgaaaatatgtaaaacttcaaatagcatctaacaaaaaaattggatattttgagcaaatgtttgggggtaagttatctctgtaggaaatcaaaatacccaaaattttctcataggaactacatatattatttcgacataatactttctcataaattgagaagtgtactgactcgagtaattttagtttagaatttatgtgctgcaagggtaatcagaagaaaattataactagcattcaaaacacattaaataagttcattttttgtttagatatagtaaaagaatattttaagacaaagtcatccacacatggatattcgtataaaattttacgtacattaaataagatgcacgcgcatacgcgcgggctatcttcctagtttatacaaatgattgtgggaccacctagaaatcattgacgatagaatttataaatattgacctattgttttcaaacaaataacaagctgtatctctctattgattcaacaagctcaatttgagatatttttatatttaggcaaatattcattatcatattcgatctgttccatatttgctctgtatttggattcgataatattttattttgtttctgtatgcggggttttcgattccgattccaattcagaaaagtatgaaaatgaatatgatagttatcattcgtttctgatccattttcatccctacctacggatatctgaaaaaaaaatcagatagtttaggacggttttcgattttcgcgggctactagcctgtttccctttttctttttaagaaactatccatgttcgttcccgaaaccagtgctattcaaaaaaaatccatccaagattatttgcttttgaaaatatatccgaattcaatctgatttcatccctcatcttcctcgagcatcaaattaactccatagttgagcagagaaaacagacattttctttgtcttgactgctcactcaaggcccatctctctggccaggagacatgaagggtcacgtaagccgcccaccgccggcgacgacgacggcgacagcggcgccggcggtccactgccagctcggccgcagaatcgttttcggagcatgattaggtaggcggtcaccgcgcctagcttgtctctagctaagctagctagctactctagctatgcctatgcgtgcctgcactactcacctggtccatgggccgtgggcccatgtccaccacctctacccgtctaaatttatttatgctacgcagtgacgacgacgacgtgcgtacagcgtactagtgcataagctataagctagattttgagcagaatttaagtagctaagctagattttgagcagaatttaagtatggttagccgttgcagtcagtcagtgatcagaaactcggactatatgtggtcgtgcgtgacgaacgtgctaattgtcgggtttggattagattccccggccctaattaagaattaacggtgccaattaacaatgacgggggagatcgaataatttgttggtcgcaaagtcaaaaggtgttcttggatgatgcggctctaaatagtccattactgcatatattctgtgctggctttgtttctttccagagcatggtttggttaattcgctaatccaaacacgccacgacaaagttagcagctttgcatcggctgagagacttactaattaattagttttctcttgttcattgtgaatgacccgcagagtgctagtattgtaaaatgcatattttggcctggcaaagtggcaatcgatggaccattggagcatgtatatatatacgtgcaatacatagttgatgaatagtagtagtactcatttcaaagtcctgctccagctgaattctgttctgttgcacagaggggcataggttcgcaatttcgcataccccaatgagcacgtactacgtactacatacacatacgatgctatcgcgaattggcaaatcatgcatgctgcagaatacttgcaggaacacgcacgaaaagaaacaaatgtggcagctagcgtgcatgcatgcagcgctcacgcaagcaaaaggaccaaaaacgcagcagggcgagctatagctagctaagctatggcgcagcacagcttcactgagaatctgtggcctcgccacggcaagcttatagccggccggacaaacgcgagagaatattttgctcgctagctcgccggccgcgcacggcgcgcgcacctgctgctcgctctggagcgcgcatgtgcgtctacctaaagctaagctagctgctgctacattggcacagaatgaaaaaaaaggaaaaaaaaactggcatgtcacgccgcgcgcgcctgatctgtgcatgcatgcgcgagcgcagccgcgcgggggcgcgggcggtgaacagtacgtacgttttgctgcgttcctgagaccgatcaccgatcacaactgtggccgcgcgcgccagccgtgtcgcgcgcacacgtcccataacattttttgggcggagctaggttgcacgtacacgtacgcgcgaatcgcgacggtgaggcggtggcggtgcacggtggagttcctcgccgttgctgatcatgtgggtggctgcagtggcggcgtcgtcgcacggtggctcctcgatgttgctgggtggtagtgctggtggaggcggcgacgtacgtacgtgggtggcggcgatgacgtgcctccaacaacgatgtgtgttaggtggaataatcctgcgcctgtcaaaaaatcatacgtggcactgtagcgtagcttgtcattttaatcatgcatggcactgtagcatatcttgtcattgttttggtttgttgcatgagcgcgccggcttgttcgcggcgtgagcgtcgtgtgtgagttcttggccatgatggtctggaacgcatctttagcgtgcataccgcgctagtgcttcaacgtgggatcgcgcacgtcattagggagtactggcgcgcatagcggaggccacttcggcacttcctttttcttctcgtttttcagttagcatgtaatcttctttatatatgaagtaaacagaaaacactgtaagttgttgcgcagcaccaaaaaacccgtatcgaacacttggcgatttcactattcatcgtcttcaacctccgatcacgagaggattctgcagtgtagtgagggttgccgctgacatttggtatcagagccatgtcggctcctgtgggtgatcggtcccgcccgccacactggcgtgggcgacggctctcgccgtcccctccgtgcaaccgcggccggcagctcgtcgtgcaacaggttgtcaaggaagggggctctgtcacctaccccacgctcactcgttccaattactctgattgggcggtgttgatgcgggtgaacctacaggctcagggcctatgggaagccgtcgataccggcgacgtgccctttcacgaagatcgtcaggcactttcggctattcttcgagccgtgccggctgagatgctccggccgcttgcggagaaggacaatgccaaggatgcctgggatgcgctcaagtccatgcgagtgggcgctgattgcgtgaaagaatctcgtgcgcagaaactacgccagacgtttgagtccatgcgattcaagcccggcgaatcggtggaggacttcagccttcgcctttagggggtcgttagcaacctccgtcttcacggtgacgacatgaccgaggaaaagatcgtccgcaagcttcttcgtgttgttccccgcaggtatcgtcagatggccttgtcaattgaaacattgattgatctcacgactttatccatcgaggacctgactggccggctcctcgccgttgacgaccatccggattccaacggggaagacgtgggccaggctctgctcggggaaaaggaggcacctgctcgcaacaccaagcagaccgggcagtcgtctcgtgacactggtatcgggggcgtcaacacagggtcacgccagcaagggcgcggcgggcgcgggcgcaacggcaacggtggcgacaccaagtctacgccatcacagacgggaagccgcaacgtctccaaagacaagtgccgctactgcggcaagctgggccactaggccaaagattgccacaaggcaaagcgtgatcgcgaaaagctggcccaggctaatctccttgttgcagaaccacagcaggcttgtggcgatgaggagcccacgttgctgatggcacaggtctgcgagctcgcttccgtcgacgaacctgagctgaccaatggtgaagtgcagctgaacgaggaacgcgcgctcgtttctctccgcgacgagggggagccggtcgaccccgactggatccttgacacgggcgcctccaaccacatgactggggcgcgggacgccttctccaacctcgacaccaccgtgcgcggcacggtcaagttcggcgacgcctcgcgcgtgcggatcgagggacgtggcaccgtgctgttcgcctgcaagaacggcgaccactgcgcgctcaccggtgtctactacatccccaagctccccaacaacatggtcagtcttggccaactcgacgaggtcgggtgcaagacggtgattgaggacggaatcctcaccctgcgcgaccaacggcggcgtccgctgtgtcgcgttcgtcgcggaacggggcgcctatatgtgctccaggtcaacatcgcccagccggtctccctcgcggcgaaaagcgtggaagacgcttggatctggcatgccaggttcgggcacctcaatttcgacgctctgcacacgctcgccaaccacgggatggcgcgtggcctccccgaaatggaacgcgttcgacaggtgtgcgacgtactgtgcggcgaagcggctcgatcttgtccacggcgacatctgcggccccatctcgccctcaacgcatggtggtaaaaaaatactttctcctgttaatcgatgatatgtcgcgttacatgtggctgtacctgctaacttcaaagagcaaggctcccgcgacaatcaagcgcttcaaggtaggagttgaggttgagactggcgccaagctccgtgttctccgcacggaccgcggcggggaattcacctccattgagttcgggctgtactgcgcgaacgagggcgtcgcgtgccagctcatagctccctactctccgcagcaaaatggcgtcgtggaacaccgcaaccaaactgtcgtggccatggcaaggtgcatgatgaaggcgaagtccatgcccggagaattctggggtgaggcggtcactacggccgtgttcatcctgaaccgatcgcccacgaagagcgtagctgacaagacaccctattaggcttggcacggacgaaccccttctgtgcattacttcaagacgttcggctgcgtcgcttacgtcaaagaggtaaggccacacctcaagaaactggatgaccgcagcaaagccatggtgtttcttggctatgaaccaggcacaaaggggtgcagggtgttcgatccagcggacaagcg

SEQ ID NO: 7892 - DNA, 5943 bp, Oryza sativa
taccaccttgcaagggtgtatcatccacaatttaccctctgtttctcggagatgcatcaaaagattagagaaactgcagcaatcgatcctgttggggattagacgttacacagtgctttggtatatatgaacggataggatattcagccctgcacatgcacagtgcatgcgaattccctgtagaagcctgtatatatacagtagctagaatcgctggatcgagtggcatcgaagtgcggctagctatagcttacgctagcttactactacctccgttctaaaataagtgtagccgcggtatccgtatccaacatttaaatatctgtcttatttaaaaaaattataaaaaattaaaaaaatgtcacacataaagtaaaatttatgttttatcatctaataacaataaaaatactaatcataaaaacattcaacgaagacgaacaatcaaatgttggatacaaacagtgcaaaactacacttatttagggacgagggaggactgtactatttcctccatttcataatgtaagtctttctaacattgtctatatttatatagatgttaatgaatctagatatatataaatataaataatgctaaaaattcttacatcatgaaacggagggagtatatacagtactattaccacaatagttatggctagctcatctgtacgcctgtgtaccagtgattctcagctcgtacgtacgtacactgcagcagccagagatgaccgaccgaccgatggcgacgacgcgtaaaatattcccggaaagtaaagttaccgcgcggccacactctgttaccattttacagtactttatttactgcgaggatgatgtattctctcgcttgtgtttttgcggccagagagagccagccggccattccctctggttggccatacacgaggaacgggttaggagaaggattttaatcacatgaatctacgtctactcattttcttgacatatattttgtaaaatgatatattttctctgttttatattataagttattttaatttttttttaagtttgattaagtttatagataaatttaacaacatttacaacaccaaattagtttcatttaaactaacatttaatatattttcataacatgtttgtcttatgtaaaaaatattgctatattttatatttaattgattcaacttaaaatgatttgatagaaaaaaagtcaaaacgacttatattacggaacgaagagagtatgacatattaatttatcttttaagttttttaaaaaggaatttataatcaattacttggcatatgtactactataaacgattagccgggtgtacgctccagaacgggctggtccgtgcgttgtccgtagcagcagcaacacgccgcgcgcgcggtcgcgtttcccaatggcccgcgcctacgtcgcgatcgatcgtctcatcgtcgcggaccctcttggagatgtgccacgcgccgtgccgccatcccgaccaaatcatggcctaatcacgcgaaaacccgcgctttcccacgccccccccccccccctgttcaccttgacctgtgtgtatataattactactagtcgcctccgaaagctacctctgcctttttcaccctcctccatccattcccagctgctccatgctgctgccgccctctcgtcctcttcccttcttcacgtgtagtctcaccttcctcgccatcgccatcatcggagctcggtctgcccatggagatgacctagctagctagctagctagctatagcctctctctagacatctctctcttgtgtgtgggtggtttggtttcttgattggagcatggcgttggaggcggtggtgttctcggaaggatactacttcggatgcggcggtgccatggcggcggaagcagctgcaggaggagcttggagctggagccacgggtatggcggtggcgttgatcaggggaagggggcgatggagttagtggtggacgacggggtggtgaacgccttctgggacggcggcggaggcggcgcaagctcttccccggtgatggccgccgtctcggggtttattgaggagccggacggcggtaattcctccgtcgcagacgcagcgccgccgccggagcacggaggtgcgtctgtcgtcggacgggatggctccgcggcggcgccggcggcggccgcagggaggaggaagcggcggagggcgaggaccgtcaagaacagggaggaggtggagagccagcgcatgacccacatcgccgtcgagcgcaaccgccggaagcagatgaacgagtacctcgccgtgctccgctccctcatgccggcctcctacgtgcaaagggtacgtctcctgccgacccatctagggctcacttcgcccaagaccgccattgatgatcttgttagaattatcaacaattcaagctataaataaattaaattctcatgtggatagggcgaccaggcgtccataattggcggagcaatcaactacgtcaaggagatggagcagcttctccaatccctggaggcgcacagacacgcccgccgcgcacgcaccgacgccgccgccgcgttgccattcgcgggcttcttcacgttcccgcagtactccatgagcgccgtgcccacgacaaccaccaccactgtagcagcagcagcaacggaaaacggcaatgccgtcgccggcgccggcgcgggcgacgacgcggacgcggacgtgtcggggtcgaagccgtcctcggtggcggacatcgaggtgacgatggtggagagccacgccaacctgaaggtgctgtcgcggcggcggccgaggcagctgctgaggatggtggcagggctgcaacaccaccgcctcgccgtgctccacctcaacgtcgccagcgccggccacatggctctctactcccttagccttaaggtatagtaaaaacacactacttcttcctttaaaaaaaaactaacctaaaagatagaacataatcataatctaatacaatgaatttagattcgatttttttaaggatgcagagagagtacgtgtatacgtgcatgcgtacacgtatcctctccccaaaatactctactccattttctccattttagcagctacgagtagctggctactgtagctagatagcctcgttttccgtgcagaaattgtcatgaacgacgcctacaaactcctcgtcattcggatcagtgtcatggctgcttcgcttcgctcattcacccctagagaaccgagcacccgaagcagaaggaaaacaacaaccgtttttttttttaatgacgctaacgcatgcatggctgctctgtggtcgctgcaggtgaaagaagactgccagctcacgtcggtggacgacatcgcggcggcggtacacgggatcgtcgagacgatcgagcaagagcagcagcagcagcagaagcagagctgtagctagatcagctagagtattttcttagaacatttagcaatggcaaaaatggtcaatattaatatgcgccaaccgtgtgtaatgtgtgcactttcgattcttctagacctctgtacgctggatgcacatgtaccgcagttactacacccacgtacatttctgtagttcatcttcacttcaattaatgcatcatggtctaccactctgtacttataaaagaagtcgtttagaataatatttaagtcaaaccttgagaatataaatcatgaataactctcaagttgttgagtttgaaaatgtaaaaattatataaatagatttgtcttgaaaaatactttcataaaagtatacatatatcacttttcaataaatatttttatagaaaaaagttaaagttgtgttttggaaatcgtatcactgtccaaaacgacttccttttttagtacggagggagtataccaatataatgcggcagtgagccagtgaagtgtttgaaatgggagctcctcgtcgtatgtagacacgaacatttcttagtggggtacatgttttcgatctgtagctaggatccaaacaacgcaattgataggcacagctgcggggtactctcgatctcgggacccctagcttgttccccgcatgaagcatacgtcgattattgcaatattcaaagccctagtttgaaatggtaggatttcaaagaagttctacatgaattgaactaaacagggtgaaaattaatctcgcggaaaaagaatatcatgagttctaaatagccccaaatatgagcttatgacaaggttccaacatttctgctctgccgcctatggccacccaccaatgccaaccagggttgaaaatggtcacagaaattttcaaccaacggacgctcgttttttatttctactgaccaagccatatggaaatggtaaacaacgaaaacaaaaaaaacaaaagcagaaaagatttccatgtttgattgtattatcgtggaaattacctttttggcaatggtatttaccatatttctaaatactccaatatctatggtccaagtctctatttgatctatatttgatctatagtttagatgctcatcaactcctaaaataaatcccagtaattagcatatttctaaatactccaatatctatggtccaagtcatcttttgatctatagtttagagtctcgtcaactcctaaactaaatccctaggttgaatgcatggctaagagagacaaaatttaacttatctagtgcaaacttgaatttaattggtcatattatatatagttatactaagttaaatatgtggtatttttagtttaatatttttaacatttattactggttttcgatcgataccgatatgattccgttcgtatagtttcgtttctgttttttcaatatctctgataccattttcgtttctagtagctttataattttcaatttttttttcgagaaaaatatagttatgggaaaagttaaggctgtttggaccattttcaaccattttcatccttaaattgtcagcggacaaggagccatattctagaattataagccacatggacacaatgaataaccatttggtggttaccaggcatcgtctatcaaaagatatgctactagagccgtttttcaagttacctctacacatgcatgtggttgtgatagtctgagtcgtcaaagtattcaaccagcatgagaaaaaaaaattcaaagactggtttatcagatttataagttatagacaaaagctattgaaaacagttcaaaattcatggtaatctaaattgtgctcatttttaattaatatggtggattggtggataattaaatccctggcctctgcatctaggatacacacacaaccccaggtccacaaagtttaagttaagaagatactctaacaaattatgataacctaaattttgctcatgcatgtttgttcctaaaacaagctttgcctttctcgcaaacatcaacagttcagattatattacagaattgaatatcatatatagttccgatttgtttgcttaagattggaggatggttaactttgaccagtgctagctgtcagctaggcatggctttgtctgacgagcctttttctctgaatgaagtataatcctactccagaaggagagttttgggtggaaaagcgcatatggccacatgggagatgaacaaggagagctatcagcaaagcattggagatgattagatgaacaaggagggaggagggagagcgatcgacgtacgtctactgaacgccggaaagtgaggtgacggcgagggctggaaatgataggaaaagacgcgctgctcgtgtcgtcccatgctgctatttgacccttggaaaaagattctaggacagcgcttgctttccttcactactcctacacacaacttttccctcttctgtctaggcatgattgatccaatgcatgaattgactgctgaaatgatccgtctctcccaaaatgtgtattttatcggcgatta

SEQ ID NO: 7893 - DNA, 15801 bp, Oryza sativa
cacataggacctcaccacgccctccaatctctgttttcatcacgcgatggcacatgggccatgggtccaaagtgcagagttagtaacagaaagatggttcaaagcaataagtgctggcaaaacctattcaagtactccaaaaaggaagtttactcgatacttcaaaatgtcaaaatacaaggacgggatcacgagattgtgggaggaactaccacacatggatgattttttttttttttttaaaaaatctgcacaagatagtgcaaaaatttatattgatatagtcaaataaattataagactgcaacactaaaagcctgtaaccagataaaagaatttttaaaaaacaaaccacctccacttgctagtagctcaccgcacaacccattagaaggcactagcactaagctggtcaccgctaagcgtgatcgaccgccgatatacctacttggggatcacaaacgctccacaaaacaccgaaacaacaaaagagatcaacgacgggctttcgatcatcctcacagggttgaggagagagagggcaagagagaagaatatccactcatctctcacaacaatctgatcacgaccatcgagaaaaccaaattgagaggagacagaaaaggtggggagcgaaaacttgctaggcaacgccactatgaaggtcgtgacaccttaggcaccacatggatggattttaaaatttccactaactgttttcacctaatttttgacaagttacctgtaccaggctaaaccgatatgcaagagttaatataccattttataactgcaatcgaatgaaaaatatgcagaaaaccacagagctatataatcgtttgatggtcctatagaatcatatgatatattgggaaataatggtactactacattggataagtatagagctaattgaagtgcaagagattaagccgtacgtacgtgcataatggttaagacggctaccgtctctacactactttaactagacatataaaaatactacatatacaaataacatgcatatataacagataatggtgtatcattaaagatcactggtcttacttagaggagaagcatggttactgcagtcggtctcgctcagttgaaaattacaccaattaagtaacaatcaactaggatagagagagaataatgacaccagtacatacgatatgttagtagaaaatgtaacgcatgcttcaaatataaaaggaagtagaggagctatattaaacccatgtccaaattaacttagtcacagctcagacagctagtagattttagaggtaacatggaaccttgggaaactacattcaccatatcaagacaaacatacaagttgcctgacagctttcgcaataaatcatcggatgtttccaaacttaggcacggtttagatgggattaaaacttttaagtccctatcacatcggatgtttggatactaattctaaatattaaacgtagactattaataaaatccatccataatcttggactaattcgcgagacgaatctattgagcctaattaatccatgattagcctatgtgatgctacagtaaacattctctaattatggattaattagggttaaaaaatttgtctcgcgaattaactttcatttatgtaattagttttgtaagtagtctatatttaatactctaaattagcatctaaagacacggactaaagttaagtctctggatccaaacaacacctttgactaataagttagccctacatgtctccagtaccctaattctattcagctgctgtccgaaaggaatcacttggactctcggagtaggccctgaaacatccaggaatatataacttcatcagaaaggaatattcctgtatctacacagtatgtcggactaagtatacttctcttaaagcactgggagaatagtagatcgatcatagaaacctgacatcagggtattagatacgctactgaagtctgtaagtcctacagggtattcatcatttggcatattgccagagaccagagcaacatgtgcacagatcagaaaatagatctgacttccctatcagacagcataaaacaacaagttagcttaacgtctccgcaatttgcgtagagtacatctatttttctaattaaaacaaatttccacgatgagagaaacttgagactagcattatacactcaaataggacagatagtctcaaccaatagctgaatttctccatgttttatcaagattcaagaggaaacaagatggttctggcaacatgtccgtataccaataatgccaatggtaaattccattattgattggatgtgatgtttaatcattttggctagttgctagaaaaaaatgacgaaatttccacattcataaaaggactttgaacacgggacgggcacacatactacaataccaaacaattgtactaaggaaggtagacataccacctaacaggaaagcagttcatgaacgtgtttcacactctaatagttagtaagaaaaggataattatgatagcaatacctattatgtctgaaaaagagtaaccaccttgcctttttccatgttaattggcataatgttgttttcttgggacctgctgcgtcattgtccataaccattcacaggttcatgatgtccatctgaagagaagacttatttggatgagataaacaatcgcaggtacaaggagaataactatctagcttccattacagtgaactatagtctgatgaaaagcagagacagagagctccgtctatttcaaaaggtagtagcatcaaatatgtagttatgcacaaactatctgctgaaatacttgaatacaagtataccacaagttccctcaaaatcaggaatatgccacaaactcacatcctcatcaacttgtaagatgaaatattcaggaacaagttcaaaatggttgtatggtattcccgaaaaatggttgtatggatcagtttaggaggatatgagaatatgacacacggatgcacgcaagtaatataatactccctccatttcgaaatgtttgacgccgttgactttttagcatatgtttgaccgttcgtcttattcaaaaaatttaagtaattattaattcttttcctatcatttaattcattgttaaatatatttttatgtaggcatataattttacatatttcacaaaagtttttgaataagacgaacggtcaaacatgtgctaaaaagtcaacggtgtcaaatatttcgaaacggagggagtatcaatctgcatgacataactagtttagtcacagcctatagtttcagcctaacccaacaggcaacagtgttaatttacatctaaaagccaagctaagaaaaatcagattgcatttacaatctactgagtctactgtagtatcaagtctatcacaaaataaatctgtacatggttgcataatttcttatccaaacaatgttaaataaaccactaaatttagtaaacgagacaataatatgtcagacatatccatctagctgcgatttcaacacaaagatccccaattagctggtttaggaagaacaatggccgcctccactcacctcccggcaactagcacctcgccattggtctcagcctccgcacccagcactgccgcgtgaccagttgaggaggaatgaacggcgacttcgcgaaaccccccgtcgccgtactgttccgccgccgttgcccgcggcggccatggcctccttctatccgaaggagccaggcgagcactcaacccggaggcgttccatcggacaactggcgcgcattccacccgccggccgccgctcggcgagcagccggcgaagcggcgcggtggtcgcagcggcggctagccggcggcgaatcgattggttcgcgaagaataaacgcgattagggaaagcagccgatgggcaccgttggatcgggactgtgcggtctggattgaatctaggaggaactttgcaaaagagaccttcatagcgtaatgttttagcaatggggtctctttctctgtgtcgcaatcaatgatagagcagccgttcgatcatctttcaacggctcagatcgtagcccggttaagcacgccatatcatccacacaagtaatcgatccgatcttctccgaatcgtctccccgtccccaatccattcgagcttctcttctccaatcgattcgcgatttccaatccatggcgactctcaccatgcagccgatcggtcccctaccgtctactaagcaagaaggcacaaggcaagtgaattccttggtccgctttgtactcactgagattgagagcaagaacaagatgggagaaactaggtttcggtgatttgtttgtgatttcttgtcctttgatcttgctgcagcaggggagagaagcctgcggagggtggtgccgatttgagtgacatcgactcggggtatgtggctctgcccaatttattgtattgtctcgcttggttcttggcttataattagttgatggatttgttgttgtggtggcgattctgggcagctgggttgttcttgggaagtcggatatcgtcccggcggatttggcagcccagagcctgcgctcatctccgaagacaattcctacatggtaggagaagcaagcatgcggttgtttcctttttctgtatgatgttttgactaaatttgtgtttgttttggtgttctttcagggctcggtgggtgattggaggtgtgctgcacacagtggtgccattctacgagagagcacggtatgttgaaggtatgtgcgcccaactccgataatcttccacctttacctatgagaaaatgactttgtaatgttgaatgggaggtaatcattattgattttatgaaatcactgtcaagtagtaatccagaaactgctgtgcagttcataaattgctgccaagtagttacaaagtatctgtgtttgcaatagttgggagaattttagggtgcgtttggatctcaagcaaggcctaatttatccttgctgtcaaggtttagtgttttgtagaagctaaaagaccttgctgtcaaggtttagtgttttgtagaagctaaaagaccttgcttttgatggcaccagtccataataacctgaaaaagcctgcctgatgaggagagccaaatcggttctcccccgacggcaaacggcgtgcgtgatgtctcgtgataatcaaccgctagattcggtaaaagctaagtaaacgaaatgatggtcgttgcttatataggctactgccaaaaggagctagataaatctagccgggctaggtaaagtaagcaaatgatccaaacacaccttagtgctgatgtttggttgttcacagatgagacggctcgaaatgtggagactgctgctgaggttgtggagcaaatagctgaggtcacagagaaactggcttctaacgtggctgatcaccttccagagaatggatgtctgcagaaagtagtggagaagattgaatacatagctgaggtagtggatgaagatgcagagaaggttgaggccattactgagaaggtgggctccatgtcactccctgttttgcctactatattttatataggatacataatgtcatttgaatttcagaatattttgaaagcaaattagcagttggatatgctgtatgagttgattggtagtgctaaagataagtgggtagagggcaactctaagtgccaactgtgaacaccagttttcaagtgccgttatatatttctgttggctccacctaaattgtagtattgtagtaaccacatgcatcaagaatatatctattcaactttcttttgtataatagtgttgtaccttcattgtgtgctacatacattttaccattatagtgtttatattgatgataattaactttgttagttgtttctgccaaggattgtttcgctatttctgttttccactacaaaaattctgacaattcaattgttaaaggattttgcttaattggtaaatctttgtaggtattgttgaagacttcaaggtcatagttccacttcaaaagtatattgttgacattaaatcaaaaaaaattaatgcaattttactgtgccacaatttgccaggacatctaggaataacgtcctattttcttttgtatttaaaaagagtctactactatgcagccttgtggcattgcactagttttagaaaatgtatctatatagcaagtagaagagtacaataacagtgaacaaaatgccggattgtaccaatacaaatcaactagtattgttttatcctaataaaactgaatcaggcaaagaaagaaaggattcctacaggtatagagtcattttgcgtaaaactgttgagatatctgcactgttttggaagtattgtgaaagacaaccaaagatgaagctattaacactttattgatcttctcgctaatacagattgagaatttcagcgacaagattgatgctaaagtagaacctatcttcacggagattgagaaggaattcgaagactcaacatcaaatgatggagtaaatgcaaatatataatcactagccctacgtagaaggaaatactctcagctccccattgtgtatagcatatgcttttttttttgaatgattcgttgtacatatgtgtacctttctgtatgagttataccatgcttattgtgacgcatggtggtgttgtggctggtgctcgaaactaaagtagagttagcattgactattgagactgttgagctgtgaaatttcatagactggtacaaaatagaatggttggtactggtaaatgctattatatcacaaaatgaacaatgcctttttggtacatagaactggaaccacgaacagtttcttatgaaatttttatgacatttatttaaagttgggttgtcatggactcgtggatatagtagttattgtgcacgtaatatgaagtgctaattcgtcaacttctaggttcctgttgaactgtccccccaggtcttgttcagtgctcagagtttcagaaatcagaactgctcgcttgtctacctttcatgcaaaatccacccgggttccagggccatcgccggcgagaagccagctcagcttatgatattttgcttgggatattctgctgtgttggatttatatcccccgaccacgaggcgcacgcgagccaagcccagctgccattgcttacactagtcactggatcaacgaacagcgacttggcgagaagcccggccgcgcgaaacgcattgctttggcgccggtcgcttcgggtggaagttggagaaccccgcgaccgcgactccgcgggacgccagccagcctattgctctattccgtactgcgacgaagaatccgacgcgatcacgtagcaaccgcgtgccacggctccgagtccgagtcgcgtacgttggtgccgccgtgccgggagcccgggacctcgatcgagtccgcgtcggggcgggggatcctgcctatatatgcacaagcacgtaggcgtacgaccacaccaaacacacccgtaccgtacgggcgtatcaccaagtcggcaagtcacaaactagttgagcaggagggacgacttgtgcgtggcgggtacgtagatggatcaggaggcctcgttgctgccggcggcgtcgtcgcacacggtggtgaggaggaagagagctctgcagcttaacgagacggtgtacgaggagccggagtacgtggcgaccaagggtggcacatacaacgtcgcggagatgcccgagaggttcaagtccccgaacaacgtcgacgggcaggatgcgtggacgaccgccatgttcgtgcgtggcatgatcctgttagacgcctccttccgagagctccaatcgaggattgcatccgagaaaatgccatccaatgtttgtgattgaagccttatttcaaaacgcgcattaatggaggcatatttattagtattgttttattttgtttttcttagtttattatggtggttatatgttaatttggcatgtacacatctcgtcggtgtttatcttcttttcctagctcatgtaaacaagtttcacgaggaacatttgcggaagcttaagaggccaccctaataagcagagattgccaggaaaacgttgctcaacaaaaagatcttagtaaccaactcgaaaaaggagaccaggcatgacaagtggcgatctctgtactagaatagaacccctgttagcagcgttagcaacttagcaattggatttttccatcccttgggagatgactttggtgctaatctaggaagaacaaaaattcacaaataagcgaacaggaagaagaacatcatcggactctaagcacaaaagatctgctggtgcggcaactggcatctcaccgtcttgcaaaatctgtgcaccgagatggtgcacctgctcctcgagcctctcgtaatctgcaatttgtagcaccaccataccgtggattccctcgatggtatcgtggtttggcctctgagagttcgtgcgcgctaaatcttcttctgtttgcaactggcgtagtagggcctgcacttgttccttcttattcagaacaccttgatgcattttttcgagccttctgttgtccgccgagagcagttgaggcgctggggctggtggggcttgggccggggtagcaacatcggcggcagccgcccgcgccatgtttctatcccgtctacgccgacgacggccgggaccctgtgacatcatgcacacgtaaaagaagtcgatgaagaactgaacatcatgcactcaacagttactgaaccgaacaaatgtagttagtgccttaattactggaccgagcaaatgttcagatgatgagatcaaacatagtaccaagcaaatgttgaagtgaaattacctctctcacaataggttgctgatggccgccgactaccgcaccagcccatccaccgcggggagcaacgccgccatcctgacggtccgcggccactcctccgccgcggcgagcgccgccgccgcccacacgatttgcgcgctgtcctccgccgcagggaacacgatcgccacctcgaccgccaccgcccactcgatctgcagctggtcctccgccgcagggaaaacgatcgcaacctcgaccgccaccgccatgacggactcctccgcggcgaggtccacccggagcatccctccatacctcatcgggaggatgcaaatggacggggaggaaatagcggtggtgtcctccccgctggtcgagcccgataccatcgccgaggtgcccgtcatctccatggacgacgacgatcacccgacctccccaacctctacgaagatcgcggtcgaggggcgcccccaaccaaaactgcgcatctgcagcgtggatgtagacctctccgggtcccccaacgggcacgttcccgaggccccgcagcgcactgcttgggaggcaaccggcgaacgatcccatggcttcaaggaagggaatccagaacgtaggaccgttggtgttggcgatgccgatgctgagtaccggagcccagacctgcaggcgcggagtccgagcatcgcgtcggagctcgcggccgtacgcctggtgttgctggtcaccggcgcttcgggcttggacgccgcgcgcgcccgccctgacgatcgcagaagattcccgatcccctcggccgcaagctggctcggtgttccagtcgcgcgcgcgcgcatgaccgcgctccggtgggtgaggagcagcacggcgctgcggggaaacagtagcgacgccgccgccgccgccgccgccgccgcggcgccctctccctcctccgcgtcgtccacgcccacgagctccaccttcctcgaggaaatggcgctccccttggccgcgcccatcatggccgcgtctgtcgtcacggcggcgagcaaggcgcgcgtgagcagctggtgcctgccggggatggccgcggcccctcattgctgtggccgcggcggcgacggcggggttagagggggcggttgcggtggtggtggtggtggtggtggtgacgtggatttgatcggaggacgacgcgatttataagagatcgccgtgttggaggggagaaggcggaatggcggattgggaagcgagaagagaagagaaaaggggagaagcggtggcgaggttgttgcgcgccgtgttccccacgccgtactaagccgagaaaggaatggcggcgacggtgggtcgggcccttgctggtaatttgtttctccggtaggtcgggcccacaaagcgcgcaccggcggacggcggttgatggagacggtgagagtgctgcgggatttaggctggaggcttgccatgggatggggagcgttgcagcagcagcagcatcatctcaggcgagcccgagaagagagatgagagagggaaccagcgcgcagaccgttgtgctttaaacaagggttccatgtacttggagtcatcttattacaattttactgttattcatctatttcgagtcatgtcattacaattttgctattatttgaaatataccactacttattccttcaatttaattcctaaaatttctaaaccaaaattcctaaaatttctaaaccaaattatccttcttcctcctttatttcctctctcttgttcgtcttctctgtgaactagatctcacggccactgagctgaaccttgaagcagcaggcagcatgcctactacagtggtgtttggatcagggactaaactttagtccgtgtcacattggatgttcggacactaatttggagtattaaatatagactacttacaaaactaattgtataaatgagagttaattcgtgagacaaatttttaagcctaattaatccacaattagcatatatttactgtaacatcacgtaggctaatcatgaattaattaggctcaatagattcgtctcgcgaattagtttagggttatggaatgagttctgtcattagtttatgtttaatgcttctaattagtgtcccaacatccgatgtgtcaaggactaaaatttaatccctggatccaaacaggacctacggtatgtagaagcggagtagctgttgtggacccaatcatgcaggcatatgcagcaacgatgggtcaaatcaacaactactcacaatcaccgggacatgatcccaaggtgaattagctgccatgttgctagtagagatgcaagcaggccaacccacgaacctgcttatatgaaaaattaatgggtaacctgtggattgacccgtgggttatctactaatttgctttgtaaatgagtttatggatcgatccacttgcgtctctaggtgcggcaagctaggctacgacgcgaaaacccatgagttaccacttatttgatatataagtaggttttcgggtcgtcctgcttgcatccctgctacaatgttgcatctaataatctctatccgatccaccaaagcacttgattccccacagaaggattaagatgcagcgtaatcaaacaggtggcctaagttgctgcttggtcgttagtcggtcctcaggcagcatggcttgcgacgggcacggtgacggaagggattcgagcaccagccgtagggcctcatacctaacctccgcctcctcgccaacgaggatatctcccgcagctccagtctgtcacccttcggaccaacggcccgacgtccgaaaacgcctcaccggaaggggctcgtgcgaagagcacgcatcggtgtatcagtaggtcaatatcactgaatgaagaaaggggatgcagatgttggagaagatgaacatgagatggagatggagaatcggaaaatcggcccacgaacagcctcatgcttgcctaggctgcaacacaccgccattcggctattcctatcaggtggagggggaaaatggcaccatccttgttagacggagggggaaaaaaggctctatcgcctgctattctgagggtggtgagacaatgaggactttcttcactttgatcatgagtctatgtcaactagcttcctctcttctaccctattcctcatgaatggtttcttagaatcgatcaaactccacatattaggttgcctttgagcaagcttctccctttctcatggaagaatcgtttgattgaagattcagttaaagtcttccccatcaaaataatgagatggaaggagctaggtttgtaatgcaactccaagctctgtcgagacactggatcacggaaaaattggagataggctggaaactattgttttccccacctatcttgaggatgaggtgaacttgaaatgcattcactaataaatggtgtggtataatggtataatgaattgtattctttgtgttgctatacaattggatcggcttatatagcccccgaaattacacatgaaattgcaatcttgccccaagggtgcactggaagttactataatacccccataaagttggaaaacctaaggatgtaactatacattcaagtggtctcccagagctactggcgtcagcttgcacgagtgattggagtgatccccacgacatcttctaagagaatattccatgctccatggtgtaatcatcaagctcctttctcccttgtcgaatactccctctatcctagtttgatcatcacataaggtttttaatgtcttcccaaaatgatcatcctctaacaagtgcatcttttttttatttgtgccatgagtaaatgagcatcattgaatgcattgcatgtaaccaaccaagattaatttctattggtccaactacatgcaatatttaaaatttgatacaatacatggaacacgaaatgacgtagcaccttaaccgatgagaattaattacataatgatgaatgttttattatcattggtctctgtgctctttgcttcggtgatgatcaaaatggaatggagggagtagtatttttgtcttgtaacgaattcgaatactactttccaagccggcattcgtgtcatgtccctcggtcatcttctacttgcttgtcacaaagggtcgaaaagtatttgccctaagtaaatatatcctcgattagtattgggataatgttttggtcaaataaggagatggtgtttgtctcttactgaaatacttgtgtgttatgttttttggtcatcaattgtatgcactaactttgttttatatatagggagagagagatgctactaccatgtttttgggtaccgcaagttggaattgaattgataagtttatatgaggttggatgttttggcatcgctatggatgtcaaaaaaaggttttgaggccaaaaaaaggtatacaaacaaaagagaatccaaggataaagttacaccatgtagatatgtttatggaaatgagggtcatcgaggaaaggataaaagagatcatctaataaagtatccttgagctaaaactagatctgattgtcaattacacatgggtgtagtaatggacagaaagacaagaaactatgaaatagctaagttaattttggaacacactcacccttttgtattttcctgaaaccttacacttgatggcattataaagaagaatttcagatttacaagtttttgaaattgaaatagccgatggtgcaggaattgggccaaaggcaacaaatgagttggcaagtcaccaagttggaaccaaatcattcgttgttttattataattagctttcttttgtcattttgcaagcaaacattttggaaccaaatttctttaaatgttcagccctcacatattgaattagcaacaacaacacattttgatgttttttttctgttctgatgtcacaatctcttttgccacactaaattggcacaataatcagtgtcaatctcttcgtatttttaaattgacacaatagtcagaatcttaaatttacaaggacgctcactctcatcacattcagtattgagtcacaatctcaattcaaatagatttacagtttcaaatcaatttacaatcacattcttgatctactgttgttgtcctcctcagaggtgctggtggtggccgccctgacggtccagactttgctagcaacaagctagggacccgctcccgtcctagtgttctcatctaggttggaacgaggtgctcgataaggacaccaccgtgaaagccatcgtcgtcgatgcgagcatatgggtggagcaggcccatgaggcgaggcgatggaagagagaggaggaaggaaaccagagtcgaagtgttaggagtgacgggctgtgcatccgtgggataatttttgttcgcttccgcgcttctcgctagtttttcgtgcgatgcggatcgaacggacgtgcgacgcgccacgtccgtcttgacgtcgcaagaccaacgtcagtcagacgatcgggttccagtccagcgaacccggaaccccatatgtttccccggccgtttgggatattttgccgtggttggtctggtggataaacctccccgcgaccgcgaggtttgcctactgctctctgtgtcagatatccacacgtgccccgtacgccgccatcgccatggctctccccctcgtccgcctccccccgctccccgccgcgcgccacccaccgttgctccgcctccccaagcactccgttccgcctcacggcggccgcgtctccttcgcctgttcgtccggtagccgcgccgccttcgctgcctgctgtgctagcgcctcggtggccccggcggcggaggcggaggcggtggtggaagagcccgaggggccgaggacgcggctcatcgcgcagaacatcccctgggactgcacggcggacgacatgcgcgcgctcttcgggaagcacggctctgtcgtcgatgtcgaggtaaattgttttccgtcgccttatccttgtccgcttcagagagaaggaatgtgcggcgaatttggagtggcagtaattcgctgtgaccgcgccgcagtacgaagcaggcagcagcggcaccccacggttgctgagagcctgagatcctagtgccaagaggatggcgtgaatttgcacaagaacacaaatgcgtttagcgcgtcgatctgaacaccaatacaccatggtccatttgcctgcaagaatgtccaatttagactttaaactattgttcatttcaaagttggttctgctcaagtaggagccaggtatttgaaagactccaatggttctactaacgtggatgatgtgttcccttgccagcctcttctcgaagggtgaactgaagaatctgagtcatttttgtacttaacaatctagcagaaattttgggcaaaagaatcgggactcagtagtccaatgcaaactgcactatttgcagcttcatttccatgttttaagccttacatgttaatatcaggaggttaaccagctgacctggctatgatgcattcaaaaatggatctttctccattatttactgataaatggcatcattagtgattagttttattgcttgatttgctagctctcgatgtacaattcgaccagaaacagaggattggcgtttgtaaccatgggttcagaagaggaggctctttcagcactcaaccatctaaattcgactgtaagatctagattgttctggaaggaatgtctatttgtatcagacatactcttatttattttttgagtaaaatgcaccagcggtccttaaacttgtcagcaggtttcacttaggtccacgaatttgcaaagcgcacatcgaggtccctaaacttggtttattgtatcatcccggtccaaagccgcgtttgaccgtggtcttgcctatgtggcacgccacgtggacgatgacatggatttttattttattttttctccctttttccttctttttttctctttcttccttgtcg

SEQ ID NO: 7894 - DNA, 42949 bp, Oryza sativa
  unsure (1)..(42949): unsure at all n locations
ccagctacagcccttccccagctccctctccctctcgctccccatctcgccccagctctcgcccgcccctcctcgccgccacctcctccccccgctcctcgcctccgcgtccgccgcccaggccgcgggccctgcccccgcgcgggcggcgggcggcggcggcggcggcgcgaagccggttcccctactcgtctccctcgccgtcggcctcgccgtccgcttcctcgcgccgcggccggccgaggtgaccccgcaggcgtggcagctcctctccatcttcctgaccaccatcgccgggctcgtcctcggcccgctccccgtcggcgcctgggcattcctcgggctcactgccaccgtcgccacgcggacgctcccgttcaccgcggcgttcggggcgttcaccaacgaggtcatctggctcatcgtcatatccttcttcttcgcccgggggttcgtgaagaccggactcggcgatcgtgtggccacctatttcgtcaagtggttggggcgcagcacgctgggcttgtcgtacgggctcgccatcagcgaggcatgcatcgcgccggcgatgcccagcaccacggcgagggccggtggggtgttccttccaatagtcaagtcgctatctctttcggctggcagcaagccgaacgacccatcggcgaggaagctgggctcctaccttgtgcagtctcagttacaggtaaaaagttacttgatatctgcagatgttaaaaatgctatgcgttttaattagtactccattcatgaatggttgtgaaatgggagatgcatttcgcctagatatttataatgttcagctgggaacatgcttctttttttggtggtctctatgacatgttattgaagaagtgctaagaatgagatcttcacttacttttgctttggactgggtgtctatactatttgactggagtactaatgtgcattgatcattctattatcccatccgtctcaaatactacttgatgtatgatgaaatgctcacgctgtattattaaggttgcgacttatctttgttagtgataatatataatgtttgttatacagtcatctgactagtttatatcacaacagcagaggtaaaaaaaaactgtttctaggtgcaccctttgcttctttgagaaactaaaactgaaaccaataaattgtagacgtggtacaattctgactctttctgtaaatagtaaatggtaggaagcccaaaattgaaagtttggttgaaattggaacgatgtgacggaaaagttggaagtttgtgtgtgtaggaaagttttgatgtgatggaaaagttggaagtttgaagaaaaggtttgaaactaaactcggcctaagtgaagtgtggtttaaaaatggttgcctggtcactttatcaggagctacatttaaaccaaactagcttgtactttatgaattgaacactttgttgaatcgattgaattcacaaacattttaattgtttggttaagtgcatgagtacatcatacatttacttttgaggttgtcagatcctactatatgctgaaagcaatacaaactcctggtactaggtttcttttgaaaaggcatgtttagtgaaaacttttcgatatattgcttctgggatgttaaaactgtatgcatgctctgtgctttgatattttacgttttcacacccataaggattgcatttgatcaatggcattgttgtgttggtttctgctgcttcacaggcatctggtaactcaagtgctctcttcctgactgctgcagcacaaaatctcttgtgtctgaagttagctgaggagattggtgttaagattgcaaacccatggatatcttggtttaaggttgctagtttgcctgccatcatttctctcttagcgacaccttatttgttatacaaaatattcccacctgaaataaaggacactcctgaggcccctgcaatagctgcacaaaaactgaagaacatgggaccagtaacaagaaatgaatggatcatggttgctacaatgattcttgctgtttcactgtggatttttgggtaagattgatctctctttttactaatttattttttccatgagttaatttgccatatatactttggtctatgattatgccacatttcctgttgcatttttcataagctgtatttagctactccttctaacgtgatagtgttctgtcgatggatacacatgatatacctggaacaactctttgttttaatgtttggggacagctttcttaggttctgtttggcattgcagtgttttatttttttataaacgtttatactttctgatataacagttagctgaatgcattttggataacaggaaatcttacttgaattagtaatgatttatttaactaactagattccatggaacagcacaaaacaaaaccacaaccacaatctggtcctttgtagctgtagacctgtagtgaattatcttcttccctttagcattttcctctgaacacgtttttgtcaatccggaatcaacccaggttttcaaattatgaatcatgattatggagatgtttcactttctgttggtaaaatgttcaacatgattgaaaattttcttttctttttttgtaaaataaatagcatattcttcttctgcattgctgacttttgcacaaggaaagatccattaccttatattggattaatattaacaaggaaagacaccctgcaacatttctctcttatggcaacatattcgtaattactgtaactagatgtcaaactgtgcattgcacggctattcttatggatatttaaaaatattaaagagttttttttctgatttaatagttttgaaattcgtatgtaataaatattgagttgtactccattttaattcttagttgtaactttttcatgttttaataaatctgaaattcgaaatcaataaaaaaaaccgagttgaattcactttacaatgttaaattatgatctatggtagtgataatatgatgcatttattcaacggttagatctttgtggttaacgttggagcttgtaggaagtgcctaattagtataggtataaatgcgtttttctaatgcttacttatttttgccagattgcttcctaaatctttatgcttggttttcacttcagtacttcacataatgtggatataatgcatgttatcttaccaagtgctacggcaacaagatagcaagagcattaacagaaaagataaagaatgctactagtccaatctaaattaggagttattcccatatcgttgcattttcggtccttttgagatattgtcagatattcagatgtgtgcttcatgttgtattagtcaaactacagcttatatatatctgttatacatttttttttgcagggatactatcggtgtgtcaagtgttgttgctgcgatgattggtctttcaattcttcttctgcttggggttctgaactgggaagattgcctgaatgaaaaatctgcatgggacacattagcttggtttgctattctagttggaatggcagggcagctcacgaaccttggaattgtatcatggatgtcaaattgtgttgcaaaagttctccagtctttctcattgagttggcctgcagcatttggtgttcttcaggcctcctatttctttattcactatctctttgcaagccaaacagcacatgttggagctttgtattcagcatttcttgcgatgcatttagcagctggcgttccagctatactgtcggcacttgctttgacatacaattcaaatctctttggtgcactgacacattatagtagtgggcagtctgcagtatactatggaggtaagtttttctgtgtgcacacttcattgaattcaatttgttttcatgttgacactttacgacacattattctttaatatttgcctcttcttgtttgtaaaagatctgttgttagagaaagagcataacaaatattttacttactacgtatggatagagtattcgaatacaagccttatttgatatcattatgtaggactacattgaaaatccaaatgtagcctaataaaggaataaaaccataagctaatggataccagcagacaatttaaaaaattccttggtttcttttactgttaggtttgtcatattttatctttaagcctttgtgtgtacttcttatattgagtacatgttttccttgtgcagcggggtatgttgatcttcctgatgtattcaaactgggttttacaacagcagcaatcaatgctgtgatatggggagtcgtcggtacattttggtggaagtttttagggctttattgagtcattgcaagtgttaagttgaccaaaagtgttccttactacacctgtaattcatggctccctttctggagtggtagtcattttttcttcagaggagtttgatgagtgcataataatggaacgatgttcctcattagaagtcttgaacatgatacacttgtacaacccagaagggttctcataggcgttttgtacaactcccatgcatttctcatgaacgaaattaactgcaggaatgagtcttgattccttgagcatattgttcatgtactctcggaactgtatggattgcttttgctatatgccgtgattgttaatttattatataggaccatgagtttcatcagacaacacaggattgctaagataaaaacatcaaaggccaaatgtgccatcttcctatccaacaaattggatggcagagtggcagactattttcggagcgtatttgtctacaatatttgccacatgtgaatctttgatgaacttgtgcaaaacccttcagcaggttagtgcatttgacttgaaggttttcgtttatatttgaccatgaaatgaagcatttgacaagtaatctgcaccaatacttgtccatttgtattccagtagtgctaccgattcatcgtgtttgtcactttgttgattgctattcgtcaggagaagtgctgagcaactgaagttagtgaagttttcgaagacattctattcaacttaaacttttgggttgaactgattagcacccgtaacacaatcactcttgtaagttgcaactgttgggaagaatttggttgtttaaacatgacgctaattttgatccgcttctccagagttcaggaccctaggccccctagccaagtctctccttttttccaattccataggagaaacatgaggccatgttcaatgcgtagccccaagtcgtgccttcacaaacggtgtcccgcttccgtcatcgggccgtgtccttggagagaggcgcggctcctggcagaggaacgcacgcctctagctccttttcttgagccaccgcttgggcctatgcgttggacgactgcgtagctcatggatacggcctcccgcaccacaaatttcctcttccacccttggcctcgtcgctgggagtaggcgggaggcacatagcaatgcggaggagtcggaggtagcgaggtggtggaggagccgacggatttgtgacatcgacgacctggggacggcggagggagagggacgggccccgcgaacccgtctgtcagccaccaacgccccagggatggggcaggcccactagatccgacgacgacctcgtgatggcgactgctcgccgtcagccatcagcagtgacgggcgaagggagaggggtggcgacgtgttgggacgaagtcggagcggtgccaccgccgctgttcccttcttgcctcgccgccacctccctcgccctccccagcgtcgccgcgtctcgccccagccgtcggtgaagggagcggtgggagctcgagctgcagccggatttggcgtgggagagtggacgatgagcggcgacggcgggagagagaggcgagcggtggcggcggcagctggggagggcgaggagggaggtggcagcggcatgagggagagggagagggagggggagggggagggggaggacggcgctgagcggagggagtgagacgaggcgaagaagaagaggcaggagcgaaggaaaaagagaagagagagagagaggaagagggagaagagaggggtggtataggaaaacacccattgtgggttttttggttgggacaaccattgtgggcttgagtacctttatccaattgcttcagattttaaagagaccacctagatgtagccttcatcagtttactggtaattgagtgtccctgatagtgtcctcggttagtgaggacttttaggtggggctttgatgatagatgccctgtataggttcagttctcagtctcaaggaccacagtatggcatttttttttccttccagcagccgaaccaatcactcagaaaattcagtatgcaatcactagccgtgggggctcgtcgctcgcctccacagtccacacacgtacgcggacgtggagccgagcgtgacgggacatggacacggacatggcccgtgccggcaaccacacgcgcgcatccagcgtcgtgggctcgtggcgtctcgtgcatgccacggcagcacaggcagtcgcgcgcgcgcgtgggggagagaggaggcttctcgccttccgctggatagcggccgagccgtcgtttctttgccgccgcgccgtgcgacagatggatggcggcatcgcgcggtggtggggagggggtgaatcggttttccggcatctttttccacggcgcgtcgtcctcgttcgtccacgccattttgtttggattcgcccgttgaaaagcgtaccaccggtagcagagctatacgccaaacgtcccggtgaacgataccggaagatgggttgcacacttgcacacctccatcttgcagtcatgaacttatcctctagtaggcctctagggtggagcagcagcaagccagcaatgctgccggaatatcggccattcggcagtcaggctccacgtttttttttttacgaaaagcatgaaatttaggggtttcgacgcggaacgaaagcaaaatctgagtgaaatttcaaataattttcaagaattcaaatttaaaacgataaatttgactaaaatttgattaaaatctgattgaaatttggtgaaaactgttataccactgagtatccggatcttgtattcatcggaaaggtgaaccctaaccaaagtctttctttttcctactccctccgtcctaaaatataagcttttttttatctcggcacggtctgcgagatgctattttgaccaacaatatttacaaaagtaaaatgttttaaataaagagagttgcatattatgatagtccatttaatgataaatatagtaacatgaaaattatattattaatatttttaatttttgtgctataaacattgaaaatttaaaaaatttgacttcgtactattaaaaaataattatattttgggacagacggaatacgtgaaggagacactgtgtcaacctgtactgtggacgtcagttccatttcatggtccatgcagatatgaatatacctatgcaatatttatgatgaaagcaatttgtgagcccccatctctcgtgccatgttccggcccggggttccttggcgctcaccgtgtttggtccctggtcttttctgcagaaaggctttaaaactgtgcgctcagaatagtgcacccagcagtgtggaggacaggaggaggcacaacaaatacctaactgcttcgagcaaggctgaccaccgtggtcctcgctctttaggttaaaatctcctgtcaatgtaatctaccgcagttaaaccttcgagcatttttatacacggataatttgttaagattttcacatgaatggagtcatttttgttaggaatcagaaacaaaactttgtgctccaaacaaaaaaaaagggcccaattattatggacgaagccaaatctagctcctgattctgtgcagtttaatcagtttttctactttgttgtgttcttacaaatccattgtttgtggcggttatagctttaaaatagataaaatggatattctcattaacataaattgtatttatattaccatcatctaaacaatataataatagatgaattaaggcacaaaagagcatccaagaacacccaagaatggaccctaccgtggtggtgctggatgccaggggcatgctggtgttgccgggttgggctagccctccgcctcactggccggtagcgctagatcaccgaacaaggtgccacgtagaggcgtagtcgcacgcccgcggccacggttccatacagggcacgatgtcggtgctgcaatcaccaccgcagtgaaggtaggggtgaaaacggtacaatttttttaaagatttccggattccgttttcagtttatcggaaatgaaaaaggaaatatcttccgaaaatagtatcggaaatgggataaagatttttttttttgactgttttgctgataaccgtattgtctagtaattttcgccaaatttttgaaagtttcaataatttccgtcagaattctgaaagttccctagcggctagtagggatgtcaaaaaaaaaaaaaaactcgaggctcgcaagctgttcaaggtcgactcgtcctagcctcgatttgagctcacctcgagctccaaacgagccgagtctaagcctctccgaaagctcgcgagcttcttcgagccaagctcgagcttcctacgagcctaataatatatgatttttattgttatttaataaattaggacatcaaatatattatttatatgccttgtattggcgtcatatatttattttgttttttttcttcttctatttgaagttgcatttatcctctagtgggttttggtgattaatgatgaataaggttaagggactaatgtgtttattgagatatacaggtaattagtcccaaggtgatcttaggtgatcaagagatgcttggagacccctacaactttcattcatgcggatttgaaactcgaaagtcaataggatagtttaatttttgaaatcgagtcttaggaaaaaccgtactattaagaggggtttcaagtgtggttctgagatataaaaatttcctcttagtgggttcatagtgatagaatatttttgggaaccatttttgcaaatgggtccagaccggacatagaaggctggccggaagttccggtccctggacccagaacttccggaccttgcattggatgaaatttgcgtaagtgttggctggaagttccgggggtcaggaacttccagacttcttccagttcaaaaatgtgagtaatggctagatgacgtcacctagccgttatatatatctagatcgcacccagctcactttttggccattccacttcagttctttcatcccctaggttgttctagcctctcccaagatccctttgcttcctccactcaaatctagagcctttcttatgaaattgtgagagtagatgagagtgtaggagtaatttggagaagctttgaagactaggtgtggttgagcactttgaatatcttgtgggttgtcactcggggcttattactcttggagatcttctcctagacggataggtgtcgcccgcgagcttccgaaatcttgtggatgtcccaggaaagtttgtgaaggttttcctcacctccgcaaggaaacgaggtaagtgattaaggattcttttgctaagttttcagaggttctcctaggtagagcaacttgcacttgtggtcttttctagaaggatttgtgagttggatcttggtggtcactcaaattctagaaaatgacctaggagtgttgagttgaaggccttggactttctctgggttctctgtacaagtgaggcaaggggttaatcgagacccggctctttggagcacctcaacggagagtaggattgcaagatccgaacttcggtaaaaaatcgcccttgtcttctttgtgatgattctgtgcatgttgttgtgattgtgtatctgctctgtcttcatgcagtttaattcgtgcaaattagtttaagtctttgctagatcttcaggtttttctgttgcccggaagtttcggtgtttagaacaccggaagttccggtctgtctgagtagactggaagttccggtgttcctcacccggaagttccggtcctgctgaattttaccgctatgatttgtttgtgaatttcaggatagcctattcaaaccccctctaggctacatctttgcgcgttcactattaatatgataaactagaaattaattatttttttatagattttccttaaaatatacattgtgctacttaaaaatcaagctcggtagtcgagctcaagcttgatcgagctcgaaccgagtctgtctgaaagctcgaacattttataggctcagatcaagcttggctagagcttgtatcgagctcgagtctaggcaggcgagcttgctcgagctcggctcgttgacagccctagcggccggccagcccaacccatggcagacttgtagcctattaggaaggggaagtggccaggaaaaacgttgttaaccctaggacgtggcatgtgaattttgctgaactttggtctactcaaccgatcgatgttgaagtatcgccaaaatttgtttatattgttcgtcaaacttatcatatcattaatcatcatataacgatattgtgtggagtgtgatgatgtaagaatgaagtaataaagtcattttcatatatagttaaatgtgttattatgccacgctccgctgttttcgacatgaattttcaacttccgaccaatattggcagattccattctgacggtcccgtttccaatatcaccgataaaacacgaacatagatagcgcacacttacatttttaatctaccaaaattgatagtgtacacttccaaggtttttaatcttttccaaaattaatttaattaagaaaagattaattcaatcagatcatatatagtgcagtggaaatgggtgtgtggttccaaccccaaggtcatgtgttcaattcttaacacgctcacaaattcttcttagagcatgtataatagcagagtgtaagccggctaaatgctgaggtggaggagagaagagaggagcgagaggagaagcgggctgtaaacttacagccagcttggacacaagaaccaagaaattatgtgagagagacaagtgggctctgtatttatttattgtaaatagctaactattacacgtgtgggctaagagaaggctgcaaagaatcttatagctaacaagtcagctatattattaggcttgctcttaaaaaaatgtttggaggatgtctccctctaaatattgttttttttaatcagcccatagatgctagcgagctgtgattggaaaaacaggaaaatgctgcagaaagttgcaaccgtggcataaaacttgcgtgtaatttcccccttcatattccctgagggcaagtcccatctactttgctgaagaatcccctccacaactcaagagtctctgatgagataccttctgtcttctctggtgattacctcgttgtctcaagccccacacacgttacatcgagcaaacatttgtcatgcaactgtacgtgtacatgacaaaccaaaccgctacgctctcctccttatattggagaaaaagaaagaaaacacggaagaagaacattctaatgctttcaaaatataatactactagagagtggaaacattgtggtattatatagtcttgattttgtacaagaacaaatatctcaaaagaagattcctaccatagactgatagacattagacaaagatcacccttttttggagttccattttctttaatgtaatctcattctaggactcgtcgttttcgtggcagctttgtgtaatcacagaggtattagggcacatacaaaggtagagaccggtgtggtctctacgttaattagatactatcacgttacaatagttaagataatacggtctctaaccattaatgtaccaaaatactttcttactagtcatctttcctttattagactcaatgcaacgaaaaattttcttaataaatggctaagaatcgactctatgccattgtcatgtgtagcaaccatctttctctttccttcttcatctctcttccacgtcacaaaatatacttacatgccaataaaaagagaccgctaataaagacccttgtacatacccttacaacaacaaaaaaaaagaaaacggattcgattggattttgtcagcttaaacaaaggattgtgccgccaaagaacgtctcaaaagccgcgattactttctccatgacagcagccgagaggagtaaaaaagaaaagaaaaaaaaaagatctcggccgccgccgccgcgcggcgtcttcccctggccgcgcttgccacggcgccatgccgccatcggccccatcccgctcgacccatttcgcatctcccaacgccgacgacgacgacgtgctgccgcgctacctccgcgttttcgttacggatggaacatgaaagcgaaacgcagggcacttggccacttgttacctcgcgaatttgcacttaggccgagtttagggtgtatttaagttcacgtcaaaattagaaatttagttaaaattaaaacgatgtgaagtaaaagttagaagtttgtgtgtgcaggaaaattttgacgtgaagtttcaaactttttctttaaacttctaactttttcatcacatcaaaacttttatacacacgtaaacttccaacttttccgtcacatcgttccaatttcaaccaaatctttcaattttgacgtgaactaaacacacctttaggacatttttagttgaggactaatattaacacatatttttaattaaggtaactaagcttagtcatgtcatatttttctgtaaacaaaatagtaacaaactaaacttaagcaaagttaggtaagaaaataaagtgtatgatatgtgctatgcagctaagggttaaacaaaagtagatttatgcatgaactgaatattacctgataaaactgtggcttgattaagataaggtgtgataaatttagttaccaaacaaaaatgcccttagactttgctactcccgtactccggtattatggattttggctcattttttacacagcttctgagcacgtctcgtccggtgcaaagccaaaacagtaacagcaggtaaaagaaaaatgtgcaggagttacacgagccaaagcaaatcacacgaagcaaaggcgaaaaaaggaagcgttggctcccacaacttccccccgcggaacaaaagctgctttcctaccttcccgtatagattggcgcgtagcgtcgcctcgtcgccccccggtgatccggctctctctccccagtccccaccaccaaaccagccaatggaagcgcgtcgccttttgggctaatttgcccccacaagctcaaaagcccgctcccttttgccatgtccgattgccagtcggggtccccccaactctaccaccgccaccacaccggcagcccatgcctactcctacagtcctactcctctgtccgtcgtgctcaccactctcactcccacgcagacgcagggtggaggtccggaacaaacagaacgctgtgcaactatgagcaattcgtcatgttcaaatgtaggcactggaagcagggaaatagggggaaatagggttcacaatcctgataatggatcgagattcgctcatgagttgtttcatcggattacactgaatccataaaaaaaccgatgaaaaagacaaaaaccaatgaaatttggataaattttttcaaaaatttttaaaatagtttgaaatttttttattaactaaaaagccgagtggtttatgttttcaacccggttcaaaaagttcggatttcgcggaatccaaacaggattccactggaactgtgaaccctgagagaaatttatagtgctttccagttgaacacttcaaatgcaggtagggaacttggtaaaaactagaaagaaacacgcgctacgctgcgtgcacggaatatatggttaatggcacatagtagatatgatgtccggtatgtaaacatcgatatggtagtcaacactacgtgaggaaataatttatgttgcaaccaatatccaataatttccagtctatttgtataataatgtgcacttagacaaaagtagtagccacacgtggaaacatatatatcgtgcctgcatactgtagaatagattagaaaaaaactcaaggatcctaggattcatctctttcggggagccaagaagcactcttcctcccttttctgaatcttcggagaggcaaaagaaccacagaaacattgacttcaagggaaacattctacatttccgtatagctatgctcttcgtgacacctgcaatacaaagatgtcttgtctttttaagcttgataataaatagtacatcattatatgtattcgcaataatatatataaaagatgacaggtacttcctttgcaaagtggcattgaataatgagccatgctgtacattatgtctaaagctccattttgcatgactgttcattcacaagtatattctcatgttccattgaggggcaataaacatggcataaaaaaaaatcaaataatctaatgaaaattccttgcaaaaaaaaaaggcttagcaaagtcattctgtgaaatccaacctaggacaaaaaaaatcataagcatgtttaccaagggaaaaattcaatctgaaaggatggaccggtaacaaattccaaaactatcatgtgcaaggtgcttgctagaaaatgataacagtactctcacatatggcatatatatattgtgcaaaattgattaaatttgaggcagagatttgaaagaacttttcacatgccaaaatatcttgaggtagaccaagcacaaaatagaattagacaaataggtggacataaatgacaatttataattgagtaaaggaacactacggtggaaggccgccgctccaaatcttgacatatcttgcaaaagaaaaaggcttttcccttgtaagaatccaacaacttttactatgcttcttttgaaaagaccggacagaaatcatatacacagcagcaacgtgtgcaaatagtcaaaaaagaagctacaaaaattttgtgtagacaacttgtgagcgttacaataaatatgataatgcattcagaaacagcacataaaagtttataccatgcataaaatttttgacacagaagacactttgttgctctgtttttagttctactggtttgaaacagtagcgatcaacaaactataaagtggcagaatcaataccaggatccatgaaaatatagaccacctcaacacttttgaaccaacattctcatgtgaatatttttattgtatatgcaatagcattaaagatttttaaggttagaaaataaggtaatgatctcacctcgttgctcaaagaagaaatctcctcgactgtagatcaactgacttggatagaagataagcacacgcatcattcagagaaatagtctcaagtttatatctattattggacctgcaaggaaaactgaagaagtattattccacattgggatctagacaacaaccaataacttattaaacacattagcattggaaaagtaacagttttttttcttttttggtttcacatgttgcatttagcaatacatatgagctagtattatggatggttcatacaaataaagtttagaagtaagaaacattggggcaatatttcaatattagcatgaccaatatcaccaccagtaatttccaaaatgcttgaatcacttaacattagatgggtaatactgcataaatattataatccttgttaaaaagaaatagccaatcatgctaggggaattggtagtctatggacctggaataagtttgcacatcaagcataagtaaaaaaaaaaaagaaaaaaagaggtatgattgaaactctaggaagccaaattcaaagatttgacgtagtaagtaccccaggattattgttaaagcatctaaattgcacatctaagatgttccataaagaacatgatcaatgcatacatcagtcattctatcaacaaagaaaaatgacttgttagaaagggatggaagagagcacttgctcatagcgtaaacaccatacctaccagtaactacaattaaataacagaatgagtaatcccatgtcacatatatcactgggagaagacaaaaaaacagaattagtaccttcaaatagaagccacagtagtttgcacgtgagctgatgccattgcttttccgtgggtgattctgcaaccgaatgagcaggagatcaataatagggataaggatagggaaggatccagatcaggtatgtatgcatataacagtagaaaatttattatatagcttagtggtttaagcatgggaaaacagtatataccgaattagaggatcattccatggattcaccgaaggtttagggtcatgctgcagagtgagcaccagtccggactggataaattggatctatgagcttcaggatgaacaggtaaagctaaggattaggagggttaaagggaaaaaaaagggaggcaaaagggctgcataccttaccagggcatggtcgaggcggagatgccgttgaaggctggaccttggtgtgcccaaagccctaatccatgcggatgccgaggcaagagcaggccatagaggccaattcctctagctgcaacggagaggacaataggggcagcggcaacgacgacgatcgacggcggcggcggcggcagtggcagtgcggtggcaggtgaggagattgcatacaccatctgagagagatagtgagacggcgagccaccaaataggaagggggtgaggaagagggaggcagtggtggggaagagataaaagaggataagagggtggcggtggctcatgttcctcacctccgtgtgggcacatcaaccggcgagtaggacgggggccatcacgctgatgcgatgcgatggccttgctaggaaagagtggcggcgacgatggatgcaggagggcgaggcggcgacggcgacgatcggaggaggagggtgaggtggcgaagcgacgcggcgggcgacgaccggcaggagagaaggccgcacgacggcgcgaggttgaggggctgagggcgaggaacacgaaacggctagggttttggtgtggcctggcgaaatcggtgccgtccgttcccaatccgacgatctcacagctgtgtaaggggcgccacagctgggacacgtggacggtcagatcgatgccagtgcgaaatcggacggaggattgtacggggattgacacgtaattaacaaaaaaacgtgaggacttttttgcaaaatcaggatgacgtggcgcgctaattctccagcactcccgcgacgtttagagagattaatatgatagcgtctggaacagctagctgtgtggctacaacacaacaggactcaacaagcaaacttctgctaggagtgctactccatccgtccctaaatataagagattttatttggatatgatacatactagtatagtgaatctgacatgaagattgtctagatttgttgtactaggatgtgtcatatccaaccaaaatctcttatatttagggacgaagggagtatatcgttgcggctgcacaaccacagccagccgaacaaccccaacatgtttaaaatgtcatttattatagttttaaccgtataactagtcgcttgagtagctagctggacctaaatattttctaaatgtggctcaagaaaagccttcccgggcaaaagaaactgaaatgatgattttgaggtttgtaactacttactctgttttacaatgtaagtcattatagcattttcctatttatattgatgttaatgaatctagatagatatatgtctagattcattagcatcaatatgaatgtggaaaatgctataatgacttacattgtgaaacggagcgagtacaagtttataaaaatcacataagaacaaaacatgacagattcttcattctagcaaaaaaaaaaaaaacagttcattctcctgttcatgtagcacgatcatgtctattagagttcacaattttattccgaggttaaaatgtgaggcctaacaagatgataagtttgcaaaatgcctagcttaaagtttgaaaagggtacacgtagaaaataaaaaggtagaatttttttcgagaaaaaaaataaaaagtagatgttagaaaagtgtcctaacaaacacaacaaccatggtcactctttaaccctcagtccctcacctactcagcagtcagcaccacgtttgactctgcttaatagatttagtgaacgtgcttaaaactaaaaagtcattaacatataattaattaagttttaattatatacaaaattagaaattaaaattatttaatatgttaaaacaacttctacataaaaagtttttcatacaaaatactctctccatcccaatttaatcatcctataaggtggtgtttagatccagggacttaactttagtccctgtctttagacactaatttagaatattaaatatagactacttacaaaactaattacataaataaaagctaattcacgagacaaattttttaagcctaattaatctataattagagaatgtttactgtagcatcacatatgctaatcatggattaattaggctcattagattcgtctcgcaaattagtccaagattatggatgggttttattaatagtctacgtttaatatttataattaattttcaaacatccgatgtgatagggacttaaaagttttagtcccatctaaacagggcctaaggctatcctcaaccctccatgtcatctagtttacatagcatttaatatattgtcacataagaaaaatgtgatatggtaagagagttaataaggagagagataaaaagataaagaaaccatttctcatgcaagaaatcatcaatacacaagaaccaataatgaaaacaaggggataggtaaagaaaaggagagagatataaggcgattagatgagaatttaattcgaagacaccatccattggatatatagtttatatacatagtgtctatatgacatagcaagtatgaaaactatttaatagtttttctgggtttgatggcctaagcaaatgataccaagaccaaaaacaacaagatatctatcattctgaaattattcatcatcgatcaaggtgctccatcacttcttgttcaacaaaaattaattcacactttaaatgttacatggatttgaactaatagggattaattgattagtcgcatgtttgcatacatgacattccagataaacaaagagacactttgttcgatgatgatcattttgagaaaacctcaaaaatcatagggacgattaaactgggatgaaggaaatatacttagtattgtttagcaattttaaaaatatgctaataaaaattgaaataaaatctgtagcgtagcatcaggcggccgtttacccctaaactctcctccctcccccctgccttcttttatagcgcacacagttctcgcaaggaaccgaaaacagagaggcaagaaaaagaaaacggaaaaccccccgcccagcccaaccacttcactcctcccactccagtactcgactccaccacactccagtccagtccagtacactccgcacacgcgtgccacagggatcatgcgaagcctcaagaacgtcgcctcctcctcctctagcggcgtctctcggttgtaggagacgctcgtcgtctttggacggatcggagcttgggggaggaaggcgacaaccatggtgccgatggtcctgggtcacaagacgggcggccacaccgacgacgccaagtgccatcaccggaggcacagcaccgagcaaccccacctctccccattacccttcccccggccacccctctcctcctgatcatcacgcctttctctgcttcttccatttgatctttgtgacaacgtcgtcctcctcccgctactcttcgaatcttttgtgaatttcacgtcgtgagacagtagggattgaagcatgagaagtccagcagcgcttctcccggtggttgcagatggtaagttttttttggttggtggttttgtgtggtgattggagatcttggttgagatgggagtgtgtgtttggttgtgaaaggtggtggtggtgttggggtggaggaggagatggatgtggacgaggacatggcgatgtgcggcggccgcggcggcggcggcggggagaagaagcggcggctgagcgtggagcaggtgcgcgcgctggagcggagcttcgagacggagaacaagctggagccggagcggaaggcgcggctggcgcgcgacctcgggctgcagccgcgccaggtcgccgtctggttccagaaccgccgcgcgcggtggaagaccaagcagctcgagcgcgactacgccgcgctccgccaatcctacgacgcgctccgcgccgaccacgacgcgcttcgccgcgacaaggacgccctcctcgccgaggtacgcacgccaagaaacggttctgatcacggacgagtgcaatgtttgtgacctttggccatggcacgcagatcaaggagctgaaggggaagctcggcgacgaggacgccgcggcgagcttctcgtcggtgaaggaggaggaggacccggcggcgtccgacgccgaccccccggccaccggcgcgccgcagggctcgtccgagagcgactcgagcgcggtgctgaacgacgcggagatccttccacacaagccagcgccggcggccgccgccgacgccgcggcctcggaggagacggaggcggtggtgaccggcgccgcgctgctccaccacgccgaggtgttcttccacgggcagcttctcaaggtggacgacgacgaggcggcgttcctaggcgacgacggcgcggcgtgcggcggcttcttcgccgacgagcatctcccgtcgctgccgtggtgggccgagcccaccgagcaatggacgacctagctagccgcgaaaactttgcttacttggctggggcgaataaacaattccgtagggggttttctgcaaatttttgtaaaatgaaattgtacctagtccttttttgtcaaaatcctccccctctagtacgtgggccacgtggccggtgagctagaaatggcactcctggctttctctggctcaagcagcgaacgatgcagaaaggggagccaagggagattcgtgggaaacgcaggggaaattccgcaaaagtagcgggagagaaaaaagtgacagtagtgtactccgtagtgtggaggaaggcaacggcggcagcgctggagggaacagtgtcgctgtcggtgggcccggcgccacgtgaaaagcagacttgtcgctgacagcgattcctggcgtctgcctagtgtgtctacgcaaaaagccttgccacacttgccctcctttcctggccacaagagtgtagttcctctcacaagttcttttgtttgtgaatttttttttgcaaaaccatctaaaatatcaataaaaaaaatccgatttggcacaaacaaaatttttttttttgcagaatattggatggaaaaaacaaaggtgatgggtttgattttagtttagaaagaggcttatatcatcatgtgagtatcttttaattgattgactagtcctgttcgtttccactgtaagaagtggattaaattttgaattttcgtggcacgcttttcaaacagctaaacagtgtgtttcgtacgaaaactttttatataaaagttgttctaaaatatcagattaatccattttcgagtttataataattaaaactcgattaatcacacgttattaccacctcgttttacgtgaaatacttaatcttcatcttcagaagattcaaacactacctaaggaagtgttagtttagtccctcgacttattttttggagagatctcccaaacacctcctaattctttttttgcagtttacactgagttttgatttacccttgaagaactctcgattttcgtggacacgctacctgaaatatctttcgtgcaaaaactttttatatatgaaagtttttaaaaagataaaataaattccccaaataaatttacttttcatctttttattttaaaaaattataatagctaataattaattaatcgtttgctaatgatctttttattttccgtggctggaaaatctcgtctaaatgcatgggcccttatactctgcatacataggcaatgaaaaaatattttagaataaggtttttatataatttagtggtcctatagtgttgatggaaaacacggtggcatgggagattagctaaaggcataaaaatacaaacccacaacaaaatactaatccaatctagaattaacagttaaattcaagtttggttgcatcttatataagctaaagaagtgaagaactgcaaagcaaaacaagagcatcaccgactgtggaaggagcgttggattttctttggacggacaatgatgtgtttctaggagcttggctccactgtggggagcacgatggttaatttttggatggcacgaataattacggccagagtaaaaggttttggtactacctcgagccaattttcagcagtacggctgcactttctccgatcctttttggctcgtcctctgcatgtgcttttcagtgtggatttccattcatgagctgatgatgagggtgacgattctttccattaacttttgttccctttggtcctgcagaaccataaacaaacctgcagtttgttttaaacgcaatggacattcgattagccgcttgttggaacaatacaagtttcagtccatcgtttgacgtatactaaaatatattaacttttggtccagattcataactaaaatacttatattttgggacggatggattactaattgcgtataagtttataactcataacatcttattaacgattaaaaaaagttatatgtattcatattaacaatttaaaacctaacgttgaaaataaaccacgatgaaaaaaaaacaataaaatcagcactaaaatcaagttttaacatttaaattttgacagtggcatatgaatctttaatgtagtactactattataaaaaaaaattatagcatatttgagtccctaattgaaatgcgagctttgttcttatgtgattgagctgtcccatatgaaattcgattgttctagaaatccctaaagttattttgtaaagctaggctgttttgcatcaaattaatcgaactgtgcacaagaaggtgattgaaattgtaaaatgcaattgtacgggttacaataggagttagcaattgaataagcccatccattagccaagcaagacaagtcagtacatttcgccacctttttgttgatatccaaacggggccatctcgaatagaccaatcaccaattgactttctttgtttcttttgtccactagttttctgatctattgttgtcgtgttgcaatttggtttagtatgtgttgccattagaaagtgacggggaggaggacggagaaagatgtgcattgatcgagtgatggagtgtaagggtgacacaattgctgcaaacaaaggacccaaattggccatgtctgaaacgaattaatctcaaatataagtcatttttagtagtttcattaatacttttgtaaataaagtcattatataacttttagtcacattttcatcttcgttaaatgtaaatcgctgcagaactttctgtcacattttcatctttaattacacaaatgtctttgtcagatacttgacaactctctaaaaagtaaattaaaatagataaatcagatttttctagtgatttagtaaaataaagggtaacaaaataatttgagctgtaattttacttttgtttcacaggtccaaaatgaactgtgtcggttaccgaagaagacaattaattactagtacaagagatgaacggtatgtgcaatagcctccttgagaacaaaagagccttgtacttctagtagagcatgtcatgtgtattgtgtactggcatctaaacctacaaaatcttcaatgttgcagaaaaacatactttaaggaagactgaaagagaatggagtcgttatgagcacgtcaaataagaatatatcatgatcaatcatactccctcatgtttttaatatataataccgttgatatttaacatatgttttgctattcatgttattaaaaagaactactccctcctattttacaatttttgatgttttggacaatggtacgatctacaataatatatctttgactatatatttctattataatatataacaaataagtaaacatttaagtttattaaaattaccttttaaggctaatgtataaatcatatctagtgtccttaatagttattgatagtaaaaaaacgtaaatattagggaatgacctaatatcaaataatcatttaagtttattaaaattatattttaaggctaatctataaatcatattctagtgtcctcaaactaaatatttaatagttattgatagtaaaagacgtgaatattagggaatgacctaatatcaaataattagaagggatgagactttgaacccaggtcgtttattccatcaccttgtggagctagccagaagacccatcagcgtttctcaatagttattgatagttaaattctagtaaatgatttgtatcaatcttattcaaaacgtcagaattatggaactgagggacgtacacaattattatttatattactgtgatttactttattagtgagtttgatttcttttttgctaatcagccatttataatttgtataagccaaatgtgaagagctttttttttaaaaaaaaaacatagccacttatttacgaaatcaactaacattgctacaatcaacatggctacaaccaatatggcaatcaactaaatccatagtaatcacagccttaaagcgatggagttaatcgggacaccttcaaagatcatgaactacaagaagtgttagatatttgaatggctctttcgttaggctcgttatcccggttcaaacacgaaataattcctactgtagaaacagagaaaaaggagccctgaataaaagggacaggggaagtggaacgcgactcaccaaacaaaggatgggccccaaataaaaaggcgctttgtattcaacgctcgaatttcgtgggccccaccacagggaaaacaatcgacgcaggcttccgcgaccgtggccacgcgtacccacgctcacgggaggcagggccacgtggacgtggggccgcgttgtcatcgacgtcgcgcgacacgggggggtcgtgtgcggcgcgcgcgcgcgcgttcgatgccgtgcctggtggtgcgctgcgccggtggtggtggtgctggtccctcgccgctgtcccgactcgcgtccgatgacgtgggcctgtaaccatcgtatgggggcccgtggtgggccatcgtccggaaaggcgaaagcttcatcgtggcgcgggacgggtggggcccagtctctccctcgaggtgtaaatcttgcacagttgcacacttgtgctgagcttatcggttctctcgtctcaaattgtcatacataaactttgtgcttattacaacctcccataacattttaaaattgttctaaaatggttgttacataaatcattttcgtttcaatttttttttcattttatccttaatcaccatcccaccaccaactatatatggatctattcggctgcacatgccacttatatagccgttacaaccaacaacttgccgaacgctccctataaagaattatggcttgtttaatgtttatatagttatagacatttttaccaaaaaaaactgagcctctactttcttgttctcataatataactatttttaaactttttataaagattaagaggaaatataaaaaagattagattgtccatcgctatggtcagtgggtagggttgtaaaatcgagtgtatctttatatttcatcgctacaaatatttaaaggtagctattttttatataaattctaaacgtcaaaagttttaaataggaaaagtaggataggaatttgaacttccaagcaagacaaagacaacgatgctttgttttgttctgagctggtctgaaatattgtactactttatttatcttaaaatatatttccttcgttttaaataaaccaacctacgattaagtaagatactatacaatatacaatatagtaaatctggatagacttctaagtgtaccatataatgtttcattcagttttaaaatgaaaggaatactcctactaagtgttgtggagagcggaggagaggcaggcgagagcatagcagttctataccgggacacaacttgataaaccatcactgggctctatgtctgagatgggtcggctagcccataacaggcctgctttatggattcatgattcatgacccacctatacatttgtcgacaaattttcttctaaaaatttgacagatgtaattatagtacaatcatagtgtaattacactgtaacttatatgtaattacactgtaacttacatgtaactacaatgtaacttgtatgtaactttcacgtaattttgaatcgttagatctattacaagatttgttctagtgacgaacaaaaagatcacagtacacacatatgtgaaaagatttgttcccacgacctcgattttaccgaaataacatgttacggagagatttttgaaagttacatacaagttacattatagttacagtgtaattacatgcaagttacagtgtaattacactgcgattgtactgtaattacatctgtcaaatttttgggagaaaatttatcgacaaatatatagcaaaattgctaaagtatcgtatctgtggttctggatattcctaaagcatcaggatcgagtaacaaatgttgttaagatgaaacaatgaatttgttttgcgagaaatatctcatagagcaatcgaactcgaaatatgtagaaactgttttaagctatcaaggattgtatatttgatccatgtacatatgtgagcctgatacggattaggaggcgaatgtgatgtccctaaaatcccgtggatatggattatctgacaattccaccagaattatgtttgccagataatccaaaaatgttaacttacgctaccactctatctattgtatacaacataacgtgtccattcaataacccaatttatctgttaatctaggctctcggtccttcccctcccacctcctaatttctgacgtaggctctagcctcgtgatgacgttatcctcaacgcggcgacaacccaccacacgacggcgagcaacttattgtcttatcgattgcatatacacataacatctgacaatattaatttgctttcgagatgagtccgcaccaactatgcaacgtttccaacatcccgaaactatccgctcctcacccgcacatgctctaaatctgcttaaaacaaagaaattactatgtatttggcccatgtgtagagcttacatccgactagtacatgtgcaaagcacgactcttgtttgtctgggctcgcatggtaagaagaaaagcttagagattggtggatatgacacgattagatgagagttgtacgatagagtcgtacatatagcaaggtaaaaaaaaattggtgtaggatatgatatgactatcctaaatccgctttggtttcacccctacgatctataaatctctactattataaaaattaaagatgttttcgccggtattctgttacgttatccgtgtttgagttggtttttaagtttgtttgcttttggaaataccgattcgtgtttgagacggattttaagttcgtttgctttttgaaaatatggatctgtacttgagtcagattttaagtttgtttgtttttggaaatacaaaaggagtagtataagaaatctttttaaaaaactcgcatgctaacttgagatgaatgtcggactcctaattgcatctcatgattttctaaaataaaatatttaatagtgaatttctcctgagctgaactgtataacaataataaaataaaaattgcattcacccgttgcaacgcacgggcatcttttctagtaaagaaaaaaacaaatcatactatgaaaagagtagccacattttctgtttggatttgttacttgttattctatgaatgaagtttggtaagtgaaatgataggtggtaaaataatttatgttgtgaatttttcatgactatttgggttgcatgtataagacaagggcaaccctggatgacttaaaaatcaacttccccatgataccaaaatcctacatgtatatgcatctcattttgttcttttattctcatcacgtttaattatagcatgatggttcatatttcaaacatgctccacatagcatcttccatttttaagttcctgaacgccaaaaataaacaagaagggaattcccaatccatcgaggtcctcagcttccctcctccgcttttcttccagtctttctcctccgtctctcatcctctcgaattttctttccccccgtctctcatgcgccattgatcggatcgcttgatgccgnnnnnnnnnnnnnnnnnnnnngctgccgccgtcgccgggcgactccgacccgtcggggtctcgcgacatggacgacgaggacctcgtcgaggatctcctcgtcaccgtcaactcggcgcgggccttcgtcgagttccgccgcacgcagcgcaaggagtgcgccaacctcctccgctggctggagctcgtcctcccgctcctcgaggagctccgcgactcggcgccgccgctcaccgaggacgcctaccaccgcctcgccctgctcggacgcgccttctccgccgcgcgccgcctcctccggtcgtgccacgacggcagcaagatctacctggtccgatatatcctgcattcctcatcttcctccgtcatcgtctccaattataaaagttaatcgatataacagaacgtgttctcgatcgcttcagttgttaataaactaaaacacgttagacgatgacagacacgaacacacaacatttgttaacaagattcagccgaaagctatgatctcaaagctctgcttacgaacgctactccctattcaatatagcacctagccgctaagagtgtatggtctcgtcgccatcgatcttaacgatcttgcattgcttcgtcttgtctcaggcgctggagagcgaggcggtgcaggggagattccgcgccgtgtacgagaagatgaactccgctctcgacgggatgccctactcggagctcgccatctccgatgaagtcaaggagcaggtaagcctgcctgcatgcatgtttctgcctgcatgacacatgcacaggtcagacatgatcatcatcatcgatcgccatggtttctttcaggtggagctgatgaacgctcagctgacgcgatgtaagaagcgggcggacacgcaggacatcgagctgtccatggatctgatggtgatcctcgacaacaaggagggggagaggaacgcggacagggcgatcctggagaggctggccaagaagctggagctgcagacgctggcggacctgagggcggagacgatggccatcaagaagctcatcagcgagaggaacgggcagagcggcgatagcaccaagcagatcatcgagctcctcaacaagttcaaggaggtcgccggcgtcgacgagaagaacgtcctcggcgaggtctccgtgacgaaatccctcgacaagtgcccctcgttgatgatccccaacgacttcctctgcccgatcacgctcgccatcatgagggatcctgtcatcgttgccactggacaggtataccaaaattctccaagaacaacacggtgagattcgaacgagtttgacgaatttgaatacctttggtttttgtagacgtacgagaggaggagcatccagaaatggctggacagcggggagaggacgtgcccgaagacgcggcagcggctgtcgcacatgtcgctggcgcccaactacgcgctcaagaacctgatcctggaatggtgcgacaagaacaaggtggagctgcagaagagggagccggagcccgtggcggagcaggacgacgagcatcagcgcggcgccgaggacatcccgtcgctggtggaaggcatgtcgtcgatccacctcgacgtgcagcggaaggctgtgaagaggatccggatgctgtccaaggagtgcccggagaacaggacgctcatcgccgacagcggcggcatcccggcgctcatcgggctcctcgcctgcccggacaagaaggtgcaggagaacacggtcacgtcgctgctgaacctgtccatcgacgagagcaacaagcgccacatcaccaaggggggagcactcccgctcatcatcgagatcctccgcaacggcagcgcggaggcgcaggagaactccgccgcgacgctgttcagcctgtccatgatcgacgagaacaagctcaccatcgggaggctgggcggcatcgcgccgctcgtcgagctcctccagaacggcagcatcagggggaagaaggacgccgccacggccatcttcaacctggtgctcaaccagcagaacaaggtgagggccacccaggccggcatcgtgccggcgcttctcaagatcatcgacgacaaggcgctcaacatggtggacgaggcgctgtccatcttcctcctgctctcctccaacgccgcctgctgcggcgagatcgggacgacgccgttcatcgagaagctcgtgcgtctcatcaaggacggcacgcccaagaacaaggagtgcgcgctgtccgtgctgctggagctggggtccaagaacaagccgctgctggtgcacgcgctcaggttcggactccatgaggatctctccaagatcgccaagaacggcaccagtagagcgcagaggaaggcgacctctctcattcagctggcgcgcaagtgctactgaagatgaggaccccgtttgtaattgtaactcattttctttccccctctttctcagtagaaaaaattctgttgcttgccctgttctagctgaatgcatatgtggtgtatcgccagaatggggaattggtggtggaattgctgaaaaaaaacaccctaaatgtatttgtgccgatttcagtcaaactagttgatattcctataccattataagctgagttagattttaatgctaggatatacgatattagtttatacaagatcgatatattccgttataagtagaaaccgggtagtaagcagtattaaatagcaccttattatctggtagtaaatattgtgcaggtggtaaagaacaactaattgtgtgtgcgtgtgtgtggggtgggggggtgtttagtttttttgtgtaaattttttaaactatacggacacacatttaaagtattaaacatagactagtaataaaacaaattacagattctacctgtaaactgcgcgatgaatttattaaacctaattaatccatctttagcaaatatttactataacatcacattatcaaatcacggcgtaattaggctcaaaagattcgtctcgcaatttacatgcaaattgtgtaattaattttttttccacatttaatgccctatgcatgtgtctaaacatttaatgtgacatttttggtcaaaattttttggatctaaacaaggcttaggtaacaatgctagtgccgaatggaaggaaataaacaatcttatgtgtataatttatctgacacaccagtcacattgctaccagcaatggatgatttttttttctcaagtgaccccaaccttattcatcacccatacgcataagcattgtaaatgtagtaaagaactactacccactactgtttggactcacactaataccgagtttggtaagatacattgaggaagctctagcttaaaccatcatggttgaaaagacacaatatgttttcttcatttttttcgattaacatgttaatttctactagtccttgagagcaaacagatggctccttttcatcctctcacttaatataaacaaacttgagtaaaatgtacagtcgatcgttaaagttgggctatgtgtaatctagatccatgaacttataaatttagatatgtatttcttatcttgatttaatatagtactccctctgttctaaaatataagagattttgaagggatgtgatgtccatattcatattcgcagtcctagaaagtgttacatctctccaaaatcccttaaattatgggatggagggagtatcacctaaggtcaaaaatgcaaatgacttagcttgggtgctgatatggtgtcctcgccatggtggtgagaattttgcatgtaagcctctatgttatcatattgctaaaattgactcccaccactgctaaaatcgaccaccacagtgtccatggtaaaggagctgaagagatggcgactagaacggctattgagagtttccaaagccgaaatagataacatgatagggagagggtgattctgcaagcttggtacagtgtggggttgtcgttgtgaaggctgatgatggacctcatattacgagaggattacggcaacaatagcgggacaattcaaaattcaaaagttttgataaaagctacagagaagagtagtgcacgttagagttttgggatcgaactgcataggactcactgaaatagactaatttcagaagttttgcataaatataactagctgggtggcccacgcaattgcacggctagcatccaaacaaaatcatatatttttaagtatgattttacttagaatttattaaatagctatctcattgtcttaagagtttgaaagaccaaaccttatcatccccgtgtttctaattatatagttttttaaaagtcacaccagttgctaccctttatgtcatcatcttctttatttgcttgctcgttctaccactatttctattcattctctttggaacctttaaaaattggatcttataatttttagagtttattatcacgttgggttttgtttttataatttctaacatcccgtcaaacgttgccattatactcctctatggcccatccaccatctcttcttctttttgtcattgagattttaaaaatcgaacataattatcgtttgggatcatttttactttttagaagtcccgccaaaccgtcagcgactttgccattgtacttctctatggctcacgcgctgcctcccttctttattgccattgtacttctctacggctcgcccgctgcctcccttctttattgttattgagatttaaaaatcgaacatgattatcattgttttttttaccttttataagttctgaacctttaattgtcttgttgggttttttttttataatttatagaagtctcgtcaaacgatgccactatgctcctctacggcccgtccgcccccctattgtcattgtgattgtaaaaatcaaacatgactatcattggaattcattttttattttctagaagttccatcaatcgtcagcggctatactcctatacaccccgccagctgcttctcttttttattatcattgagattttaaacatatatgattatcaatggggtttattttttttactttttagaagtcccggcaagcctttgctcgtttgcttcacggcctgcctatcatacctccttttaatcgtcattaggattcaatctgttgctttattaacagtttttatatgtcatatcaaccaccaccactctactcatttataggcctgttacttaatttatctcgtcatgtgttttacatggtcttttattgaatctttcaatagtctttatttttatcacaaattttaattatttataaattgtattcctaattgaaatcttattttcctttttctaatttcagaatttattttttttctaattttaattaatatcgtattgtgttcttttaatattttttattttttattttcaacttaagtttgtcggtgacatgggaccgagagtatcgtgactagaggcttgggcagccgcggtcacccacgtggcttgaccccctcgagggggtcgggcctgagggtgacatggcctccccgccctctgtctccccgaggggtcgggccgctcccgtttcggccccgagggctggggcgccccgaccccttgtggttttggcgccacgtgtgtgggttaggtgagcacagcggcgcccacctaaccgcatttatagcgggttggacgagcgcgccacgccgcatttaatgcggcgctacgcgctcgcttatccggtccgtgactggtcgcagtgtgtgaccggtcacagaacggtcagatcacgggttaggaggcaacaggcggcctttcacacgcctcgccccgtcccgtcggaatgatgagagactctaggcactcgtccctagccggagccggcgtgctaactcctggagttagcacgtcagttccggctagattcataccaggcttcatcgcaaccattacaaggaagtcattttatgaagaagggctgacgtgtggcatgctaaactgacgcgtggtagacaagaatgaccggtttgtgactggtctgacgccggtcacgtcatcagcaaacaaccgtgctcccacgttgcacctgcttccggcagagtggaggttggtatgacccatcccatcggagggtcattcggacagtagccattgcaaatctccgcccattaatgaaggaaggacatggttatcccagtgtcaggcgaaggcacgagccaagttttggtcaaagtagggtgggtccccacccaaaagaaggataggtagaaatggtgcatgtggtatccccttgagatataaaaggaggaccatgcctaccaaggggggacgggagctgagagaggagagaggagagaaagagaaagaggaagagggtttctagagcttgaactctcttactcttcagctctttgtaactccttcacacacagatccaccagaacacaggagtagggtattacgcttctcagcggcccgaacctgtctacatcgcccgtgtcttgtgcatttgctctcttgcgaaacattccacagatcgagggcttagaacctcacctagcgcccccggccgaaccggcaaaggggggcctgcgcggtctcccggtgaggagacccacgctccgtcatctggcgcgccaggtagggggcgcgtgtgtttttctaagccctcatcctctttcgtgtgcgccaagcttctcccgctcagcccaatggccgaacgggcagtggcgcacaacctctctccgagcgctagcggtgacgacggggagtagaacctgcgccgtcgagctcgtactccaccgcccccctcgcaccgaagtcttgggcgggaggaggcgctcgagggggtcgaaagatccgcgactttgccgcccacgggcgatggagaaggacggcgagacggggagcgtcgcctcctcgtctatggcgatggcagcacgccccagggcgcgctccaggctgcgggcgcgctcctgcgtcacccgtccgtcgtccccgatctagagactccagcccgacgttggccggatgacgtggctgacttggtcatgacggcgcagcagcgcctaggcgccggcgggcggtcctccgccaccaaggcctctggcactgctaccgccggctctgtgtcatcgaggcggagggcgcggcgagcggcggccgttgcccgccgttcgtccgccattccctcgtcaatgcctccgacccaagaagatgtgcgtggggggccagatgcccgcctcgatatcgagcgccggcgcaatggtcgtcgtgctgcccacgcaacggagggcgcttcctcgtccggagcgccactccgatccgggcatgggggccagcctcccgtgtccccggttggtggtgccggctgtcgagcctttgtggcgagccttcggaacgtccgttggcccccaaggttccggcccaccatcaccgaaaaatacgacggaagtgtcaaccccgccgagtttctccagatctacacgaccgggatcgaggccgccgggggtgacgacagggtcatggcgaatttctttcccatggccctgaagggacaggcgcggggttggctaatgaacttgccacccgcgtcggtccactcttgggaggatttgtggcagcagttcaccacgaacttccagggcacatatccgcgcccaggcgaagaagcggacttgcatgcggtacagcgaagggacgatgagtctcttcgctcgtacattcagcggttctgtcaagtccgcaacaccataccgtgcatccccgctcacgcggtgatctacgcgttcagagggggtgtgcggcacaaccgcatgctcgagaagatcgcctccaaggagccccagaccaccgcggagctttttcagctcgcggactgtgtggctcgcaaggaggaggcctggacctggaactcctccggttccggtgtggcagctccggccgcccccgggtccgccgctcggtcagggcggcgggacaggaggaggaagaagaggtcggcccattccgacgacgagggtcacgtcctcgccgtcgagggtgcttcgcaggccacccgaaatgggaggcctgcgagcgacaaaaagaaggaggccggcgctcccagcagggaacgcccgaccggcaagtggtgttccgtgcacaacacctccctccacaacctcgcggactgccgcgcagtcaaaagtttggctgagcgaacgaggaagtgggaggaggagaggaggcaggagcgccgtgagggcaaggccccggcggctcccgccggcaaccggcgaagtgaggccaagcagaaggccccagccgaggacatcgacgatggcgacgatgacctggggttccaggagcctggggccaccatcgccaccgtcgatgggggagcgtgcgctcacgcttctcgtcggagcctcaaggccatgaagcgagagcttctggccgcggcccctacccatgaggcgacgcggcgggcgcggtggtcggaggttgccctcaccttcgaccagaccgaccacccgccgtacgttgcccggggaggacagatcgcgatggtggtttcccccaccgtttgcaatgtgaagttggggcgtgtcctcatagacgggggtgcagccctcaacatcctttcccccacagcctttgacgccatcaaggccccggggatggtgctccggccgtcccagccgatcatcggtgtgacgccggggcacacttggccgctaggtcatatcgacctcccggtcaccttcggtggttccgccaacttccgcacggagcgggtgaacttcgatgtggcggacctcagtctgccctacaacgcggtcctggggaggcccgcgttggtgaagttcatggcggcggtccactacgcctatctccagatgaagatgccgggccctgatggccccatctctgtccatggcgacctcaaagtcgcgcttgcttgtatggagcagcgcgcggaccacctcgccgtggcgtccaagcccgagggtggcgacgagaggctcagcacctccgtcccagccgccccgaggcagcggatgatcacgtgcgacgaggtcccggtcaaggaggttgccctgggcgacggcccgtccaagaccacacgaatcggtggtcttctagacggcaaataggaagacgcgctcgtctccttcctgcgggcaaacgccgacgtcttcgcctggagaccggcggacatgcccggggtccccagggaggtgattaagcaccgtctcgccgtgcggccgggcgcaaggccggtccggcagaaagtgcggcggcaggccccggaacgtcaagccttcatccgcgaggaggtggcgcgacttctggaggccggattcatccgagaggttatccatccggagtggctggcgaacccggtcgtcgttcccaaggcgaacggcaagcttcggatgtgcatcgactacaccgaccttaacaaggcatgtcctaaggacccttaccccctgcctcgcatagatcagattgtcgactccaccgcggggtgcgaccttttgtgttttctagatgcatactctggttatcatcagattcgcatggctagggaggatgaggaaaaaactgcattcataacccccataggaacttattgttatacgacaatgcctttcgggctaaacaatgcaggtcctacttttcaacgtactactcaaatttctttgggtagccaaataggacgtaatgttgaggcctatgttgatgacttggttgtgaaaacgcgcaaccaagagaccttactctcggatctagcggaaactttcgaaagtctccgctccgcccgcataaagctgaaccccgaaaagtgtgtgttcggtgtgcctgcgggcaagcttctcgggttcttggtctgtgcccgaggcatcgaggccaaccccgagaagatacgagctatagagcggatgcgccccccaagtaagcttagggatgtgcaatgcgtcaccggctgcatggccgccttaagtcgattcatatcgaggctgggagagaaggcactacccctatttaggctcctcaaacgccccgggccgttcatctggacggaggaggctgagcgggccttcactcagctgaaggcatacctcagttctcccccagtcctggtcgccccagagccagatgagccgttgctactctacctggcggcaaccccgcaagtggccagcgcggcgttggtcgtggagcgcgacgaggacaaccctcactccgcgcatccccaccctatgtcgactcgacccgggagagagcagggacgtgaggcccccgagccgaacggtggcccaaggcccccgacggccggagctggccctctgcccgcttgtccgacggtgccaggcgcccccgacccccaggacggcctcggggccactgcgggaaggccgcgcctatcgccctctgaccccgaggtcgtcggcacagaagccgagtgcgccccgcgcggcctctcggacgaagagcgccctggagatgcggcccctagcgaagaggatcggccccgccgaaaggtgcagcggcccgtctacttcgttagcgaggccctccgggacgctaagacccgataccctcaggcccagaagatgctttacgctattctgatggcttcgaggaagttgcgccattattttcaggcgcatcgggtcacggtggttacgtcttaccccctcggccaaatcttgcataaccgagagggtactggatgggtggtgaaatgggcaatcgaactctctgaattcgatttgcactttgaaccatgccacgcgatcaagagccaggccctcgccgactttgtggcagagtggacaccagctcctgagcccgtctccgaccccgaggccagttcgggcccctcgcagctgcctcacaccgcctactaggtgatgcagttcgacggctccctgtctcttcagggcgccggtgcgggggtcacgttgacctcgccgagcggagacgtcctcagatacctggttcgcctcgactttcgggcgaccaataatatggcggagtacgagggactccttgcgggactcagggtggcagctggactggggatccgccgcctcctggtgttaggcgactcccagctggttgttaaccaggtctgtaaggagtaccggtgctctgacccgcagatggacgcttacgtgcgccaagtgcggcgtatggagcgccattttgacgggatagagcttcggcacgtgcccagacgggataacgcggtcgccgacgaactctcgaggctcgcttcctcgcgagcccagaccccaccgggcgcctttgaagaaaggcttgcccagccgtcggcgcggcccgatcccctaggggagacggacgcgcctgaacggcccccgaggtctgtcggagtccaggcctcgggacccgaggggagcgctcccagctcccttagattgattgcttggatcgctgagatccaggcgtacctcgcagataagactctacccgaggaccgcgaagggagtgaacgcgtccagcgcatctccaagcgctacgtgctggtggaagggaccctctatcggcgcgcggctaacggagtcctcctgaagtgcattcttcgggaacaaggcgtcgagcttcttgccgatatccatgaaggcgagtgcggagcccactccgcctcacgcaccttggttggcaaggcctttcgctagggtttctattggccgacggctctcaacgatgcggttgacctggtccggcggtgcagggcgtgccagttccacgccaagcaaacccatcagtcggcccaggccctgcagaccatacctctttcatggccgtttgctgtctgggggctcgatatcctgggtccgtttaggcgggccccgggcgggttcgagtatctgtatgtcgctgtcgacaagttcactaagtggcccgaggcttacccggtcatcaagatcgataagcactccgcgcttaaattcatcaggggcatcactgctcggtttggggtgcctaatcgtatcattacggataacggcacccagttcactagtgaactcttcggtgactactgcgaagatatgggcatcaagctctgcttcgcctcccccgcccaccctagaagcaatggccaagtggagcgcgccaacgcagaaatcctcaagggcctcaaaaccaagaccttcaacatcctcaagaagcacggcgactcgtggatcgaggagttgccagcggtgctctgggcgaaccgaaccacgccaagccgagcaaccggggaaacgcctttcttcctcgtctacggcgcggaggcgattctcccatccgagctcaccctgaggtcccctcgggcaaccatgtactgcgaggctgatcaagatcagcttcgcagagatgacctcgactacttggaagagcgaaggcggcgcgcggccctccgagccgcgcgctaccagcagagcctgcggcgctaccatcagcgccacgtccgggcccgatcgctctgcgtcgacgacctcgtcctacgccgcgtccaaacgcgtgctggactgagcaagctctcaccaatgtgagagggtccgtatcgagtgatcggcgtcccccggccgggctccgttcggctggccacgggcgacggcacagagctgcctaacccgtggaacatcgaacaccttcgtcgcttctacccctagtgggggtcgagtgtcaggtctcgggctcgggccaacaccgcacccccccgggcgtgcagggttggccgggggctaccacatgcataagcttatattttttctcttccgtatttcaataaaagcattttcgatttcctaaggactgtgtctgtgccattgtttcctttcgaagaatcttggcttgaattagcacgctcgtgctcgatcctgccctcggtggcccgggccggctaaaattgccaaaaggggcccagaaccgagccgtgccccggggcgtggtgaactccgggggggaatcggcaaaggcccacaatcgggtcatccataaccctcggtcaccacgttcccggcctggccagtctcgacacgtggatctccccaggcactagccccgacccgcgccatttgaggctgggacctgggcacgagcccttgtttaagctaagacacagaaggaccgtggcacagaccatcctcgtctcatacacacaacaaatgaaattgacacaaaaatttcctctttatttgattgcagattaaattagtctatacaagaaaggggcccgaaggcctcggaagaagaagaaaaagctatttaagattggcgggggcctggggctcacttcgacgcgcccgggccgcaggcctcgtcgtcgctgtcgtccgcaccaccgtcaccgccctcctcgtcggagtcgagggcgaacgcgagccgaggggccataccctcgaagctgtggacaatgtggtcggcggcgtcccggacctgcgcgcgcgcgccgtcctcggtcccaggagggaactcgtccagcgctacccacggggagaagtcggggtccctggtctggtagcttgccagtacgagctccactgccccccgggcgaggtctctcgaggatgacttgatcgtctcctcgagctcctcggggagccgctggagggtcccggccatctctgagaggcgctgggcaaggcccccctggttggcggcgtacttcgcggtccgcccgccccagaggcccgcctgccgcccggcgcggtctagacgggagacggcgtcccgaagcatgccgggccctacctcgcctgccaagcggagggcctcgacctccccggtggacgagtccagcgcgccctgcagctcggcgatggtgtgctcggcagctgcgaggcgggcgactaggtcgccgtcgcccgcggccgccccgccgctgcgcgccctcgcgtccagctcctttgcccgcgcctcgagctcagcggcccgctgatccagtgcggccctctcggcgcgggcgccttccagattgcggcgcgcctgctcctcccgcgctgtctcgcggagggacaggctgtccgccagcctttgcgccgcggcctcggcctcctcgagagctcgctcccgctcggtgagcgcatcctcgcggaggcggagtgcgaactcctcttcggcacaggcggcctcgtgcgccgccagtattgcctcccggatggcgacggcggcctcgcggtccgccaggtccctctccttcgcgcgggcgcgctcttccagcgccgtggcgcgagcctcaagggcctcttcgcgccgccgggacgccgcctcgttctccgccgcccgccgttcccgggcagcggcggcgtcaaggaccccccgtgcggcgtcgagcttcttccctagctccgctgcctggctcccgtattggaggcggaggtcgtcccgcgcctcggaagacttcaa

SEQ ID NO: 7895 - DNA, 49515 bp, Oryza sativa
gcgcgcacaagttcgtggatctaagtgaaacctgcagacaactctaaggaccgctggtgcattttactctttatttttttgtcatctaactgtctttctactcattttctcttgtagactctaaatgatagaacaattaaggtagactttactagatcgagaaagaagcagtatgttgtgccatcagctcccatgccgaagcacagcgtttttgtgggtaatctgacgtggagagtgagatctcgccatcttcgtgaattatttgcatcaaccccaggtgttcaatcagttgaagttgtcttccataccacaagtccgaggcgatctgctggttatggatttgtttccttttcctcaaaagaggcagcagaggctgccatatctaccttcaatggcacggtaagtattctgaaatgtagcttagaaataaaatatagtacaagttttggtttgtgtacggcccaaattctaatacatgattgtgttttgatgctatttctgacctatgaaatatatcacagaaattgatgggaagatccattaacgtgatgttcaaagatgacaatgccaaaaagaataaatctgctgcaccaacggaagaggatctgaaggcagaatcatctgagcagattgttagctaagcatcaattgtcatgggaacacaccgagaacttaaatgattgaggattgcttaactgacattttcccagtaattactctaactcagtccttaatcttattttttttctaagtacattttcagccatcataacaaaagaaaagggcatcttccgaaaaaaataataatgatgaagcaacattttttctggttgtcatttctgatgacatgtctgtttatttatttgaatgctgaaaattatgtgtttttgccaagttgcattgctcactggttaggttttgtaaacataaaaactactatcatttcatattttcattacattatctctcctgaattattagtttagattttagcaagtgcttgtgccaatttgagcattttaaggtaccagttagttatacattactgtcactttgattgttgatatgatggaatgttgagttatagtttgggcgtcgttgacttaactatggttgtgtgttcctcctgaagatactgaattattggccaccactctctgctaatggtgaaagattctttttctcacaaggtctcccagctgctggtcagttttgctcattcaacgcctcgtgagttctatattacagcgttgtttatgctgtccacttgatatggatgacatatgacatttggaggtcagctttatgccatgagcacaaaatatatgtaagcttttcttgacacccaggttaattaattgtagatagagataagtctcaaggatctcagccgtaacccgatggatttagcgataatttgtttattgtgaaatatttggctgaaatgtataaatcaccgggataactttaaaggctaaaagctactactggtattgttttcagtctgtacttgtcttcgtttttatgtgaccggaagattgtagaggccgggtttaatctaatccattatctaaaataaatgtgaccggaagaactgtgacaactgtcaaattaatatatagccttcacatcagttccaaattgcacgcttggtgtgctatccttaaaggttgccgtgcagtacagacccaaggttcttcagtaaccaaacgggctagtacatctgcgtcacgagcggtccgacgaaacatctgtgagcaatactgaactgtgctgaatcaattattgtccagtcttccgtccccatctgtctattcttagctcagaaagtatcctctttaataatctgataatcttgtagtactaagcttgttgattgtgaatgtgctgcagatatttaggtccattctttttttagtggatttatgttggttctaaagatacgctgaacctccctcttaacctggacctagtcctaagagcaaagttaatagtatagccaactactagctacaattcatctataactaatctaatagttaattcatacaatagttgcttactatactattagtatatagtcccactgtcatatacacattatgtcttggagtccgtgctgcagcgggctacagaagctgttcttctctctcatcttttatcttattaaaatatgtttgtagctggctaatagtatgctattgtacctgctctaagagcacccgcaatggtaaagtaaggtgctctctataaaacatgtatatctcagtaatagattagattaatagtaaaccacctcaatagtatttctacatgggtatctatagctctctcatccattgtcttgtttttctctatagactctccaggttagtagatagctttactctctctctccatttaatctcttacaagtaggaaaatacgattatcttttatagagagcatatagataaccattgcgggtgctctaataacactagctaagcgcaaactccgagttatccatttcgcagcatttaccttgacggagtggacctgaaacgctaaacgcatgagcaaacgtgtacggaactcctttggtcaatcgttggattatccatctgaaactccttttgttttcgccgggatacccgtatgaaactcctgcatccgtcgccttcattcgcaccggtgataccgtactcatttggccggcagaccaaacatagtggattagtggacacttatgtgttgagaataccgtgccggtcctttgcgaaagcacatgtaacgcctaggaaagcaaggagcagaagcaatctgcttgtcttgtgtgcgacaacgaggccagtgcgttgtcctcgcaccaagcgaccgcctcgccgccgattgttccgtgcgacgccacaccgaaaccgaaccgggacaacctatttaatctttcaacaaatttaaaccttcaaatcttgaaaagttttcaaccaatggatgcaattcattttaaataaaataattaaaaagcatatcaaaaataataaatctagatataaaaagagttgtataatctaattccactatacttacgtagataaaacactgttttacgtaaaacgatatggcattaatgtataattaatagagttttaattatcataaccttaaaaatttatttatagcaactttcatataaaaagttttttaatgaaatataccgtttagcagtttgaaaaacacgtgattatctaaatttttatccaatttttattacataaaaaagacctaaatttacaagaatattctctctctccgtcccataatataagttattttggagagatatttattttggagagatatgacacaatctaatactaccaatctagagtaccagattattatgatacattcctttaaaattaattatattttgatataaaatcctacgaacgaaaaatacaaagacagaaaaaacgaaccgaataaacccaagcaaagcaagcggaaatccccgcgtcgcgttaaccttctcgcccgcggtttcttcccttcctcgcggaagaagcccaccgttccttccgccacgcttcaagcaaccgctcacctcccctccccttccctcccctcccccaccactctcaccaaccacacccccccaaaccaggcgccttctggtgctctgacgcgcgtggatgccgcggcggacggcgagcagcgcggccgcggcgcccggccgcggcgggatggagtgggagctggagcgggagatggtgctgatggcggcggccggcggcgaacaccagaagaagcagaggcagcagcagccggcgcggcgggcgttcgccaccgacctgctccagaactgcgacctgcctcctcccgcgaagctcttcggcccgctccccactctgcaaaggtaggcgccgccgcgttcccatctccctctctcacacgatcgatgccgtggaattcgcgagtgtggcattgcttagagcggcgcggtgtttttttttttgttttttttaccctttttgttgatgtggaggttggagaacgcggcggcgtggacgagcacgagcccggatcggaagggcggggacggcgaaggcggtggtggtgacggcggcgaccgcctgatgcgtgcgctgcggctgtcgcagtcgcgggcgcgggaggcggaggagaagctggcggccgccggggcgagcaacggcgagctctcggcgctgctggtgcgggactcggtggtgctgtcggcgcaccgccggtgggtcatgatgctggaggccgagaactccgggctcagaggagcagcaggagccgccggctcggccaaggaaggcgtcggcgaggacgaggacgaggacgacgacggcggcgcccggcgcggggccgctgcgtggtggctcgcgctcgccgtctgcgtcggcattgccggcatcggcctcgccatgggcaagctcctctgaaaactaaccgtttcttcacctttttgttaaggggaaactgcacattggaggatcagatcagacatcatgaaaatccatcgttctacgaaaaaattctgcacaaaaaaaaatgttgctagcatctggaacatttcgatgattaggaatcacttgtaaatgatgaacatgatgaacagagaggggtgatgactgatgagaactgtagaaacttaggaatcactgttttcagaaggaagttgggttgtgactggtttggttgtgaagtttgtgtagataggattatcatcacgcaaaattggcatcatttctattcccaaagagaagcttggatgatggggaatgggctggaagatgccgtatctattgctgcacgctaccacattcatgactgcgtctgcgtgtaggataaacttttaaaagagagtagtaataccttgtttggataatccgtcccaagataagtgtaggataatccgtcctaaaataaatgtagttttgcatcgttcgtgtctagcggttgaccgtttattttatttatttttttattgttattagatgataaaatatgaatagtattttatgtgtgaatattttatttaaatttttgtcaaataagacgaacggtcaaatgttaggcacggatatccaaagctacacttattttgggatggatatagtatattgtttggataatccgaagaattctatagaatattcattgctccctccattccacaacttagtacaaattctatcttaactatatacttataaaatatggtatttacagctaaagagcatgtctaatggttgttaatactgatctctcagtgttgattaggaatattcgttgacatggaaaaaaaaggagacaaaacatagttgctatgggtaataacggttcaacaaccattcttagtctctataatatggaaacacgattgggtgagagtaaaaaaaagaaagaatagtaaaaggagaatatttttagttaatttagagcctttttgcctttcaactattattataaaaacacgaaaataattttgtattatctcagagattatactcgtctctgccgattgactagctcttggttttattaccaagttaactaatccaggttcacacctcacccacacaaattttgacaatttgatcctttgaaaaagctaattttacaaatgaaccgccgccaaaacttatttaaaaaatgactttttttcagcgccaaatcatatggcactgaatttagacatctcagtgccacgtcaactggcgctgaatgccttgccaccacggatggaaggctaagtcagcgtgccaacgtacattcagcgccgtactatttagcgctgaggtatctaagttcagcgccatacgatttgacgttgaacaaaagggtcatttttgaaataagttttggcggtggtttatttgtaaaaatagtttttgcaaagagttaaattgtcaaaatttgtgcctcaaccactggtggaggcaaaataagtatttccaccctttttaatagctttgtttatgtagaatgttcttttattttattttaggatagggaaagcagctcagccgagtatcgttgctttgattctcttgatggttgtatctctgctgctcatacggcgcaagtatttctacaaaagaaaaacaattgagaatatatctatttgtttaataatttatgtttatatatctacacgggaagaaatgtcacaaatatacgagctccgcagattgaatacataggagcaatcacaaatcgcgttgcgggaatgcgggagcgccaaccagggtgttcccgctgaacgagcaagcagaaccgctagtccgccacggtccggtgggctgaacttgcgggaccatgacggtcctgcggaccaggagtgcggcagcgtggcttcattgcgtggaaccaactctgtgaacagtggcaaacaatgttagacggtactcaatagtgtttttgaacaatattaaaaacgcatgtacgtgttcagatgccggtgccgcggtgccgtgagaccaatccacaggaccacgtcggtcccgcgcaattgccccacgacactacccctcttgtcggtttcgcgccttcgagttgcagtgatggcgcgggccgcgtatgtggaccgcgggaaatgtatatttctataaaattttcatacgcatgtatatatatgcaaaatcaagaaaattacttcttccgtcctaaaataaatacagttttacactgttcatattcaacgtttgaccgttcgtctttttttatttttttatgactgtacttttattgttattagataataaaacatgaataatactttatgtgtgtctaaatttttgttagctttttcatattttttttcaaataagacggacggtcaaacgttggacacgggtaccaacgattacacttattttggaacggagataataatttatattttaaaatttaatttgtatttctactacttaaacatggagtcatcgatcctttccccacctcgtgcaaagcatggaacatccaatggggattttctgcggtaccgctagtgcggtagcagtggctgatgtgtgggtccggacccacatgtcagcctttgctactgcatcagcagtactgcaaaggatctgtatcctggactatcaccctaataaactagaaaaaaaatcaaacgacaaaaaaaagagagcaaagtatatatctacactcacaacccatcctcaagtcatgggtctagttcgttataattcacggatatattactaatgggagataataggatgggcctatacaaagaaatatatccgaaagacttggtggatattttgagtaattgctatctcgatgattaggaatcacctataaatgaaacatagagttgtgagggtgaaatatgtagaaagatactaggaagcgcaattggatttgtggggatccatgccattataaatttatctgtttggaaatataccactataattcgtgaaattaaaactataccattacaatttaacatgtatttaaggggtagcactgcttaccccttcaatgcaatttctaagtttttctgaccaaattaccctcctttctcaatcatcttcttccttccatgtgctctcgtcgtctgctggtcatcgcctcagcccctggcgagctcgtgcagccaaccgcagcgctgccctgacgagctcatgcagcaggcgtccacgacgcacgaagagctgctgctggaagggaccggcaggaactccaacgcatatccagcgaccttggtccaaagcagcatgggcgagttcttgttgcagttggacacgagctcgatggctcccgccgtccctggatgtgctccatggccgctgcccacaccagcaccgacgcccccgccgttgccacccccaccccccacccctcggctgccagatctgagtcctaacagcgacgtgcgtccaggcgtcgctggcgtccgctggtcctcctcgcatcactggcatcatccggccaaccaactcgcgtcgtcgccgccgtccggtctgccatcctcacgccgtcgtccgctcgtcctcttcgcatcgccgccgctgtcctgttgtcctcctcgcgtcgtcgccgccgtccgtaaccattctcacgctgtcggtgtctgcccatcttcctcgagtcaccggcaccatctagccatcctcattgtgtcgccgccaccgtacgctcgccatcctcacgccaccatgttcttctcttcctcctcgcgtcgtgtcctctgctcgtcctcctcggcaggcgggcggggcgcgaaggagcgcctagaggcatggtttaggccggaggaggaggagcttcggtggaggcccaggcctcactaggcgtgagggagagaggagagagaagaggggagaaggaagaaagggaggagggagcaaaaagacgagggtaaaatggtcaaaataatttttataaatacactgaagaggtaagtagtggtatatcttaaactgttgtaaaattataatatcatcgttacaaatatatgaattataacggcatattttcaaactgaagaatttataatgtcatggatccaattaaccctcgcataaagggagtttggttgtggttggtggtaacgtttgtgtagctaggatcatcatcaggcaaaattggcatcatttctatccctgaaccaatcgctgattcgctgcacggtgcacgctacgacgactgcgtgtagccgtgtaggatacactttgaagtcgcatcctgtttggatccataatcggaaattcggaagtctcaacggaacattcaataggttatatctttatgagcctcagttttcaacggaacattcaaacgtttaatatgatagggtgtaaaatttttacgtgggaagtaaacatagcctcagtttgtacgagggaggtcagacactgctaattgtacatggtcccacaagatcgatgtaagtgccgaaccaaagtaaaggtttgctttcgtgcacggccggtaggcctatagggacgatccactgatttggtcatcgacatcttgaggaataagttcatctgaggtcccttaacttgtcaacgaattcgacttttgtccctcaaccgaaaaaccagacacaacgggtccctcaactatcaaaaccggtgtaaattaagtccctcgatggtttgagggtggttttggctgacatggcgcctacgtggctaatttgacttggtcttcatctgacgtggtgcttacgtggcaattcgatctagaaaaaaataataaaacccatgggacccacatgtcagtttcacacacaaattaataaaaaatggtgggggcccacgtgggacccacatgtcatcctcgcccctcctcttcttcttcctctctccccgactccccttcatctctctcccctctcctttgtcctctctctagacgcgagtgaggaggggcggcgcgcggcggacgacgggtgaggagggagcgacgcgcggcgccggcgggagacggaagagttggcagcggcgcgcggcaccagtgggagaggagggagtgactcgcggtggtcgacgagatacgggaaagaagggagtggctagaatgagcgagctcctcgccctctccactgcgccggtgctccacgcgcagctccagcaggcggaggctgcggcacaggcgaggggcaaggcggtggaggacgacgacaacccacgccggcgccgcggacgacgtcgagcaaccggcggccagcccacaaacgacgacacctccttctcccttttcccctctcctctcgtcgccgtggatccaaagggaggagacggcagcctcgctccccagatcagcgtcggcgactcggcggagctcggcctaggcgtcgatgacgccgcgtggccacgatcctagcatttgggatggcatccgctgagaaaggatcgtgtccgcgtaagttgggtcatcgtgcccacgttctgtaatcgcgtatggataaaagggaaagaaacagaaaatgtcgcaagcaagtaatatgcagcgccaaaaagactttcccaattggtttgttcttctcgcgtccaagcgtgtgtgtgtgttgcaggtttcactgcagttgccggagtttagctaacatcgtcccccacctcttcattgacggcggcggggattaagacgacgacgacaatggcgacggccgtgaggcggtgccgtggcgcgaggagaagcacccgaagacggccaatacccatatctacaccaccattgacgcaatcccggtgctgttcaatggtttccctctcctcaagggtgtggacaagccgtactggttcgaggacaccgacgatgacggcggcgtcctttcagcctcatcccgtcgccatctccaggagctcgcctgccactcgccccctctctgcccaccgcccctctgctgtgcccgccacctctcggcgctgcggtgccgccgccccttgcccgtcgcttgtgccagcttgctccagccgccgccgcttagctccgccggccggccactccgctcagacctgctccgcccaggtgagagagagagaggatggagagaagagggatgacatgtggggccaaatgggtcccaccatttattattattttgtatgtagctgacatgtgggtcccatgttttttattttttaaaattaaattgccacataagcgccacgtcaatgccacgtgggacgaagacctagtcaaaggagccacgcaagcgccacgtcagccaaacccgagcataatactgccgagggacctcttttgcacggttttgtaagttaaaggatgtgttgtacctggttttgcacttaagggatgaatttcaaactcggcgacaaattgagggacctagaatgaacttattccacatcttgattggtatgttgggccgggcccgtcaggccatgggccaagccgatgccaggtcgtaccatcccggcctgacgcggcctagtcacctgggctagcacaatgggagggctgggctttctgtgccgtgtaaacggcccattcttctcgtctcttcggccttgagctctcgaggttcccttaattattttccgtttgccttttcagttcccttattctacatttggtcaattggctgctttatatattttgagaagaaagtgaggaattgcttcgttcgtgctattatagttctcttgatccttcttaatatataaatccggaccaccagaaaaaaaataaaaaagaaaataaaaagtgaggaattggattctgcatcgaccaatctcctttgatcattttctatatacgaagggcaggcagtggtaggtggcacccttgctttggcagcttgggggcaccttggcagtcaagcgatgccatggccaagactaatagctcgattccagactttcagtagctgcattgcatatcaggttctttgatttttttttcttccttttcttctaaagctgcggtgttttaaccttattctcggcattgctgcattctttataggaaccgaatcccgtgcacattaagtttgacaaatttatactctaaaaattgtcttatattattgtatggctaaaatataatgaatgtgaagctaagacttaacaaatactcctatatacatatatagtacattttgagttcatgtacattatttttttcttgaattttcaataatatttgctagttaggtgtgcacatacatacgtacatttggttttgtgaaaatacactcactgaaggttgatatggatctagaagatgtgtgaatcatgtgtggttcttgtaaagtaaatatatttggattatgtatcagcgtatcactatcaaccatgtatgtcgaatatacttatatatgtacataaacaatggaggagcaatttgcgctcccatgaactgttaataatctgactgaagagtacttataaaaacagcccatattagttcatggcttacgtatgccagacgacgtgcaactgcaattcttacattgacctgcacatttcctcccttcccaagcttcaaggacggtcaacaagagggtatcataaaaaaaaatgaagctaaaaatattattggcaatttggcatgcaactaacatgtgttctagcacagtagcagggaccttatacaaattcaactgggtaaaattattgccaagcaactatcatgtgagtggcactgtagcagaggccttatacaaaataattcgacagtatgcctttttttcccccttcaaattcacagtgctaagcgtgtgcaagaaatggttctttcaggggtgggaaaagggaaatagggtgtacggtacagccagtgaacaatccaaaattttcttctctgaaactagtatttttaaaaacatattcttctcgatcttgaatcatttcatgaaccttccaaaattattcgtctcctgattgaagagactgacataaacctaatctgctgatctctatacagagatgcgttggcactgtttacatacaccctgccggccatgatgttatcccatacggcagatccttcctttcggtcaatgcattaggtgaaaaccgagtcgtcttacatgcatgctatcacatatatagattgcaggagcagatcgaacaaaatgattaggtcaacatgccgtgtgtccatgtggatcggagtacgctagaaatttttaacctggaagctagagttaactgtgccattagcaaaagatcactttattaaccttgcaaacggcaaggtcaaaagctctttccaaaaaacgagaaatatacttttgacattttgacagatgagtgagctagcactagtgttcttcctgcttcgactactaccatatatgttgccttccatttgttgctcatgccactacaggcggctaaagaaacaattcacatgcattatgttattttttttcgcaaattgcatcagttacctaaccactcctcgttctgccatagtttcattagtttaatctctagtttaattgagctttctgtgcgttcattaagtaaagtacaaggacaggcaggccagaagtattctcgttggaccatgcatgtattaataagcagcagtgccggtatgcgtagtatagagtaattcgtctgaacctttctcttttgtgcaatgtgcgcggagaaaagaaatgcatggctgtgcttgatgtcgaccattgacgatgacccacctaccgtgtatgaacaatcgcggaaatagaggataattagagataagggtagacaaacttggatggaccatgatcccgaacaacacttggcattttggcaatgatattagggcccacatgttaatgagcagtattgtagtatgtattgtagtatatctctgtttccctattttgccaattccttttatctttgtcggttatgtttctataaaccggttgagtagataagggaggtttcgtgtctatatgtactccgcaccgatatcaatccaattttgtgttgagtctattccgcttttatggtatcagatttttttcgatctaccgctctaagcctaactccaccaacaccgccatgtcgacggctacctcccccctcttgccagagtccctcgtcaacgttgtttccacgtccgttgccgacgccgtccgcgcgtcttaccaagccctgcccggctcgacaattgatgacgccatggccaagacggtcaccgactccgccgctgatcgacagggcatccgccgccgacccgccgtacatgctgccctcaaacagcacctgccggcgctctccatagcgcccaccgccacctcgtctctccccaccatggacatcgctccttaattatctctctcggttctgtttctataaaccggttgagtggataatggaggtttcatatgtactccgcgccaatatcaatccaattttgtgttgagtctattccactttcagtttggttcatgagatgcattaagtctgaaaagtaatatttcttgaatataatataagggttggccttatctttaaaaaaaactagtggatcaatccagcccatttttctctatcactaacatgtgaaccgtcacttaaaaagtaggtcattttatctctcataccaaacggataaatgcgatcttcctattttcgaaatatggatgagttcaaccaatctcatctcgttctgaaatcaaatacctctgtgtaaaaaaaaaagcggccgctgtattttttcagtagatgaaggagaaaaagaaattcggaattctgaacgttcgtgtgtgatttgactgatttatcatctgaaatatctgaatgaataatgattaggatttctggaggaaacgaagaaacgagcgagcagaaaatgagtgaaaaggaacgaacacaaacgctgaccatcctctgctgcgtgtgtaaaactgcagccctgtccaacaaagcggccggccgcgtcgtccaaaagactgatcgctcatcgatccgtcacatgcaagttgccaaccatgcggtgaaatggtgatggttctctataaaaagagacccttccaacctcaccctgtcaattgtgcagcgagacaccgatagctagctaactaatcttccccttcgtctccggcattattccacttggacgaacactagctcaccggccggccatggcgtcttcttccgttctgatcaagctgctcgtcgtcgtcggctgcgccgccgcggcctccgcggcgacgctcaccgtgggtggtagctccgggtggacgcttggccagaactacgatacttgggcaagtggccaaaccttcgcggttggagacaagctcggtgagtccttgttttcttttggcttaatttggtagtagtgatcagaatgtttggaatttcaggctggaatttagtcatatttttgttacaatttcttgtttcatgcttttctatacatcaaaagagaaacaaaagggtagaaatttattggagggagtagcacataagtgtacttcttttgccgggtcggccgaccaaattccattaagatagagggtatgcaaatttataaacctgtgaatttcgacaaaaaaaaaagctatcaaaaccgaatggagattggtacacaaacaacctcccgaaaacagaaaaatgtgctacggcttggctgttcctctcccaaatcctttaaaacttcagcttccttccagattatgatttcctctttgacgattctagaacacgcgtgcattcctttccttccaaataagtggagtactaattaatactcgtgactaatcaagcataattggtaatttcccttttcagtgttcagcttcgttggggcgcacacggtgacggaggtgaacaagaacgattacgacaactgcgccgtcgcaagcaactcgatcagctcgaccagcaccagcccagccaccctcgacctcgccgccgccggcatgcactactacatctgcaccatcagcggccactgcgccggcggcatgaagctggccatcaacgtcggcagcggctccggctccggctccggctccgggacgccacccagcaccaccccaggaagcagcggcacgccgccggccaccccttcttccccctccaagccgaccggcggcgcgtccgccggcctgcaggccagcgccgccgtcgccgccgccgccggcgtcctcgtcaagctcgccctcttctgatcgggcccacctgccaggatagaggcagtgcatatgattcttgtttcttgatcatttcgtctgacggccggcatgcatgtgtgtgagagagatgagtggtttgctagctagctagatgatgatggtgatgatgatatggggttgttgttccgttccatcgtgtacttagtactgtaattacgagctgtcatgtgatttgttttctcatctccatggatttgtataattttcctctgaattttatcatctgcatattgatcggacactctatatcactctatatcaatcttgcaaaaagaaaaaccggtggttaaagtgatggttaacggattggtcatgctgagcaatgcatgatctaagcttgcctaggccgatcactgtagtaagaatgggaccagaccgacctgaaagaagagcaatgagacgactactaactactaggacactagcctagaggaaaagaatcgaataatagatcgaagggcaggtagtgcgtcgttttcagagaagggaatacctcacatttctgcttctgttagaacaaaagtttcctgcttcaacacctgctccgggggtaagagtcagacggttagcttaggtaccaaagttctctgatgctaattagccgtgcttacctttgaaatgagcaactgaatctgtcatgtcagtgtctgaaatgagacgacgacgacagtggacacggcggattcaacttcttgatttctttagtgatggtgggagtaggttgggtttggtgaggaggaatacacctttcaatctcaaagcatcaaggcggtgtgtatagatgactagatgagtgtgtgccagccgcctcagactccttgaacacaaggaaagaattaaactccttaaagaaagaaaagggttgagacaatgagaccgtccgtgatttggagtatatcaccgttccagagtatcagtcattgtcatacaatttgggatattaatttgttagcgagaagatcacaacatgttcgttgcaatttttcaggtctctttaccagactttggtagaccgcagtgagagctccaatccaaatgacagtaggctgagaggtaaagagaaaaaaaaaccctcaaaactaagttgacttgtgtaaaactagtttcgactactcttgagtataatgagttgagtttgattttgaacttttgcttcgtttgccaatatgtgttcactatttcggaacctataaatatttcaacgacaagagaggaggggttgctatatcagagactttgaataataattaaactcaaaatttgaacactttactttaataaaattttttgttaagttgcatagtttcaagctgaaaaaaaaatcctattggaactttatttcaaacctgaattttgaaactctagatctcaaattgtgagacctacaaggttgcacaacacaaccattacgagtgtaaacacgactggtcactggtagatctatgattcaaaattatcattttaacctctactcaatctgctctatattatagttcatttttaagtttgtcataagtcaatatttttaatttagtgaagcttactgagaaatataccaacatttttaacacgaaacaaatatactttaaaaatatatttaataaactaattttttattataaatattatcatgtttttctataaacttaattaaattgaaaaaaaataaattaggataaattggacggaatatatcgatcggatgaaaagaaaattgagatgaaaataaatcaaataaaacagtagtgagtagtagcactagcagcttgctttctactccctgaattgataagtggtggatatcctcgcgtttcattggtgcgcgctggaattgtgcgtgaatattataattccgttgaaccggtcttcgcgtgctggaaattgtgcggctactggcgttgggaatccctggcgttggcgtttctttgcggttttgacaacgaccagtcgactattcacgacgacccggccccctaccatgctgtccatgcatgatttttttcgccggactggcgtgaagagtgtccatgcatgatgaactcgatcaacccaaattccaaatttgccatcccaaattcccaatccctgaacacacggcctgccccacacacattggctgcattttgccatgcaaaataatgtgcttctgattttctgaacctcgcgcgtgcgctttatccaaaatgagaagaatacgcgttgacagacaactgcgccagcttgtccatcttggcggccgataatggagtaatggtggtcatgaggctctttttttttttttttttgagaattacatattacaacgcagacactcacaacgcacgcgcactcaaccctctgtcgatgggtacgtcgcctaccactgaaagcacaacgccgttaaatcctagaaaattcgctcccacggggagtcgaacactgaggctcttgtaaccactaggctacatgccctttcgcatgaggctctttctttgatcgacttaggaacgtcctaaggctgtattcgggaactccacctcacctatgaaaaacgcagtccattaacacatgattaattaagtagaagctatttttttaaaaaaggatcaatatgattttttaaagcaactttcttgtaaatttttttttgcaaaacacacaccatttagcagtttgaaaagtatacacgcgaaaaacttttttttttaattttgagaatttaaatcctaaatcgtgaaccatgcaatagaatatttatacctcgatttaaaaagtgagctataaatattctatttaatttaaaagtaaattgcatcgtcggtacacaaacttgtcagatggatacaaacttataaaatactcgttttggtgcacaaacttgtgcggtgcatgcggggaagtaaaaaggacattacatgactaatcttgttgatttaggggtcgattaggatactatgggagcgttcattctggtgacatagggtgagaaaggacatcgtattctgggcgtacgcttcccaaactactaaacggtgtgttttttgcaaaaactttctatagtaaagttgctttcaaaattcatattaatccatttttgaaatttaaaatagttaatacgtaattaattatgcgctaatggctcacctcgttttgcgtatcttcccaatcttctcaatcccctcctcctcaaactcaccctatgtaaacatatatatgagaaggttaccattatacatacacctattcaataaaatatagaatataatttagtgatagtagaaaaagattaaaaaaattgaacactgatataagggttagaaatatatgaaattcatcatttcaatgataaaggataaagtagagataaaatttataaatattacatgtcttatgcatattaactatgcgtatacacgccacatcctaatcaacatcaactttataaaattaacattgtcaagttattttggtcctcgttcgcatgaactagacaagtttgtgtactgaaaacgagcattttataagtttatatactaaattgcacccacctaacaagtttgtataccaccaatacaatttactcttaatttaacaacagtaatctcctccttatacaaagaatctgccagacaaacgtaagagttgaatcattttttgaaaggactttactaccaggacttagcctagtaatgtattttcgtaaaataaaagacttatttacaaagttcgaagcagatacaggaattagaaagtttgtaaccatgaaaaaactatatgcttaagatgtcattcattttgcacgtatgcaaaagaataagagttgaatcaatatttaataacgatcaatttacaattatatcacacaatcaagtgagttgtattggatttggatcctactacatatgccttgtttagttccaaaaattttttacctaaaaacgccacatcaaatctttggacacatgcatagaacattaaatatagataaaaaactaattgtacaatttgcataaaaattgcaagacgaatcttttaagtctaattaatccatgattagtcataaagtgttacagtaatctacatgtgctaatgacagtttaattaggcttaataaattcatctcgaggtttccaggcgagttatgaaattagtttttttatttgtgtctgaaattcccttccgatatctagtcaaacgtctgatatgacaacaaaaaattttctttttgcgaactaaacgcacccttagctcaaatttcaaaacgagatgatttttggttgatacgagagcagcgtgcatgatatccttgcgtttcattcgtgcgttggaatgctgtgtgtgaatcaatataattccgttgaacggtcttgcttgtgctttggataagataacgacctttgacgacgacccaccaaaccatgcatgcatgaacatgagcacttgctcccacacgcatgggctgcatttcgcctcttaaattaatcaaaacagtcgacttctcaaccttgcgcgtatgctttatccaaaaatgcgagaagagaatgcgcgttgactggacaggctcctgctcctgtccaacttagcggccagtagtccccagctgcagctagtactcatggagtggtcgtcatgaaactctcagtataaaaggaccctgcagcctgatcccctgtcaatacaaccagctgcacgcccattcgtctcaaacacacattctttgattcttccttcaatttccccttttcaactctgtcatcaacttaattgttagaagcgacctaaagattttgcggccgatcgagcatggcgtccccttcggctctgatcgcaatgctcctcgtcatggtcgtcggctgcgccgccgtggcctcggcgatggagctgagtttcattgtcggagatgcgcagggttggaacaccggcgtcgactacaccgcttgggcgaagggcaaaaccttcgaggctaacgacacgcttggtgagtctttctcgataatcaatcacttcattcgcacaatgctgctaaatgctaatgctatccagtttgccaattggcatttgaaatcgaacgctgattttatttggtgtaattaactgttttttgccttttttgtttcttcagtattcagatacgccaggaagcagcacacggtgacagaggtgaccaagagcgactacgacgcctgcaccgtcagcggcaaaccgatcagtgatttcgaaggaggcgcgcttgtgacattcatagcgctcagccccggcgagcactacttcatctgcaaaatcggcaaccattgcgccagcggcatgaagctcgccgtcaccgtctccaactccagcgacaccccgaggccgcaaccttggattgggccttactccacgccagccagcgcgtccgcacacctgcacgccggtggcgccgtcgtcgcggcggccgttgggatcctcctcaatctcgccctcttctgagatcgcattgacgcgtcgagcggcatggacgttggcagggtggaggcaatgcatgattctttgtagcgtttctgatgaaatttgtttgattattttgtttacgttcgatcgtgtatacgtgcgtaataatgatttattggtcttgtgatttattttctccttatattcatttgtatatcctctgatataattttctgtacatctcagcattctgtatgccattcagtgatgtaggttagagtaacaaagaactttgctgtgatgtctttatactaacttaaaagtgaactcgttatccttccatccctttcttctcccaccgtgcttcagtgcttgcacgcagagcgtagtaggtgtgtcaaatactcctagtaaatgccaaggaaatatgcctccagtccggtcgcacccgcacaaacccgttccaacccatctcgagaaaggcccattccatctgcttcgccacggcaaaaggcccgcctcttaacggcccaaataggcccttctcacgggggactacgtccgcgcgggccgttggggcccaggtaaacccccgcctgggaagcccagcttggatcgggaaaccctagccgccggccgccatcgcccatcgccactatacatcacgcggcgaagagagggagagtgattggccgcggccgccgagaataactggagattcgccgtcgagcgaatgcagcaggctatagcggcgtagcggcgacgaccgccgacggggatggcccctgtggcgacggtcttgacggccgccatgtcctcgtaggccgcctctgcgcagtaggcgccggcggtgccgtcgcttcgactacggaggttcgtagctcgcgctctacgccttctagatccggaatgattctaggggatctgcttgtattctgcatcttgcgcgtaccacgttttttatgaaattattgacgaatattttaggtctcttcagtttctgcgtgcttacttcaagtttcggcatggagatgtatttgggttttcgcgttgatgttctttgtattgcttttaggtctattgctgatggactgacatctgattgtttaaagtagctagtgcgtatttattcatcctcaatgatgagagatgcattactgaagattttttcctaaaaaaaactgaatgtatatgtggcaaaggcatatccaagtgggcttttaattgtaaatatgttcattgcacttctggtccgcattagtgtgacagcaaacaacacaataagcatattacttttgatctgattgatagaccagacagctgtctgatgcttctattgcctatctcatgcttgattatagcatatttgcattgtggtcttgattgtaaggctgtggttgggattcactagtttcacatacttggaaagaattcttggagctacctttctgggaaaaccctttaataaagcaattctaactcttatccattaacaaaaatgccttcagttgggtgtaaaaatttatgtattttctgcttatctgactataacgtgttatgttttcttggacgtttttatgattggtgccccaattttcaccatcatattttctgaaaacatctgtggtgttttgatgaaatgcaggttgtcagttgtgttaattcttcagtcatccgaattgttgagattccatattgtttggtcataacataaccagtatttttatttctgtcattcaaaactctattgtgctctttattgcttatttatatctaatcaacacttgatatagtgccagcctaaaagtaaactagaaacctactaacctagtgatggcacattgttgtcttgtggccacaaaaggatttccttttttgtcttagcaggtgtgcttgtggcaggaagtattttgacgaatttgttgagttttttcttttggggtttacattgtaaacttatatgtgatttgcaggtttctggaccaaggtccttattgtggattagatttggatgattttaaaactctttaaacacaggatgcagaacagctcaataacagaagcgctggaccctggaggtattcctatttccatgttgatattaatgcagcttgatttttagtgtcatcattttttcattgaaaccaattggctcggtagggctatctccaatgctggtggaatatgaagtccggagcatattgcttagtttaaatttgttgtggtgaatagcgaggaaatcagctctttatgagtttgctcaagattgattgaagccagaccttttggtgaatattatcaaggacagttcatatggctagaggaataaacgcagccacacataaattatctacctgtaggaggataacccctgaggattgacaaggaatcaaggtgatattttgctacctaatgctcttcaaatagttagttgaattttcttccgcctattaagaaaatgcattgcatcatattttgtggtctcctcctccctagtccctaatgctgtatgcgtgtggattgtgattagtgttatggcaatgaggagaaatgaaaggccggtcttacggctgcctcccattcccttcccgattcaattagtctctggtatgggacgggatggtagtagcatgatgtgcagttcggcgaaaggttctctgagccattctttctttacctccacttatgttcagtacactttatttcgtgttctttttagggtaaaaatattgcaggttattagggtcctcattcagtgtgcagatatacaacaatgcacgcacgttggaatttgcatagtcttgcgattttgttcttgcatactcttccagaagcattgatagcttttgtcgaactcctgattttgttcatagtttcagttatttgctggttatgggcccttccagccagccttcctctggattcttgttcttcgttactatcatcactgggcatcataggcgccatattggggcttattgtttgttgatttgagccgtctgtgccttttttgcttatttgttgtgtcgagagctgttgctttacttggaagtagtagatgtgctgatatgaaacaattacggtgtaatactccgtagtccgcaaatgactaacttatttgactgtccatgtcatctgttttgtattattgagctggttagagcatgtttaatagtagataaccggctataagcttatattagagctaacttgtatatacatcgttctatgggctgcttttcgatgacgcggctgtggcctttccctatccagatttctggaggaccagaaaagtagaaacggcccgtgctagccactcgcccgaacaatattacggagtatttttacccctggttttagaatatggcgaagatcgacgtgacgattatctaagaaacgtgaatctcgaatactatcgtacattcatagattccagaatgccacattgtaccgtgatgattcgtctaagaaatgtgaatataccgtgttgccatcgcgggattgtttgcctgttccacacgtacccggccacctcacccatacgcgcagccacattacaagtggtacaagcaagagcccgacggcacagcttgcaagagctccaccgtctcaacctcggggctaccaccgacggctcacacgacgacttcttggcagcagtggtgacactggcgatgcaagtgcaacaacaacaacacgacctcgtcaacattgataacacctcactcgagcacagcaccggctccaactccgtgtacaatagggacggcggctacatgatgctgatgagcaccgcatcggccacgacacgcggtggcgagaaaccacgagtagcaggtggttcaagacggccgagggatcacggcggcgacatacaaaatgtcttcgcatcgtgccgttagaggccaatggctggaggataggggcaaagataacataattgccctgcattgttcgctcgatgtaaagtcctaccccctctgttttttaatacatgacaccgttaacttttaaacatattttttactatgtcttattcaaaaaaaattgtataagatataaatcatgcttaaagcattttaagtgataaaacaactcgcaacaaaataaattataattacataatttttttaataagacgaatggtcaaacgcgtgataaaaaatcaacggcgtcgtctattaaaaaacgaaagtaatacattttttttttacttattctgatttaacttgtggcgtgtagtcaggatggaacgaggaggctttcctgactttgtgtagtcgtcatataaatcaggatggaaggataaggctttcctaacttgcgtgtaccgtgtagtcacaaaatggaaggatgagaggatggaaggataaggcttacctaatttacgtagtcagaatggaaggatgaggcttttctaacttcctgtacttcagtttacagttgagtcatgaagtcggagaattcacttctgggatggagccaaactaatcaaacgtgtgccaccaccactggtttcatcccaaaagtgtcatcgctaccggccaaacccgccccgcccgcgcacgcactaaccgcaccgaaaaaccgcctacgcgagcgtgtcggccgcgggcacgttaccaacgcgcgcagcccaaacgccacgcgccctcccctcgccgcatgtcttgccgtgctcacccaccccccaccaccaccacctccagcaccggacgcctctcccatctcccatcacacgcgagatgctgtgctccccagctggccaccaacgtgacaacatcatcacgcaacgaaagccacagcggtagaatcgaaacaaagcaaacaggagtagaatgctacagtaatacagcagagggggaaaaatctgagcagatctgaggagctagatcagaacagatcaagcaggcaggagcaatcggatgacaaaatctctactaataatgtccgaaagtagattaaagaaaagaatccggtgggggaggattatacaatggcaagcacagtctctctctcactcacaaaagctagatctagattaaaacgcaatgggattagcaaccccagagcgaaggggggaaatagctaataataacaataataaattaacggcagtaatggcggtgatgatatcggcggcggcgaggaactcatctccgggagccggatctcagtagaacgccgcgacggctgccacggcggcccaggcggcgacgacggcggcggcggagggggagactccggacgcggcgctcggtggcggcggagacgtcggggcctccgtcggggactgggagatcgaccccggagccggcgcgggcggcgagaggacggggggctccgcggtcggcgccgaggcctggggtgacggtgtcgcggcggcgctcggggcgggcacgggcgcgggcgcggaaaccgggggaggcgtcgtcactggcggctgggcggcgggaggagacaccggcgccacggccggcggccgagtcggcggggtcgccaccggtggctgcgccttcggagccggcgtcggggaggcgctcgggccctgcgccaccgccgcggcggcgaagagcgcggccatggccacgaccacgaggtggaggcgcgccatgggatggcggcgaggagagctagggtttgggtttttgaggttggtgggcttcgctttgcaacttccaagtgggggaggcggcgaggcgggcgatggatgatggccttcaggtatgggggctataaaaaagggggcttttaactatttgccacggttagttttagcaaataactatttgccacccctatctcaatgacatgtgggtctacatatgtctatgacatatgggtccaatggcaaaaagttaattgtcacatctaaatgtggcaaatggttaaatatctcaaaaggggggaactgactacgcggtagaaacgaaaaaggaagagttatagatagcgattaaaaattggagattggtttatttggaggatttatttaattcgagattttggacggtgattacgccatcctttttaagtcggttcggccgtcggatggaggatggccgttggattggctgccagggtgcagatgatatgggtacagaatgttgaggctacttataatgaaagcaaattctgcaaaacaaacgaacggtgcaatatcttcatgtcaaagcaaaagatattttccattcacgtatttaaaacagttgacttgtccgaaattttaaaccaggtagatatatttggaacttttacatatatctcatattcgaactaaagcctagggatgtcgatccaattccgggctttttggattataggactaaaaaaaagtcaaaataggaaaagaaaagataagagcatatgcaaaacaaacatatgaattctaaatagaattgtaaaacatgcgtcaaacaaagcaaaagcaaagaaaaaaacgtaagaaatgaaataaagacatgtcagagtgcatgaatttttttttctttgtttctagtagaatccacatgatttttcttgggtttctgtaagagatcaattcctttgaaccgaacggtgttacagtcacgaatccatatgaatccaaaactctcttttttttttcctttgttttttctcatatcagaatgggtatttttgtcaccatgggcaagtgaagtaattttttctcatcatattctctttcatcatgttaaatgttatttttattcctaattaagatttaagaccagctctgaagttttggccacaagtcaaggtcggttgccttttctatttgtgataatgcgcgtccgcctataacaatgccgcgtcaatcttaatgtcagtttaaaattgccagagaagtggatatactagaatagacaggctatttccttacttaaaatgacactagatgagtagtaggagtatgtttttggttcttttatctaaaaaattgttttgtttggttaattgataaatattagctttgagaaatctttggtcaatttaaaaaaaatcctttaatcggaagaaaatggacatgacaccttttggaaccatggatcgagtcttatggagctgtgctcaattattgtattcacatccgtttacttattcagattttaagtctagagtagtcgccgctgaactttttgacagtgactgtttctcccccgtaattttgataaattgaccctttgaaaaaacttattttgatattgagccgtgtcaaaaactaattttaaaaatagaccattttctcacggcatcttacttggcgctgagataaggtccgacgtgtcccgcaaatcacacgtcatgcgatatcagggccaaattctttggcgctaacttacatggtctggattgtataaatagcatgcatgtacacccttactgtatggaaggtgtatcctggtggtggagggctgcctctcataagtcaagggttcgaatcccgtaacttcccatttttctttttttttcctttgaggaacaatactgcatacataattatgtagcaaaatagagggtgaaaaaaaactgaaatatgtaaatttataccgactattaatctataaataccacatacataattttgttccttccatatttaaaaataaaataaatttaaaaaactaagctataaatactgcatacataattttgttccttccatatttaaaaataaaataaatttaaaaaaacatccatatttaaaaataaaatgaatttgaaaaacatgtgagatttttaaatagaacatcaaaagatgcttgtacttagatggaaaaacttgcgtggctaaggattgaacccattacttcacaagttctcccccaagctatcttgtctttgtgtgcaatggaagcttgtagataactaatatttgtaaattgaacagagatctttggtgctgacctcggatgacgtgtaaaatccgtgacacctcggatgacatctcagcgccaataatagtggcgccgagatgttatatctcagcgccaatctctatggcgctgagaaaacggtctatttttgaaattagtttttggcatagttcaatttcgaaataagttttttaaaagaatcaatttatcaaaattacgggtttctccccgtattttattatagcttagccaagtctttagtggaacatgtaaacgatgaaagggtattatagtggcatcacacatcaggtgattaaggatcgtgctatcaagaagtcaacattaactggacgtctggaataccagagtgcatggcacgctaggcgtatttacgagctgatgcatccagagaccaaagaccttggctgtggtcttaccccaagttttccaactatctcccttgtttttcaggcacacacttttcaaactactaaacggtgtgttttttataaaaaaaattatacgaaagttgcttaaaaatcatattgatttatttttgaaaaaaaatagctaatactccatccgtcctataatataagataagaagttttagaattggacacggttattaagaaagtactatatccgtttcacaatgtaagactttctaacattgcttatatttatttagatgttaataaatctggacatatatatttgtttagatttattaacatatatatatatatatatatatatatatatatatatatatatatatatatatatgaacaatgttataaagtcttacattgtgaaatggatggaataggtagaagtgagtgatggagggttgtgattggatgagtagtgaagataggtggaaaaagtgaatagttgagggttgtgattggtttggaagagaatgttggtgaagaagtggttatattttaggacaaatcctaagggctaaaagttattatatttttgaacgaagggaatacttaattaatcacgcgctaatgaaccgttccatttttcgtgtgcactgctctggttgtgacaaccttgctccagcgaacacttcagtgcaaatttgcagccgtatgaacagctcagaaatcagcgtatttactactcgatccgtctacgtatccagatatagctacatatccgacaaatatgtccagatttataggtgaaagatgttatatttttataatggagataatccaagataatgatacgtaaatgaaaggggaagacgaccaggcaatgtagaccggacagtagagtagactacaagagcacaaaagtctttacgtgctattggatgtagcagtgcgccaccagcatcaatcttttgctgctgaattgcccataagctgacagcagagtcgtgcatcactgcatgacctaggatcacggaccgataagccaccactcaggcctgtctctttacatttggagagttgatacaccaatctcagctagatatacaaatcatcagccaaatatctaccctacagacattatccaagaggaactttggataaccttcttctatgttgaatgggcacacggcgcccttgtacactatgaagtatgaaaacaatcttccaaagtgcaacttctgaaggatcttccttcaacgaacacagttgcaatgtttggtaaaactccagttttttcctttatgttcacttctatcagcatgtcactgaaagaatcttctataaacgaaatgaaaccatcttctgtcttgttccaaaacactgcagaaaggttaaaaacattaataaaataattgcacaacacaaagatgcaaaacacacccttgtagaatctttattgttctaaaatactacagagttcagaggaaacaagaatgtatgcaaacgttatgataggaacataaatacagtaactcagcagtcacggatgaaatgattacttacagaagtatacttgtttccgtctgtacatggtttgcctatttcacttggtcacctctcgaacttacagcctctaccatttcttcactactaccttcagcaactcccatttccttcactttttcaagttgcctgaggagatctaacctctctggagcataggtggatgggatctacaaaataccagatgcacaatgtacataattaaatcatgccacaggggaaataatgaggggtcatacaaagttacgaaccatggaaggcacatatctctggatgaaagccaaaatagcagcatgcccaacagcagttacctgggaacattatgaacttgtttacaatgctgtatccatgaagatatttgcactgaacattaaagttcactaactaaaaaacatgactggttatctttagtcaatgtggatgaagtaaagaagacaggcttctgaaaccaaaattgaaataaacaacagtctgggcctagaaggctttatgcttgttcaggaggggtaaatcgaagtacaacaaatacttactggcagaagcatgagtattcctataggaacaacagaggctaaatctgtcagggttctttgaagagcctgcttttccttatgagttagttcatccccaataagagctcttcttaacaaacccatagcagctcctgtgtcaattgctaagagctgtgtcccttgcacaacagtctgtgtagggaaaaaaatagagaaaaaggaaataagttgcaggtctgcattctagacattttttttccctcaaatatggaggagagctgcattctggatttcagtaatggaagcattcaaatatgatgatgcgccctggtggcacaaaggcttcatggcaactaattaaattatgtagggccaataccaaatatattttcaagaaaatgtaaatggccttaccgtcgtggtttccttaaccttctctactgatttggtaataacattttctttcttgctagctggaccagaaggcattgatacaggagatgatgacacggaagaatccaatgtttcatttgcgacatatgtctcctggaaaatgacaaaacaataaataattcttcaaaattgaaaacggatgtgcatttatggtcaaaagcaatagtgagaatatcatatgaaacacataactcagaataaagtactctgtccagcattgttgcttaagtgctaactcaaataccaggtgcattcatgtcaacatttagaaagcatatattaagaagcatacctccttttgagcattatctgcgctcttttgaactcttttctctaactcaatcagctcacgtcttaactgttcaaaccggaggatatcatttgattgtgtgtctttgttatccacattagcgacagaaacctttatgagaaaaaaaaagaggtaaaatctgttaagtaagaacatggtgcaacaagatatctttgcatcaatggtgttgttctcaagaacagaatacatgcttccgcaactattatatactatacagagagactgttagtaagaataaatcactaatcattgatgatttttgtgatccccatcattgttaaatacaacacctaaaaaatttgctcgaaatataattgctaaaaggacagctcaaatattcattgcaagatggcagcttctattgttttaccctattgttgtttgaaaattattaaatgcacagtaatgcatgctacagaacgcatacattttgatctgaagtttgttggacaagctgaactctccttccagaaggcctaccaaagaggtcccaaattggacgacgtttgttctccactctggtgaaaaaaacaatagcggttattatccaccctgaaatcacagaaactacagcagaatgttacctgtttgctggtttttgtggtgttgagctctcattagcattgctagctgtctttccacggccttcctcgacagcaggagataatggtctgctactagcatcagcctaattgaccatcagaaaactttaggatagccatcatagtagtaatgaacagttgtaccaagtagaacatatggaacctctattatgttgactcacaaacatattaccaaaaaaaaatcattatcaaatattgggtgggaatcttagaaatatggtggttctacatggaatcaactaacttcgttgtgtaaaatgtcaaccatgttaatcagtggaaggagaactgacacacctttaaagtttaaacacagtaaacaaaacttaaacagtccacccaatgaaactactctcgggggagtagaagaacctaaattatatcaacagaatgtccctaaagaaataatatctcggttttaaatatctaaaatgtgcaacatatctacgtgaatgcatggccaactggagcgtcaggaggctgacgttgaaggagatgataccactttccacttgtgttatctttagttgttatcagtttatttgaagcggatgttatctttaggtaactagttggtacccacgctttgttgcgggataagtggataaatgcatgttattcattatagaaattatagattatagatgtacatgtttaaataatgtgaaaatgatgtggagataatgatttgacattacttgcatattgagttctaaaaatacaacaaaattgtaaatgatatgtcatgtttgcatgatatttaaaatactctagataataactgctagtgggtccacttgcatgtgatttaaaatactctggatgataattgctagtatgcgatgatgtggcacacttgcatgttgagctttaggagttagtgggcatcaactttatagtaaagataggattagttagtgaagctgttaggaatgtaactgttatactgtattagttagcacatgttaggaggtggtctaaataagccaagccatcattaaggactaaggagaaatatatttcaagacttcctactctcgtatatccctgcccttgtggtgatgttgtcagtcatcagctggttgcactgcttgggtccagggccatataatcagggcatgtgataatttggtgttggcgtcaaccaccacagctggtgcagaaagagtcagccctaccaggcaacaccaaagatcaacaaaaccaccatcagaacggctgcaactatcattcactttatcgctagcacaactactggctttgccatcaacttgcaagccccatggacgccaaaaaggcagccctgatgtggtttcaacacttcaccatccagcgacttccatgctgacaacatcaatgacttgaaaagcgctagccccatggggcatgccaatgaagactttttggcatgactgcaccacctgttgatcttgtgactgtagctggtagaggtgcagcaaccggccatggtagatacattgacaaccttcagaagcacagtctgtgtgatcttgacagcttggtgctctcacatgacaggatgcccacactgcaacctcttcaccgtggagatttcaaggggtgcaactggtcaccaccctgcaggttgaggacaaacagctagaaaggaagggtgaagttccatgatacacccattattggagatgtgatcaaggcaagaggccttacagccaatggaatgtcatgaacagcccaacaggagcttaggaagcatgaggcagctggatgcagaacatgtatagttggttaagataaggagataagatatgtggctcgttgcgtggttaatgctgccctatttaaaaatatatctggattttaatcagattaagcaagaaataatcataagtgtttggactaggtaatcatccatagcccatgtagtgtggcccctggtcatcagcatggttgtgttgcttgggtctagggccatctaatctatacatgtgacaattgttatttcagtcattgaggatgttgtttctattattgagaaatagctggcccttaatagccattgcagttattggaatgcactctcctgagtcctatgatggagaaattaaagtgtccacatacttgtagtaattccttttccagatgaaatgcaggctagtaaaaggttgtatgataattaagctcacctcaagaaattctgtttttgctcgaaaggaagcctcaagaaactcagcctctttcttcagccttctaatcatttcaagatcagaacatgcagcccttagatcctccttaccagagttggaactggagagatgcaattcttggagcaaatcttctaacttaaccaaagcttcctcaacactttcaagtgactgcaattattgagactaacttcataaattttcaccactacaatatatattcagaagtaattaaattagcatttgttcaaattgccattgtaaactgaaaacaagcatacacaactaagcacaaacataagtaagactgaccataagctttttggcaaatggcaagtctaattgagaacataaaaatgcatataacttaacagtccgaaaaatattttttttaaaaaaaaaacacatctaacatatgatcttgtacagttattaattgtaaacagatatacattaaatggatcaatccttcatctcttgcatatctcagaatacatctaatacatgtcacgctttgaatgtgtaagcatatcaaaaggagacggtggcatctccctgcatgtgcagccttgcatcgtaatgaatttgatgtctgagcttatagtgttatggccgggagttactatcagcatgaggcctgcaatgatgtttcgcatagtgccagcagtgcatcaagttgcttggagcttctttcacagtttacccttatccaacaaggctatttttcaccaaatattatatattctcattaggggctactcatgaaagcaatcttaacatcttattgtttgcttacagagaaataacataagtccactagtcatatttcttgtccacaccaatattctggcaacagccatgagaatataaggcctctcaccatccatcccaccctccaccccctcccaccacaccaaaacaaaaccccaaaacacacacatgcaccaccgcttccctctgaaactggcatataggttccatgaagaaactataatataattagcagtttagcactgatatcagcaacatcatcttggaacatgtcaaatgcacaataatttaactaactcctcacaaaaaataataatttaactaacagtactgagaattactattgttgggatgtgtgagaaccagaagaaatactagtaacgttaaagtgcatcatgtaacagataccttgtcaaaagaggctagctctgtcctagcaaccaagtgttctttggcttctggaaaggtttggtcttttggcatatcatacctgcatcagaatgagcagataaataataatattcttacaattgtacaaacatatacccaagtaacataacaaataacaatataaacatcagaattatatgtttactttgttaagtccagttccttcatgcaatcactcaacatggaatgcctacaaaaatttgaccatatattagaaacgttggttcgcatccatatctgcggcaaaatgtgagagagcatgactgaatttggatgtaccccttggacagaaatctggctgcctttacatttgaagggttctcaagccatgagctgtactttataaaactagtcatccaataagagcacacatttagcactcttgatattatttctcctttatgcacatcctctctaccttcaattgttgcagctggcacatcaccactgtaaaatggaagccactcgagctcttcgcaaactacctggaaggtgaaaaggtcataaaaacacaaaaaaggtgcatagcattgagagctcggtgtattgcctgcatactaacctccacatacagctgataagaactaatcgaagacaactgtggataatataacacactcccaccaataagatacctggatgattgtaagcttgttaaggtgagagctacatcataattacgcaagaaaacagttatactgtagcttatgtacagaaacataatttcatcgagcaaatggcaattcaaaattcgcatcattcacaccttacaatatcattgattgaatcatccagattggtaagatgattggaagacaaatatgtttgcgtacttctgcctaaagcaatgaaaaacccaaaaattgctaaatccttttccaaaacctgcagtaaggaaaatagttattttggaaggagaattcataaagctagacgaaatatcttttgttccaacctcaatactttcacttgttgtcaatcttgaccatatcttttcacgatcaagagcccgtagcaactgtttctgaaccagatcaatccaaaacgatatctcaacttcacgatcactggaaaacttagggtcagcagcacgaggaccaaaattgcaaaggaattctctctgaagaccaatatcttttgtcaaggtatatgctttacttagagggacaaattcaagaagcatatccatgaatcgaccaatgatatcagggaccatggaaaagaactgctgacaagaaacttttgttgatccaagctttgtgatagcagcaagacatgtcaaacctagcataagtagagaaaggtcactttcactagtattcatttgctggcgttcatggcatctgcaagcaacaaaagaaaaggtatccgttaatgtattagttcatttatcaaatgaagcccaacagaagtaaacaacttacattgctgttgcagagttaaaccgtggatcgttttcaaaagagttaacaaatgttctcacaaccaaaggattttgatcagatgagtaccactggtacaatgtaggttcccttttcgacagctcattttggatagcaccctctagagaactaagtaggcgggataaactgcaacagaaaattaaatatgattaaataggagaccaagaggcatgttctataatcacaaattgaactgttatgtacaacatagaggttagatctgatttggcttcatcatgctgtcaatactatgttcatgtaagcttgactattgaatccagtagaaggctcattctgggtcaacaaaaatgcaaatacagcagaaacctgtagactctagcagtaacttttttttcccatgaatcaagtggatcaattaatttgcatgctcttctgacagcatatgttttattgacattaaaacttaagaaatctaccagtcaagaaatggaggaatatatttctctaataattaggctatagatggaaagcaacttatgagacaggaattagctccaagaaaacttaatatacagaggaagctacataaaatgtacattacacaccatttgctctctaaggtattaaaaagcaaaattggctccaagatgatagatagttgtagtcttaaaaacacaccaggagaaaaaggataatgtcagcaattaggcatgataatcaaggcaagtgctagagggcagacctcctctgaacaaatacattgatatctctatctctgccatttcccctagatgaaacatcaataactgcttgcaacaatgaaccgacagcagcctgcaaacagattattttagataccagacaataaaaagtttgcatgccaccaaaattcagaacgcaacagctaatatttgttttactgaagatttatgtgtgagaactaataaacatcaactcaaagaaggttcaattgccgcgattggctctaagttgattaaaagactctgcatcttcatatatgaaaataatactccagacaccagagcagaacacttcctctggtggcagagtagcactactaatatcctaaaaggggtgaacaaaagctaaccaattaatagtttaccaagttcaacatacatattcatctatacaggcatccatatttcataagacctctatggatgatatcctgactacatcatcttttctttttctaaacaaaaaaagggaaacagtagggtgcatgcaataaaatctggcttacaaaatttcaatactagttttctgcgtggaaggccaaaagggaaaagtcaagagaaactatttaatcaatgacatgaataatggtcactatcattttatgggcagatatatgcctgaagaaagttcagtcctgtacctggtaagagagtggttttatccattcattgttatccacaccaagccattcctttggaaaccaagagttttttgatgatttgctgtgatctaagaaagccaattcaatagatcttgcagcatcatgtattgattggacaaggccagtgcttatatcctcgctttgtagtgctttaaccaatttcacccttatatcatccatctcgcttgccgaatcaacttgtggggatccgttaacagataaaccactgctatcatcttgagaagccaaaggaataagatggattgtccttctagttctctgaaatgctaccctctgtctcctaaattctagccatctagcactgtgaatgatcttctcacattctgatgctgaactcctgaaatagctctttctcttataaacacgtgtatgaaatttttgactcctcagatcaaccacacttctgcatactaatctgaatccatatactttctccagagtgtaaatcttcgatgtgctgcaaacacgttcaaccatttgatccattataataagaaacagcaagaaaaatattattaacttcactgtacaatgaaacctattccataatcaaaaccagtagcaaacaatttaagaaacgctggcaagctactgttttaggaataagcatccgccgtcaaattgccactgaaagcacaatacgggaaacacaccgtgtgcataactgcaagcctcaacagaacagaagaggaaactactagtagtaaagtatcccagttcaattggccatgtcaaagctccggccgtcaaaaccgcaatgctatcgccatcaccaaaacggcaacctacaacaccaaatttgacgaaatccctcggcggcgcacgcccccgaaccgaaatcgcacagataacttagtgagccagtgacgaattcaacgaccctactacctctacccctcccctccacaatccaagctcgcaaccagcgcattccaccgcaacccatccacccacgagctaaacggcaacgactaaaccagcgaatcggcccgcagcaccgcggccagaaggagagagaggagatgggggtgggggggggacccaacctggcaccgcacatggccgcgcgcggctgcgacccaaccgccgtcgccatcagcctccgcccccgccgccgccgccgccgccgttactgctcgccctcgccggcggtgggatcgatgcgcgcgcgtcgcgacaaagcgatgggccggaggcggagagggatagggtttataccgggagggaagtagcggtggggaagcgagcggccgcgaggacggaggaggaggaggaggaggaggtggaggagggcccccggaaacgataggctccgggagaggccaccggtgctcgtcacggggaccagaccatctctctctctccccaactttctctcgtctcggtttttcctcgcgcgtttttctttttttctttctttttttttcctccttcctcgtcgactggagtactggacatttcgcatttttctttttcttttttttttttgcctcgcaccactgctgtcgtgataaggccatttacggcgttgaaggaagaaaaagaacaacacgtcataccgttgagctgcattcaaacctgactagctttgacatttttgttttatgtttagtttaaaattaactctttgaatcaagccggtagaatattaccttagtcaaatttgaacaactaacaagcttgttttttgctgggtctactcaagagagtgttaaagtcaaaaaaaaaattactcaagagtgtgctctgtgtttgtgtgaactagttcacatgctaaaattttagcacagaaaagaactgcagatataatggcatggcagattggcaggcatcacaatttgctgaaagaacactacattgtcactttgtacaccacgctcaaatagatgtccccacaaccgaaaatgaaacttatgcccaaataaaagaatcaaaactaagagaaagcatatccgttctttcaagagaactgattgaacatggtaggtacgtattcaggccacgtaatagagtgggcattatcatcaaacgacgatatgaaaccattagtaagttagtaagatgtttgcatatggtacatgtatgcattaagtgctaatagcattgcactttgtagctacagatacactaaacctatagagaaccatcttaaacacatatattccacctcaaacacataaatacacacacatacatataaaacaaaatatatgcatccctcaaaaaacattacaaacatcaaacatattacatactttaggcgtaaatgcttgggagaggtgcataaacatgcatcatatattttggataacggaagatcaaggagcgtaaaaacttttggcaggatgacaagtgcaaaaaactggagatacataaaaccaaaactggagcacgacgagtgcgcttaaaatcaaattcgtggattatattccaccgccttaagaaaaatgaatatagttaatctcctggagtttactcttgctcgctagcactgtcaatctgatcttgctccttttttatgccgccatcagccaaggtgcttgtattaccactaggccgggttccataaacatgccccatctttaatctctttgtttccatgtaacgccgattctcattggttattggtgtcaacagtggcactctgcccaagacactcaaaccatagcccttcagtccagtatatttcgcaggattgttagtcataagcctcatggttcggacaccaagatctcgtagtatctgcagagagaaaaacagcaatgagcggaatctggaacagcgtgaacaggaacgctatgtcacaggttcattttcaatagttcaggagtacagacaatttatatatacctgtgcaccaataccgtactctcgtgaatcaaccggcagacctagatcctcattagcctcaacagtatcccgcccatcgtcctgcaaattgtatgcacgaagcttgtgacccaaaccaatgcccctaccttcatgtccacgaaggtaaactactacacccctgccagtcttctcaatcatggtcattgccagggcaagttgattcccacaatcacacctggctgatccaaatatatctccagttaggcactccgaatgcactcgcactaagatatcctggccatcaccaacatcaccctgcatacaagggaaaaatatatattctaggttcaacttcttcctggatgagaaagtctggtagagcttataacttaaatacaataaaagaaaccgttgcttcactactttctaacaatcattgcagatgaaccatgtcctgggtatcactgaatcattagttgcgatccagtctgactaatgtaacaggcaaagatatcttgttatactgtaatttgttcaggattttgtacatgtgattctacttttctatataatgcataagggcatggattttacttttttttatttaaaaaaagtaaacgctctcctaaaagtagacattgtatcaaagtacttaacatagtctttgttgagggatgcttaccttgaccatagcaatgtgctccatcccatcaataagagatcggtagcaataagattgaaatgatccccattgtaattgtaaaggtgtaacacaaacacgttctaccaatctgtctctcttcctcctatacctgcataagaaaattattagtagctgatatatatagtagccggaaagttccacaaaacaataatccatgtattataatttataattcatatcttccacaaatatagttttacatgtatatatatcaactgtgctttgcattcctgtaagaaaacatttgcttgaaatgtggttatgaagtacaatagaaaaaatgacctgttctcccgttactacttatcatgaaaccattagcccttctgtaaataataattactcttaaattttgtacttcaatgcagcatgtatgattcttatggaaaaaaggattgacacttgaatatattaaataaagcaaacctaatcaagtccgcaattgaaattatcttcaggttctcccttcttgcaaaatcttggagttttggcaataaagccatggatccatcgtcatcatcaacaatttcacaaagaacagcagcaggaggtaacccagccaacatggcaaggtcaactgatgcttcagtatgcccagcccttttcagcacacctccttctctatatttaagaggaaaaatatgtcctggcctgttgaagtcttcaggcttagaattaggagatgcaagtgctaagactgtatttgcccgatccttagctgaaacccctgttgttgtgccttctttagcatcctacaatacaaatatttagcacagacagattagaaaaacagggcataagcaatatgctctcatagaaggcaaaaactggggaaaaaaagtacatccatacacaacaagcaaaggagataggaatgataagacactcgattatgtccatcttttgcacaaaatagtcatggacataacatagttttttaaaaggaatacatacacgcatcaaagtgatttcaatcaaaaggtgacccttttagctcattctaaccaaagtggttaacagaccccaatggttctctttcttgttaacacaagttaccatatatgtaaaatgatcttgtgctacaaaaagcaataacagcgaatgaaaatacataccactgaaacagtgaaggcagtccgcagcttctcttcattttcctttgttgtcaccataagaggaagttctagtctttccaggtcatcttctttcatgctgacacatacaatgcctgtcccatgcctcactatgaaagccatagcctcaggtgtcacctttgatgctgccattataagatctccttcattctctctatcttcatcgtccacaacaatcacatactgcaatataaacactgtcaacagatgaaggaactacttcaaaaacctaattaatgctagaaaacatgatattttttaataagatccatacttttccttggcgaatatcctcaatagcttcaggaatggatgagaaaccctcagttgggctgtctaggtcaagctcgtcatcatcagcagaaaaaccatcaacaacaggtgccatatcagcagctatggtcccaagtgcagcagcatctgcttgaaccactttagaaggactagcctgtccatttataataacatgttctgaagaatcacccacagcatgagatatatgaaaatttctggcccgatggttatacggcaagtgaacagaactgattgtcctcaaactgtttgatgtagaatttggcataattgaacgatcagaccgcaatccagaagtcctgtgttggctgtaaatgctgctcagccgtgacatgagatttgcagtacaggaatccatctgaggaaaaaaatcagaactatgaaacaagttaggaataaaaatattcaaataatatacccaaaggatgtgatggaaaaaggaattcaaattatttcagtaacgttacagagattttctatgttactaccgcagtaccgccttgtgcaggggagaatctcactttcctcaaaaggaaatttagaataagtatctagtgcctattgattaccagaaatgcggaataaacccttgaaaacaacaatccatctcctaaataaaccaagtcatctagaatctagagtaaagctaaacacagcaaaatcgcataacaaacaccctcaaaaactccaggggcggacctaaagtaccgcatgagattcagctgaaccctcgaattcttttggaaacaaattgctatctattattactgcacctcgcacgcgtccaagtaatagaatggggaagaaaccggatgggtttgattgaacggaaacgaatcgaacaatcaactaaatccggacgagctctacaccaagccggctcatgacgtggcgctgagagagagaagaacgatttaccttcgattccgttctaactcagatggatggccggccgcgtctacccctggcctttacctgatcacccggctgtgcgcgcgcgcagccaggtaaggcggccgcgcacgccgtgcctccggagtccggacctgttcgccgggagcgggaggaggctggccgtgcctccgccgggaggaaggagagtgacagagcggtggcgtttggataaagagggtggtggaaggtggaacagggaagatacgagagtggttcgggtgctttgttcgttcgggagaagacgagacgagacgagccgcgcgggtggggatggcactatagggcaagtctgcaacgtcgacaggtaggtggcggcgtggcacagtgtaccgatgtaaggaaaagaaaaactaatggaaaggtgcaccggaggtcctgatcttgtcaccgagatacgaaaacgtcatcgaaccgcaaaaccagatatacggggttccttagctatatgaaaccggtcacccgaggtccttcgatggtttgaccccggttttagtgtacgtggcggctgagtcagcgtgggccccacatgttagcatgccacgtaaacaccatctctctccctctcttttctccacattttttttcactgacgtggcaaatgtctaggcccactcgtcaggtatggtgcgtgcaagaggtgcctccgccgccgtcgggagtaggaggttggccgtcgccagtctcagactcacagccctcaccatgctcgcgcgtggagacgccggagatctcagtggaggcggtgaagatgaagactcgttgtttccccaacctcatcgccgccgccgacagaggcacgggtctagaaaggggcggcctacctcagcgaatcagtcgcgcgcgttgctggtgaggccgacatggacccttggcgcatgctgccgcccgcgacgagctcgccgagatgccgcccgatccgtcgcctatcacgctcgtcaacagcgccgagcggatctggaggaagagagatgggagagggcaggatgtgacttcaccgccgcccatctcttatccttctctctccgccgccagctgctgctccagccgcatcttggaggcagaaacagctggtccttgagcacggtgcgcgcgggaggccggtgccgcagcggggagctcggcgtcggcgtcggcgttagcttgtcggtggcggcgaggcgcggggttactgcgtcggcgtcggcttgtcggtggcgacgaggcgcggggttactgcgtcggcgtcggcttgtcggtggcgacgaggcgcggggttactgcgtcggcgtcggcttgtcggtggcgacgaggcgcggggttactgcgtcggcgtcggcttgtcggtggcaacgaggcgcagggaggccggcctcggcgtcgccctgtcggaggcggaggcggcaggtccttgagcacggcgcgtggcgaccagcattttctcgacctgcgccgtcctcctctccacatcccccaccgccgcagccttggccggtgcaagaatctgacccggcctgctcccgtgtcgcagccgccgccaccgccacctcgtcgccccggcgatctcctccccaaccgccggccggcttgcaggagaaaaagtgaagagagagaaagagaggagaaagggagaggaggggagagagagagagggagtgatgacatggcatgctgacatgtgggtcccatgctgactcagccgccacgtataccaaaaccggggttaaaactaccaaaggacctcgggtgactggttttgtatagttaggagactctgtatatctggttttgcggtttgaggacgttttcgtatctcggtgacaagtgcaaggacctccggtgcactttttccaaaactaatacactattatgtccatcaacccatcggacgtgggctccaagcccagaacagagagctagtttgtccagtggaagcccaaatgtattgaccttaggcctaataagagttcataatgacactgaaggtgtgttcactttgttgcaaaatgaaacttgccaatgttttgtaatgctgaagcaaaggttagatggtggtagcagtgaaatattctaaatcaacaaaatttggtagggttgtgttgttgattgtcttgccaaaattttttatgaggttaaaaatgacaaaaagtgaacacatcttgaattttagagtgaattttagaaaaccccatgttttaggaccaatgtaacacataaccacaggttctatttattttctcacataacccaatgcattctatccaattaacacaacaccacagatttaaatatgggaaagtaccacaatgacaagtgacatggcagacctgctccacatcagctggccccacctgccagatcaatgcgtgagctatttagggctgggaagcacccatcctctgttcccgcgcacgcgacgacgcacccctcgtcttcctcgtgctcgctgcggcagttttcctcctgttacaagttcagaggggcagctcgtcgtgcacatgcaaaggcaagcatcgcctgttctgttttgcatcaactgatcaaactgtacatatacttcctatcttctaattatacaaagcttgtgtgtgtgtttgattaaacatggccaggacctgacaatgtttctgctcgagttttttgtaagtaggtcgatcaccaaggtgcctgacactgtgttcctatgaaaaaaaaatgaaaggaaaaaaactgacaatttctatgcattaagcagaacaatggagcaaacgttataaaaacattccatgtctgaataaaagcaccatagcaacagttaatatgtgacccattgcaggtccaaggcataagaaatttgcaaaacgaatccatatctgaaatatatacattgtgaagcagagaaaaatacaacctatttgccgagaaaaaaaaaagaggaagccatgtctgctcttttgtgaagcagaaaaaaatgttgcaggcctttaaatgttaattatggttagttttatatctgactgcaatataatagttgtaatagaatagtcttatacacggtccaatctacatgctttttttatttgaaaaattatggtccaatgatgaaaagcaattttgcaatgacaaacagaagaacgattgcaaagttgtaatgccctaacaataatgggttcccctaaattacattttactagccctaatttcttgacaagccaaacatgatcaaatggctggatttaattcctcgtcaaagaaccatgaagcagagtgtccttgcaaatcaccaaccaacatgctttggagtcaattcatatgatcatcacaagaaaagagatgaatgttacctgctaggaatgatacctaacgagttctcttcctccagctaggtcaacatcaccatcatcaccggaggccatcatgcaagagatggttggggaacgtcgccaccgcctgcgtacgcaagaaagacggaggtgccgcgttgtgtgcgtaggaacagggaacacacgcttctgttctcccgcgtgatcccaccataataggccacatattgacctggcaggtggggccagctgatgtggagcaagtttgccatgtcacttgcccttgtggcactttctctcactaaaacctatggtattatgttaattggattgaatgcacggggttatgtgagaaaataaacgaaacctgtggttatgtgttacattagcctcaaaacgtggggttttctgaaattcactctggattttaatatcctagagaaaatttggaggtaaaagttacctaatattagagactagtagttgctaaaatatcaaggatttcttaatagaacacctaaaatatcaaggagctcccaagtgaagcaagaaaactctaaagtttttttatgctttgtttggcataaacctatatccattcatcccaaggatgggttaggattgcagtcaatttgccagcccatcccgagagataggctcatactataattgaagattatctgggtgagtgaattaaggataaattacttactctaccattgttacgcaagcgtaactgcgcacgactgcaatttttaaagtaggagcgacaataacgatcatctggagtgtcagccacacaatccttatcagacgacagagctactgccacggcacatcacgccatatcctcgcacacggtcatccccaactcacgactatgactcactgccatccggtcccacgccgatcccgaagcaacaaaaccgtggcctgtgaacagaaaagcatcatatcccaccaaaaaaagaaaaatacacgcaaaaaaacatcgaccactgtcaccgccaactgtacacagagaagatgacaatacggccctacctttacacgcgagcaatgggccccacctgtcagtagaaccctggtgacctacgtctccccggatataaacaaacaaaataaatcctacccgtagctctctctccgcacgcagcaaccaccactcccc

SEQ ID NO: 7896 - DNA, 14257 bp, Oryza sativa
ttttttctttcttttctatgtggtatataagggtagaatggtcatttcattcataccgttgcatgtgaggatgacttggcatgctcacgtgacactttttgtgggtctaaggactatattaacccaaatgattaatttggaggacttgtttggacgatttgaaacttcaaggactaaactgagcccaaagagaaacttcagggaccatattagctattcaccctaaaagatttatctcgcaaattagtcacaatttgtaccattaattatttttagcttatatttaatacttatatacgtattaaaagttggatgcgacaggccgaaaaactttggggtggtatttaaacagggctagcgaaagatcggtttgactgctcctagcggctctctctctctctctctctctcccctcttttttaagcagccgcctttccccggcggccggcggccggcgacgccatgctccacctccggcagtgcctcctcccgctgctccgcgccgccgccgccgcccatccccacacctccgccgcatcctcctcctctctccacctcagccgccgcctcttctccaccgccgccgggcccgacaccgcgccccccttctccgtcgaggagtacctcgtcgccacctgcggcctcacgggcgcccaggcgctcaaagcgtccaagaagctctcccacctcaggtcgcccgccaagcccgacgccgtgctcgccgtcctctccggcgtcggcctctcccgcgccgacctcgccgccgtggtcgccgccgacccgatgctgctctgcgccagggcgcgcaacgtcgcccgccggctgcattcgctccgcgaccgcgtcggtctgtccgatgccgacgtcgcccgtttcctcctcgccggcggcgcaatgggcctccgcaaatgcgacatcgccccgaggctcgagttctggatcggcttcgtcggatcgttcgacaagctcctaccggcactgaaggggaacaacggaatcctcatgagtgacctggacaaggtcgtgaagccgaacatcgcgctgctccaggagtgcgggctaagtgtttgtgaaattgccaagctgtctacgctcaagtggacggtgctgtcgttgagtccagagcgagtcaaggcgtcggtgctgtgcgtcgagaagttggtcgtgccccgctcctcggatcggttcaagcacgtgctcaagtccgcctgttggatctccgaagatatgctcgccatgaaaatggagttcttgaggagcactcttggttgctccgaggacaagctccgtgccgcggtctgcatttcgccacatattttctacctgtccgacaagaacctttgccgaaagatagacttcctgatctccgaggttggcttggagcgtgagttcattgtggaaaggccttgggtgctcggctacagcctcgagaagcgtatggtgccacggcattctgtcatgaagatcctgaggaccatgggattgatgaaggatgctgttgacttcagcagttcacttgtttactctgagaaaaaattcgttgcaagatacattgatccttacaagcaagcagctcccacgctcgcagattcctacgctgctgcttgtgccgggaaaatgcctgctcatgttcaccgttgaatgtagattttcccaggttcgtcctttatctgatgctaattgctagcattgtgccttatgttgttatgctcatcactaaatgtttattcatggcaaattaaatattggcttttatccgtagaactaatggtcatccggagtactcataatgtgatcttctctttatgtttcaatcttggatatctgtatctcatgttatgttgctttcttttacttgagaagcagcgattgagcagtatcattaatatatgtaactcttctagcattttctgcttcctaaggatgtgccctgtttttaatcagatattggctttccttattgtgattatctgcacggttgtgggcttttggcatgggtaatttatatagggatgggacattccatcagactatcatgtagagctggtatttaccgaatcatcatataaagctggtagctaaacataaattaaatatttatgcttgatgacaaactgatgtagtgctgtacagattttgaaaggctaggagctaagaatgactaatgttgctaacttgctatcaacaacaacgtgggaatcctttaacctgttgagtcttgtaatatcattcctcaaaatattccttctgttacaattttgtcctaattactacaggtgggggattattttcgtgtttattttcctccaaagacccaatttgaaaattcagttattagttgatggccccttctgttggtggcaatgtggaaataacacttccaatattatatttgaaaaacccattcttggtggcaatgtggaaataacacttccagtattatatttgttccattatctacttttcttctgttgaactgttaattgcttaaactctcttttacattatttctctaatccaatgtggtcttaatagtttccattgttcatctctaatctttttggaaacatgaaaagaatcgatcaaactaaatatatagtaatggtcagttaagtgaatataaacatgtggcaagctgtttgaacgaggtaactcattcatccatttcaagatgctttcaaggaacctcaagatacttggctgacattataacttttcatcgacattgtttgtaccttctttttgtgcgtgtattttgttgtgagatgattttttttgaattgttcataaccatttagataacatacaggaaacgagtgcatgtgcacttaagttataaattgacttcccccttggtttttttttctatacatgtagcattatacatcttgtttcttcaggttgctgctaatatcttgtgctgttttttgaggcgggctacagaggaggcaagcttgtaggtataccttatcgtatgtgttacacaaatttaggctgttctcattcgaaggttggttatctgttgcatgaactgcagaaaccttccaagatgaccaagcatgtaacatttgatcgttttgctacctaggatgcatgtttgatgataaatatgatagcaagttccttgatcaagaaaagaaaaacaacaagaagaaagcaagttggggggccatgcatcaactgttgtggtgaaatgatgttcctgtatttttctccccattatctgataagtaaagagtataataaaaaaaaattgtgatggaagatttgacaatctgtctgaaatcttggtgtgaaatattcatgggctccaaattcaaccttggaataccattacgtttttcctaaaatcaggttatcagattttcgaaatgtctgagttgatgtggatttttttaattcatattaatattaggcaactatgtgatagcataatgcaataaaaaatataatttgaaacaactgtaatggagacattttgaagatgtcgctgtgtaaagccccaacgataaagttattgttgcacgtaaaaccaacaacttttcagttcatgatatatgaaaattattcgcctcaaaactgtgggttggcagaatatagaacacattgttaaaacactactgtaactgtttgtcaacgttcaacaatctctcaaaattttcaaattgaagtacaaatttatgaggaaagagtgtgcagatcccactccttccaaaaaataaaaaataaaaacaccccgctctagaaaagacaatgaaaaacaggcataaacaaatatgcgaacgtatgggccgtatttgcacaacttacagggctagtttgatttggagccaatttaacgtatgggccgtatttgcacaacttacagggctagtttgatttggagccaatttttgccctaccaaaatcttggtagcgctaaaacattagcaaattttggcactaccaaattgggtagtattcaatttgaactattgtgagtaaaatttggtagcaaaccaaaatatgcacttgctactccctttatcctataatataagatatggtcaaacgtgacatggtctccaaaactaatttttatcttataatttcttatatattataagttttgtagtaaaaaagttataatcatatgaaagtaaattcaaatgtcaattcaatgatataattcttagcaagtaaaattaaattcatattgtaataaatgttggtcaaaatgtttttaaggttaaatcttaaaattcatggtagcattatattttgggatggagagagtactattgaagttaccaaatttttttttgggagagtaataaattggtatcaaaccaatcaagcccatagttttgctttactgcgataatctaaaatgttgcgtcatggccaatttgatgaatttatacaggaaataaaactttccgtcaaactatgatgttcacctgttgtttgccaaatcattgtgtaaagtcaatagctaaacataaaccaaagttttatacttggtacctgatgttgcgctgctggagattttctgaggctaggaactaagaatgatagtgtcccccataaacagcaacctggggatcttttaattatcacctttttgacatgtattaaataaatcaaggaacatagcaggaagataccctttactaacctactatggagtcttgtagtatcaccctcacgaaaaggggagctaataagcgcacgattcttgatgccttatttgatattctgatgatgcatggatttcttacattcagatcgctctttccgttggtgtccttgtacgtaccatgtcgatttccttgctttgtgggacgctttctccacgacattcttgcatccaggaataccagatgtgccctccttggtagccttctagtttagggcagtacactgccaagtcggcttatgatgctctctttcaggggcaacttattttaggtccttgcctccttggggatgcatttggaaaagctgggctcctggaatgtgtagtttcttcatgttgctatgttgtgcaccgcggatcgtttggaacattgaggttttccgcatcctgattgttgactttaattattttagataatggatttttattaatccggtctctgtatccatggacatacataacaaaaaaaatataagagcacttagactcacacctcgataatgaggagaacacataactaaaaaaaataaaaacctacgacctcggcacatccctgctacccgacattctctcctgaaacgactagattcggagagtggaagttgtctagtcaccgtcgtgctgcccctaatccgtcgtcgttgtgaacctccgctagtaccatcttcatccactttaggcgagctgacgtcacacgccgctggttagcccaccttcatatatcgtcgtctagtcagaactagccgaccagacatgagccgccgggatccacttccgtttcgtgggattcctaggcctctgttgcctatagggccaccgtcatcgttgggatcctctttcgcctcccaaactcccagtccgttgtcacccctagggccaccgccaccgccagggtccacatttcttggaaaaaaaactcagtcctctgccgcccacactcccagtcgtttaatgtaatcattttgtaaacaaaaatctaataaaagctcttacaacaaaaatctcgaaacattaaatgtaatcaattggtagttacagaaaaaccaacatgcaatccaactgtgccacgttactgtaagtaaaagaaattttgtaaacaattattttattacttgcatcattttcctatttgcactgaggtggtgtttagatccaggaacttaactttagtccctgtctttagacactaatttagagtattaaatatagactacataaaactaattacataaatgaaagctaattcacgagacaaattttttaagcctaattaatccataattagagaatgtttactgtagcatcacataggctaatcatggattagttaggctcaatagattcgtctcgcgaattagtccaagattatggatgggttttattaatagtctacgtttaatatttataattaatattcaaacatccgatgtgataggaacttaaaagttttagtccaatctaaacagggcctgaaggttgaattcacaactgctttcgaagttgcagatgacaactagtagtcttgaatgtggatgtcaatttatttttctcaacccgacagaacagctgaactgctacatgattttacagctagtgtagctaaggttagttcaccaaacaatatggccactatcatccacacttttgctttttacctttttactggtacaaatcacaaacatatcacacaactttttctttctttctttgtacatttgtttcgaaaaaaattagtacaggctagcgcaacaacaggaccaacggatcctattctcttcaggtgatgaacagcaacaatttcgatcaggataacctgtaaaatcaatatacaaccatatccaatgttttctgtaccaattcggcgaaaggaaccgggcactctttcgccgggttgcaaagaattcgatttcagcagccaatgtcgaattcattctgctcggatgaaaggagaggagctcatttccgtggtgctgtagaacgagtcttccccgccgccatacaagttctcctctttctcatcctcccaccggaggatctccctcacgtacttgaacgcctcgtcgaccgtctggcggtcacgggcacgcgcctgccacacgaagagcttccggcccgtgtgctcgtagtacaggtccttgaacttcaccgctacgtagtagtacgcctgctgggcgagcgactggttgttgtggtgtgtccgcaccggggagaagtcgttgaaccactcgcaggtcgttagaggtgcgcggttgatcttctcctcaaagaggtcatacttgttgagtaccaggacgaaaggagtatcgcagaagcatggttgcctgattgtcaaacagcagggaatatttaattaaaaactagctgactagttcaacagaatccattcgagaacagtttcccatttaattattgcattacccacaacattattgccacatcgttcttgactcagttactatatccgaaatcatggagttgaaataaacttaattgttgtactagttctagaaaaacttgattatgatactggaattattacttcatccagtatttgtgaggttaagaattgccagatgcaggagtggagaaaagacaaactgtactatagagaaatgtaccctaaaagttcttagttttcaatgaaaaatagcagcttaccgaatcgtagcctcaaataactctttgctttgcatcatcttgttcaagagaggccgactgctgccatatacaggaggtcccacttggtcatagtcactgagggctacagagaatatcaccatgcggacatcctcaaacatttccacccacttgcagccatcattcatgcccttggcacttactctaatcaactgatatctgaggagcaaaacatataagaacattaagtgcacatggctgagatcgatttgcacatggcatgaagttaagagattacttggtaagaggctgggaatgtgcttcagggttctcaatgtaaggctcagacatgggactgcgatcatcaagggcgaattcaatgaaagccaacccattcccttgtgttacaccttcagcaaagatcacatctttctctgaaggttcatactcattgctcgatacctcaatggcctgcaaaggtattccatgtataggagaagtcagttgaacagcttgaaataaaaataaagttaactgcacatgacaaaaagtagttttgccaacatcaaaacagcaacaatgaagaataacacgtaatactgcaagataatggggggaacataattttggtttcagtaatatttgaaactggggaagggatttccttcctagcttcaaaaaacaacaaagcaaggagataagcaatccttgaaatattcaaagatggcatcaccagaaagaatagatacagttttctggatgagccaagctgttaccattgtaaataaataaagaagacaagcatatgttctggactagtaatcttttttgtaacaaatagtggtaatcaaacaaatatacttcaatgtgaataatgaagcaccatctctagcaacagtggattatattaataaaaaaaatcaaagatcgtaccctgctcaagaagtactcagcaacatcaggaaggaaatgcaattcgtcctttcttttatatgttgcttgtatggcaggatccttccacatctcatcaacaaatggagcgtattctcgcgttgcggcagggaagaaagcatctagatcgcccatcgctatgatatccaaaagccaatctgagaatttcttcagccttggatttatcgagtatatacaggaatttgaaccatttgctttattttcatctgcagcccagaaaccagttcagcaatacagaattgctgcagaaacaaacaccggagcaaatgaattgaccattttaccttgttgggtttcttcatcctctgaaattgtgcaatttgatctagataaagcttcttcctcaaagcgttcacgaccctcaagcaaaattccaaggtacttgaacatattgctttggataatcagtttgatgttttcaagttcttcttgggtgaatcttgtcccgtacaagtacttagcctggtacatgatacccaaaacatcatcagcatgaccatacaagaattagtatcttagaaaaattgcaggcactactaccaggtagatacaacaaaactactactgagagtcgataatgatgtgtcagaaatcaataaaaacttccaagttttatgctaagaacacaagtccggtggctattggctacaacataaaaacaactcatgccatctctgctctgtgggaagtatctgaagcacacaaacataggtcgccagctacaattaattgatttctacatcgctcaaaagtattactacataacaaagtaatctcatacagatccagttacagtgaattacagagagatagagaccaatcaaatagcaatgaaaatcataagagacctgtttaaaaattgtgcttgtaccagcaccatctggtccaagaagcagcagcttttggattcttttctggtccaaataatcaggaacagttcttgcagaatagtgaacttcatctctcgtttcattagagttcccaggaggcaccggaagtgaaaataatgcgcatgcaaaacgtgtcaaagcctgggaataaaatgatcattagcaacaagcaaatttagcttttaagtttgaggaaatggcaacggactctaatttattttttaaccgagatacataccgactcccagatttttcctttgatgttgttctgtccttcttcctcatagcgaccatcatcataaacccaaaaatgagtatcacgaggacattgaacatttgcaacctacaagcacaattccaatgatgtgacaagcattgcttattttgtggtaaaagaaatctttaaatcttggccattgattcaagggcccagtttagctaaaagaaagcattcaccactagtgccatttagtagcccttgctaacaggaacttctggtcgatgaactaaatagcctgatgtgtaatccttttccattatctaacaaataatagcatgctatctggaatgacaaacccactgcatttagtgaaacttcctaatttgtctaagctgtgaaaaggattacatttagtgaaacttacaaataatagtaagcatgaaaggtgagacttttctcaaaaacgaaggttatggttataccaaaagtgaccattttttgcatatttatagtataattaattggcaagttatgttacagttaatggttgggtatttttattttgaatatttcaaattatataaaataccccttccaagtgtagtggttcatgacctatataaataactgtgtcaaaggtactaagcaattgggaggcactaattttatcattcatgcttttcaccaaaaggactatctacaagcagcttggaagaataaagcatgatcggctaatagcgagaagcagttctaaagaaacagagatggaaatcattggtacctttagaattttcagctcaatctttgttatttcccttccatttatataaacttgggtatttccgttactggcgttagcctgaagcttcccagtaaagctgaggttagaactaataattctttccggtttttctccttcctatcagaacaaaacagttttatcagcacaaaatcctgttaaacttataacaagaaaattgtgtccgtatgctcataatgaatttacctttccccataaacctgactccttgtcataccaatactttccaggcttcagcttctgaggtggccgggagcaactaagcaggtctgtcagctcatctggccccagtggacaaccattcacaataagttgctccggccgaagctggtttgcttggcactccttctcggctttcaatatttgccttacttccaaggggctaagtaaccttgagagtgtccttgagttcttccctagctttgaccgcttggactcatcaattggctggccaatgcaagtgacgcacttgcgcccttccggcatcgaccccatcatcctcagcacacagtagccgcagtacctcgcatcgcacacgatgcacgcttccttgctctcccatttcctcttcccacaccgatagcacgccctcctcctcttctccttcttggtcaccaccacgtactgctcggacatctcctcgaactccttgctctcacacttgctgtccggcgtgaacccgaacgtcaccgtggcgcctctcctcccctcctgcgtccggcggctcctatcctgcggccccggcgagctctgcgctgaatcatgcgacaacgagcgggaatcatcatcatcatcgtcaaactcctcattctgcagtaccgaattgaccgaatccgagctgccgccgccgacctgcgccgacacgggctcggcgcaccgggcaatccgggacactgggagcgggatgggctccacaaccggcaaccctcctccgttcccaagcctctgcgggccggacaccggctccgccgtggggatctcgacggggtccaccctaggtaggtcataggccaccggtgggccgtcgtactctagggctatggagtaatcgagattcggcggcgcctccgggatgggggaccccggcgggaggatcctcctcagcatgtcctcccagctgcccccatccaccgcctccgccatagctgattgatagctcctagtactgcctcgttgagggatggagagctgacaaggttgaatctttccggaggggaagcgaatcgggggaatcaaaatccaatctttccaccaccaaactgaccttttcagagaggagaagaaagctcatttcacggtaatccaaacccgcggctgcgaaatgagggcggcggagggtggatctggaggaggaggaggaagaagggaagaagggagaagaggagaggagaacgtggaggtagcaggagaggagagcagttagcagtatgcctagttgcctaccaaaacccactttaccaaaacagcagtaaaaatttcacctttttttttgtttgtttgttcctagtactaaccaaattaacctgagttgatggattgattgatcaaagctgttgttgtatataaaagggagatatgagaccatgagacgaagggagggctcgctattagagcgagtataataagatgatgtaacaacggggagctaggagttagagttactatattgttaaatttgtttttaggctgtgtttagattggcccaaagtttagaatttggttgaaattggagacgatatgattgaaaagttgtatatgtatgaaaggtttgatgtgatagaaagttggaagtttggaaaaaaaaactttggaactaaacatacccttaatggtgtaactgcgacgataactttattatgagtttatgataggggtgtcttttcaggtacggtgagtaaaaatggttagattagattttcagtttagatgacagcgtgagagagtagataagcggtgagttagaaggattacaatgagaacaaaaaatctagcaaaatgagtgggggcgatagatgatgagtatggtcggtgataaggacaagagagacaatatggttaggagcacgggatggcgtggcggatccgattacgtaagccatctaaggcaaggcgagataaaactcactaaagttgataaaaaggatggtgatgacaacatagaggagaatgaaaaggagagtaaagggagaaaggcagagaagggtgtagttagaggggtacaccaatgctgacgtgtggaggtaaagtttttcgtcatgataccgttagagcaaatgatgtcatgagatgggatcaagaagagggaacgataggctaggcataggtggttgcactagcacacaacttgataacaacataatttgagcatttttaaataacaaatagattattataaatcaagaaattagcaataaataaacatgtaatattttattcatattttgtcacataatttaacatgtatctaaaacatctctagaatggttgtcgtgttaggttgatgaacgtaacttatttatttgttaacatgcaaaatattgtagggaatttattttcagatatgctaaccgtcataaaagaaatttagaaatttaccatatatatttaaaaatcaattcatttcaagatttgtgtttggatcttcttatgcaactttattgacgttatcgactaaagatctcattgcgttaagtctttgccaagttaatgtagaaaaacagaagagggtcacaaaccttaagggtagatgttggtatgaggtggtgattgttggtttcaggatatcacaacctcctctataattgtaggaaagaatggtctattaaaacgatagagaagaagcattgctccttgttgatgccgatggtgacactggtaaggagctcgatggtggtaagtagagagagggaggtgttgtgtggagggtttagtattgatttataaactatccctaaagaaattatcttctgagtattagatgtaatacgtaaagggtgtatcaaaattttctgcatagaaggaagagcaacaaataaagatggcaagaatgacaaccatgttcgatgagccaatagtcggtttcaaggtaaccactaactattgttgtggtaatggcaattgtatctattttatcatattagattagcttctgtaaatgaattgttgtgctgacacaccagtattaattataatggacgtgttaaattattcatataagacacgtaaactttccaaatacatctgtcaccacacatgaaaataacaaaagaaatcgaatatctaatggacaattaagtactaatagataagaagaaatatttgaagactaaaaaaaatgctcgtgcgttacaatgggtaaatgctattttaattttattattgttatacggtctcgctagggtaaaattcattgtgggaattctcttgaatattttttttagaaaatcatgagctgcaattaggagtctgtatttcatctcaagttagcatgagtttttttaaaagagatttcttatacggctccttttgtatttccaaaagcaaacaagcttaaaatccaactcaaacacggatatgtatttgtaaaagcgaataaacttaaaaactaactcaaacacagatgacgtactaaaataccgataaaaacatcttcaatttttgtaacggtagaaacacagacaacgtactaaaataccgataaaaacatcttcaatttttgtaacggtagagaagagatatggtgtgtagtaaaccaaacttgcaaggaaccatgaaacactgttccaactcataaggagcacggtcagagaaggttattgggccaggccagcaaaaattaggcccatcgtccgatcgagctgggagctgggcctatgcgcccacactgcatgcaagtccccaaatgggcctgatttttcactgctacttccaagcttaaggtcaaagtagagattgttttctttttatagttattttttaaaagatttaaaaaataaattaccgttttaaagtttagcaaaaaatatactcctcccacccta

SEQ ID NO: 7897 - DNA, 15490 bp, Oryza sativa
ttcctggaatgatccggtaggggtatttttatttcccttggcctccccacacactagtagggaaacaattaaacggtagggaacatggagatttttagtagtgtacaaaatcagtgatgatagtgtcaataacaatctcatctcgcagcatcttctcaatgcacagaggagcctatcagacttggtaccatagtatatatattttggaggcccagtgcgagcccgcactgccccagggccggctctggtaacatactcagcatacacagcatacagctagcactactacagtcctcgagatcgagatggatcatcatcgtcgaataattaatcaaatcatgagatattctcgcaatctggttcggttgacctgatcttgcccaatcacaaagtttattattgagcacatcacgacaagtgagttgactcaaaaactatattttacatacatacacgcgattatcaaaagaacaagtatttttgcaactagttgcttgtcctccttttcttaattattcatattaattatgtccatccaaacaaggtatcatactcatatatatcttatatattcttcttagaagaataattaaggagcatctttaattttcaatttgtagttgacctcgtactaatgtgtacacctggactgttaggggtgtgtatacgtacaaccaactcaaagtagtccatttgaagtctaccgatcgaggaagatgtgtgtacaaaaagtcgtgtcaatttgtgcatatcaagctacaccttcgagtttaagccactataattaagctaattatttagttactttttgttaagcgagacagctaaatgattattcgatctctagcaacaagtggcacagttcctgatattttatatggacactttcaaagaactagcaacaggggactcgcatacatcgatgttgtactatatagctcggagcataatcgaaaaaaaaaacatatagaaggatatatatcactattccattttttgcttgaataaatttcaataaaaaagaacacttttagtagcgaaccatttgagaaatcaggaaatatacttagtaacaaatatgagttaccggacatgcatatggataaaatggtttagaaagttctggacgtattttcggaaatgaaaagtgtcggttggatttttttcaaaaagttttaaaaacgaaaacgaatttggatttttttttcttggaatcggaaataaattgtttttttatatatatagctgattagtttcagctttctctgctttagatgttcagacttatactaaatattgaggtggttagttgaatgaagatattttttaatagttcaatgctttagatctgtttttctttttcctaccgactatttttgttttagttcaatgctttagttcaatgcttttattagaccacatcatactacttacaattatagatgaatatagtttttgcttattggagttctcacaaaaagtaaagtgtaaaactagttgtattattattaattgataaaataatagaaatatcaatttattgttttagaaatatcgatttattgtttgaaaagctcatttagagttgttttcatatttcgataaatatttgttatcttattcgctacgtatttgtctagtcaatatattcaatgccatcttcataactgggtttttccaatttcgattctgattccaataaaaatatatggaaatggaaatagttgagatggtttccgcatgttttcaagctgttttcatcgcaagacctgcaaacgttttacattacaaataaggtttttgtttttcctatttaattgtatataaacccatgttctaagaaacaaactagtagaattaaacaaaatgtttctcaataaaaaaaaactaaaagcaaagtatgcacaatgaattaaattatgtatagagcttgattttaaaatgatctatatattcttgtcattttctttctcggttcttcaccatcactcgttttagctttcttggaggatgtatatacgcacagagagtcgacggctattacattagaaagatgatatacttctaattttctcttttcactctgcaacacatatatatgcagaaatacacatcaataagcactaataatatgacgtctacaatcacccgttactctcgcattataccgtcactagacatcgatctgtacccatcattatgaagccgaagctgcattattctaactatatatccacttgcatatatattattcctttaaattcctctccccctctctccttttgagtttttgcccccaaaccaccacagtacaagtattgatctcttgtgattgggttggcaaattgcaaccccactagctagccatatagccaaaagccaacccttttttaattattggctcaactaattggcttgtgcactacacacacatgctgctgctgtccatatgcatgtatacaacgtgcctaaatgtgataaaccaatggtcctagctgcagcatatgcaacttgatatatatgatgctggtcggccgattcagattgttggcatgcatcaattagcacatagatcgaccaaagcctaactgtaaattaaaaattctagatgcttcttaatttcgttggttgctttcttggatccacgtcaacttgatcgatcgatcgatatcatctactccctcaatcataaaatccgatatgctatttgatcaacaatatctataaaagtaaaatatttaaataaaaagagttgctcattatgatagtttgtttaacaataaatctagtaatatcaattatacattattaatcttttttatttttttatatgtcactatttaaatatgcttatattttggtacgtacggagggagtatgtatgcatatgcatgtgctgtttggactagctatgtttgatacggacttttagggctttaaattgtggccggcggcggcgcgtggttttggtgatgatggccggtggccgccgacgtatacgccgccgccggcagcaggccggccggacggacgtttgaacatgtgcatccaacaatgttagtcctggtgtgtctatcacctctctctgccattttttttcttatgtgataactaatgtgcggttagtactctccctccatttaaaagtttaaaacattttcttaaaaaaaatcatcaaaaccaaagagaaattaattcatcccgcgtgtaacgaagaccgagaaatattatatatgcatgcaaccaacaaatattaaaatggttgataggttttctatcaacacaatttaatctagcattgtgaaacaaaaagacaatctcttcgtaagtcttcgatgcgtgaagactacaaatatgatcatcttatttggagaaatcagaaaaataacatatgctcaaagatttctggatgaaaagattatattaaaaatgttattgttgtgattactagctattcggtacgtataaatttttaatggaatctttttaagtactctatatttgttttgagccgttcattagccgttgatccaatggtcgatgttaatttctagagcctcactactgtctctacgaaaacaatctgaacgcgttgatatcatttaatcaaagggttcaaatctatttatactaccaccccagttagcggtagtagaaacatggaggggcattattgtaaaaaaaaaggcgcggaagggtataatcatcactttgcagtgattaaacttttccctctcttttttggctttccgatgaaatatgagcgatgccagcgcaatgaatgatcatagattcctttcaaaaaaatgaatgatcgtagatcgatttagccgagaaaacaaacataaataacaaaataactcctaatcatgtaatagtaaattgctaattttccaataataatattggtagtataatactaccagtagaaagcaccggagcatcgctctaatttctatatactaccatgttaacttgatcatctatctatgtagtgtcatgcatgtaccatatgcatcgatttgcatgctgttggagtagataagtttataaaataaataaggtttttaagttttctggtagtaaccgccggagcacacactactatcgaaatgattttagcagacgagccctcctccaactttcaggcagacagtaacatctccacctgcggtaatattgatcctaaaagaagacaagacccatatgcgaaatcaattttcacagcattttcacaaatgggcctgttaagagacgcacatgtcaccaggtcaactaccctttcccttggatgaaaattacgtaagacttccgtccttcacaatctggaaagaccccaccttctcaattgtcacgtgtccagctgttcgcacggatcttgaaacacccatcttctaccagtgcccaaaatttccccttatctttcctctccactccccatctttcccttcctttcttctccttagctggagccccatctctagcacgaacacatgctccaccgctgcatcctcttgctcctcggatggagcatatctgacacgagaacgcgctccctcgcctcctcctcttcctctttcctgttgcagcgcgggatgcaatgtggtgctagtcgagactatgttcctgacaagggagtgtggtaagtttgccatccggtgccctgcagttagacgagtttgtcgtcacgtgacatagacttcagctaaaatttggacctcgagctatgaagaaaaagaggaagggaggtagtgagagtggacatgagagaggggaaatagttgggtgagctctccatcccctgcgcgtggaacgtattccaagctagagatagtgctcccctgccctagtcgatgagaagcagagaaagtatgggggagaggggaggggaaaataattaagcacttgagctagaggcagaagatgggtgctttaagattcgtgcggacacgtggtagtaaataagtgaagtctttccaaacgtgggaaggacagagttcctgtataattttcttcccttccctaaaaaatctaagtgctattctcgtctcctcatcctcttctcaactcatcctctcctctcctctaaaccccccactccacctcccaccacttcacagcctaggcagcgacattacttcgagcgggcgctccaagaggtggtgaaggcggcagctgcgttaggcgctctgggaggtggcgaaggggtggccggatccggtaactatgccctcatgcgggcactggagcggtggcaaaggtttagttgaggctcgcagtggcccgatttatttatctggcatataaatttaaccttctatatcacctgatttatttatcatatttaacctttacccattatactgtgcacattaccattgatatagcataatagaaatatgactaaccatagatcaaaagtaatggatgacatacatgtttatcatacactaagacatctgtgcatattgtaaaaaagaaatattgtttgagattctttttgcaataaattgcagctggcagctgagcaatcaaatctgctattttcctctactatatatttgatgataaacccattattcaagttctaatcatgcatactagcatgtgtgtttttggaagtccctatcaatgtaaaggacggatcatttaccttagtttatccttcatatatgtttcttacaggtagattagtttgaaatgcacatttaaaattgattagatttttttcagttaacacgtccctcaatcatacttttaaaattagaagcccaaaatgaattggttttgcgctctttatgtgaaagttaagataacttcatctttcgtagaatattatctgaagtggaattgcaaccaaagatagtcctcttacatatatgaggatcttatggataggaagaatagatcatagaggatctgatcacaatataaaaatattttgctgccaattggttattgtttggccatctggtattactccttccgtctcttaatataaaaaattttagaggaatataacacatcctagtactataaacatggatagaaatttgtccagattcatagtatgtgtcagatctctttaaaatcccttatattttgaaatttagaacggagtgagtatatatatactccatccgtcccaaaatatatcggattttgggtgaatgtgacatgtccggattcatagtcctgaatatgtcacatccacctaaaatcccttatattttggaacagaaggagtagatccttcattgcaaagctagtacttctagctactaactatattaagaaatgtcacgtctggttaatttatttgtggttatgcgtgcaactaatcacaactagcctgtgatgaaaggaaagttgatgtgcaatgtgatggatgcttctgaacgaagaaatatgatgatttgcaacctcatatatattttatagcttgcagcaagacacttgtaagattcatgaaggagcacacaattttctttatacaaaaatgaacctcaatcatggtgattaccaaagaaaacatcctgcaaattttctttattaattgggccaactatagcctgtgggttttgattggattttggaattatagggatataataagtgggatatataggggactcgaaaataaacagatactttgagagaagcagaaaaaagagcaaattaaccttccatcttatcctagtagggtatcttcccccattctaataagcaaaactcatggtttgtcatctctttaaagtggcatttcgatattgtccacccccacgtctaaatgatatgtagatcccatatatcatacatatataagtggttaattatttcatttaatttggaatcttggatgaactacgagcaggatgtatatggacgcgaggtgggcgattacatgcctaaattttactgtttaacccaacccaatgtattctagcatgttttaggatctccttatttcttttttttttcaacattctttcattccccatcattgatttagctagaacatgattgttttctcgacaccaacaagtgttctatgttaatcactaccatctcaaagaactactcactagtggagaagtgctttttagtcccgattcgtaacccctatatagttccggttttcaaaccaggactaccaatcaccaaccgggactaaagagagggatctttagtcccggttgttgttattaaccgggactaaagagagggtagcggcagtccagctggtcctttttttttcttttttattttctcacgaatcaagtggtatgcatatcgtgaaatcaaaccccaaatccacatcacaaatccacagcacgattcacagattcatcacaaatacatcacaaattcattcacaatatctattcacatattcattcataacatcacaaatatattcacaatattggttcacaggttcattgacaacatgacagactcattcaaaacatcacagattcattcacaatatcgattcatagattcattcacaaatcaaaacattcaaaccacaaatcataaaaaaactcaaaaaaattgtctcaccagccggcctcccatcccgccgcaggccggccacccatcctgtcgcttcccctccggccggatctgggggaggggagggcgaggccgccggcgaccagcctccgtcccgttggcccgcgccgggccgccaccggccggcctccatcccgctggcccacgcccggcctccatcccgccgccagcccgcgcccggcctccatcccgccgctggctgcctctgcaagggaaggaaggggaggggaggaggaaagggggtgagagaagagcaaggggaggatggaaggagaaggatggagaggatggagataaggaaggagaagaaaaagagataaggatgggagatggagagagagagaggttgcgcgtgcatgcacaggatggagagagagagaagcatgcgcggtggacgtttttcttcccaaccggaactagaaatagatctttagtttcagttggtgttaccaaccaggactagaaatagatctttagtcccggttgagaacaccaaccgggactaaagataaaaaagtagctctaaccttttgaaccaggactttagtcccgatttttattgcaatcgagactattgtggattttggccgaccgaccaaagatggtttctccaccagtgactgtaagtcatgagaatatgagaatgatgggaacgtgtgttccatgcattgaagatttcatcgttccacttactaagaaaatttaaatgactacatcaagacataattattcttcctagtttttacatagaaatgtttgtgtctttgggagacctcatctaatgccaatacactttgtaagattttagggatgatgataaattatggtgtatggtgggggctaagcgtcttattagcttttggctataaattaagtctatttggtcctaatcgtacactgctggagaaactatctttggtcggtcgaccaaattccacaatagtcctggttctattaaaaaccagggctaaaaacgatttttagtcccggttaaaaaaaattggactaaagatgatctttagtcccggttcatcccctgtcaaaggcatatcagggggccaaggatctttagtcccgattgatactaccaaccgggactaaagactaccactttagtcccggttgaaagtaccaaccggaagtaaagatcatctagatctttagtaaaattgaacgcgtagtataaaatccctatcactcatcctctcaactcacacagatcgaatctcttccccttctcctccttccctctcacacagatctcaatcccccttctcctcctctcctcatccccttcttctcctctcctcatcccctctcctccccctcctccccttcccatcaggtgggccgacggccggcggggccacgcccggcggcagtcggcggcgtagtgcgcggcggcgggcagcggcggccgtggcgggcggtggcgccgggcggctgcgagcggctttgtgtttttttttataatttgtgattccctgatatgtataaatttgtgatttattgtatggatctgtgatgtatttgatttgtgtgtaattttttagatctatgatgtatttgatttgtgtgtaactttaagatttgtgatgcggatttggtgatatgaatttgggatgttactctgatttgggatttatggtttgatttggggatttgcatgccacttgattcgggagaaaataaaaaggaaaaaaaaaaagaaaaaagaaccatctggtactgccgctattctctatttactcccgattagtaacaacaaccgggactaaagatccctctctttagtcccggttggtgttaccagttatttcatccgggactaaagataacgatttttagtcccggattgctactcccggttgaaaaaccgggattaaagggggttaccaactgggagaaaagatggtttctccaccggtggtagtttccttttcttctagtttgttgtgtttaaccatggcccttaaaggtttgtacgagtctttctagacttctctcttcttcttaattaatatattgatgtacaacattcttgcgcatttgagaaaacttagacatatcaccaccaccatcatcaactagtgagcttagttgatatagctctagttatcattggtcatgcaaaattcttgcatgtttggtagtatggtatagctaataagctaaatatatgtctcagcatatgcatgctactgatctttgttgatcaatggatcaaattgatgcttcaaataattgattggagtgcttatcattggtttaacagttaaaagagcaatatggagggaaatggagtaaagaaaggtcactcccttttatatggttttttcagatgcactacttctcaagtagttatagtcatgaaactaattaattcgcatgattaggatggtgaaaaaatattccctgaaaaggtcttaatctatacttgtgtgcccagcaagcatgcttgtatatgcttatcgatgattagcagagaagcatctacaaatcggacctggccccatgggaatttctagaaagtgatgcagatcactagccgcctcctaacaacatgatttgtcagctttcctgaagatactataagaccagcgtgccggttggcacgcctgcaatttatagcccgtgtgtattatcatgtgttgtactgttaaattattaatttctacctagcaataggttgcaattttctaaaatactccttctgtcattttagatagatgtgttatatctcagtacaatgaatccgaataaatattatggtatggagggagtataagaaatgacatagtaatgttatttgtcttaactttatttatctagatatttttcagcatagtaggaaaattatcggcgttacttgcttatgtactggtaattacacttattttgccttaattttcaattaagtttgtagaatattgtacttgtttgaatattagacccgcaacttatttggtgcttttaatttcactattaaacggttttattttctttgtcttaactgtatttatgtagatgtttttcgacattgtacgaaaattttcggtattacttgcttccgtacttccgcttatgtactttatattacgcttattttgtattatttttcaattaaatctgtagtagattgtatttgtttgaatattaaacccgtaacttatttggtgcttttaatttcactgttaaacggtttattttctagacaaataggatgttactatcatggagttacttgcctatgttttatttaacatgcagtaattgcttatagggaaaaatatcataggttagaaattataatattttttcacgtttctctcccttccttttttatttactcagtttattattcctccatccagtcataaatatttggccaccaatatcttacgtagcttatatagcatagtttatcaaacaaaaaaaaatatgtacaaggttatatgaaaaggttaactggaaataatgatcaaagttcataaaaataatttttttaaaagattttaagaatcaaataattttttaccggtgggagtattgtttttcctttgttcttttttttcccggaactttcgtatagttctatcttcagatatagattcttgatggtactagtgcacaaaacgtgagaaacgatgtgcttcagttttttaaattcctttcatgctaagacgtatgctttgtgtgcaaggcccaacaatgccaggcccttccatgacgcaagttagcgttcctccgttacttttttttttaaaaaaaaaaacaaactatcgatctatccagatgcaaagcaagtacgcctgctgttattgtgcgtgaagattgattccggtgattaaggacgtgctatgtggcttatctccacggcaattaatttgcatggaattcgtgttataagatatgatatatgcattagcatccattaatccctttgacactcggagctcataggttacccgttaccctagcaagccaaagctaaggttaaatttaaattttaaaacataattttggaatcaattttaaaatattttagcgtagtttcttttttatattggcttttgagggcctgttcactttaatatcattttcaactataccatttttggtaaagttgctaaaaagtctacgtttagttcgttaccaaatttggtcaatacataagaaatcctgctaaaattttggtaatataccatcttgccaaaattttggcattactaaaacttgataaggtttattttaggtacaatctgaataggccctaagtcactaagaacacatataaaattttacctgcaaattaatttttattttttaataggttgttttgttttagtagggaatatgggcaaccgatgagaacctcggttaattaactccaaatagtacgctcaggcgtgtgttaattaatttgtcaattacttttgtcgtcttctctagcatgataggatccaatgtgatcttaactttaatcacatatctaccatgctaatttctttgatttccaatcaatgaagtgaatattgtcaacacatgcactttagtaaagaaacacctaggttgcacttttatttacactacaattacttaagcctctttaagaaaacaaattagaccaaccgtacgtgtgttgctttggtggcttgataggattaacttcccaagaagtatctgatatattgggaccaaccaggagataggattgtccaactgtacaccagcaatgccataaaaaagttgttattatcttttttaaaaaaaaactatattatgattttaggaagagtgaatatataatcagtctaagagcttgaattttttttatcatatataatgtattttcttgtagaacaattttccatctatgatacttttttcatggtttaccttaattgtaagtagctttgctgggaccgcacttcttaataatcttgaggatggaatcaagagggaagtatatatatccatcataatcaactgcagcatcatataataaattcctcagagaatctaaagtagttgcacatatctttctttaaactcttctctttttgcaattaaatatagacaattctgagactaaaacccctagttttttggctcagggacaaagttaggtacattagttgggggtggcaaaaaattaagctataaatttatcaacaagttgcttggagataaagatgagtaggtgcatgttgaggctgagcagttttcatgaaaagtacagcattttttatttattgtttgcagacaactttggatagtgaccctgcaaattagtaccacgaacttgatcactttaagcccatcgaaagaaattatttggactattctttgtgagtttgtaggcctagccgtgtataatttgtctacttttggtccaactgtggcccaatccctatttgattttaaggagatttttttttctgttttcatttagatactatttgataggtttgggcagtttgtgcaaccagaatatggaatatgatacactcttccacatcaattttattatgtctatgtggtgttacttttagcttggtaataaaaggttgagtatgtggattcagcattctcattttggtagttttttcccaagctgttttcccattttcagtttattcagttctcaagctttgagaaccttgtgaaacttgtaataatttagcgggtttctactagaaaaacaggtcgtacaagacataaataggattgaagaaaaaacaggttttataactaaatcagaacaatagatcgcttatcttggcatgatcagcccagctgcctgtcagaaaggctcgcgtctttgtgagataactgtaacctgtaactttgttaactcaccaagaagctgaagtcattttatccgaaccaaacgagctgcagtagtaactacatcttgtaaaagtgaattcatgagcacttaaaatcttgcattattttcacacagatagccttcattgtaatgacagtatggaagtcccttatgatgcagggtttcattgtaacgatcgaactctacggcagcaacagaaataaactaatgtgcagcatgcaggccaacctgaaaatttcaatcaagaaaagtctccaccacactggttgaaaccagatggacaggtcaacctgaatatttcaagaaaaatatccaccacaatggctgaaatctttcggtaaaatcaagaaagaatgccagttttcttgccagtcgaatctcgcgacaaagcctacgaaaacattcctgatactttttccactactaaattatggcagcttatacaaagtcaagtaaggctacaaagagagagaatccttaggcaaagaaagatatcagcacatatgcttgctaagggtggaaggcggaggggatgataaattacatatcggatgtcatctgacatggaaaaaaagggagggaaaacttcttttccgggtaaggagtaacaccgtaccatcaaggatggtggcagatgcaaggcaaggctctaatccttttaactctatctttcagtaagacaactgaagcaggcagcaaaatgccatagttgcacaatacacaagcagctaaacgaacagttacaacatacagttgacagggctcagatgctttgctgtcgcgaatgattcctttttccatgacagcattattgcaaagaccaaatgctttgacacagttcgaggtgtcggcactgttacttgtgctccataagcaatgaacccagtgagagcagccacgtcgtcatatcaaacttgtaatgttctatctttattgagatggtttccagtcatactgaaggttattgaagctgtttgctgctctaagtccactcaacagttggtttcctaagtcatgttgctgctgctgctgctgctgctgttgctgttgatgttgatgttgatgttgatgttgatgttgctgttgctgctgtagttggcccaactgtgataggtcatgtgcactgtgattcattcccatcctaccactaattgccatcgcattgttcgctattgcagttctcaatccactagctgcatgatttggaccaagcccacccatggccccaaaccccattcctcccattcctgagttatttgtaacagcattaccaactaaacaattaactccgttaacactagatgtaagtccgttcggtcttttcatgtcattcccaagctggccaacaccattcatctgcggtgacatcatcaaatcttgcaatattctctgaaccgagctttgggactcatttggatcaggctcctgaggtcgagtagcaggtggctgcattggcggtaggtttgatgatgcggttggggagctgagttggtttgtgttctgaggggcaggcatcatgttgttattggatgttgttggcactggtgaaggaaaagaggtagatggagttgactgcagtgaggttgtcgagttcaccttgggaattgcagcactgtttccactggtatatggaccattagcactgctcattggatgatcttgtctagagttcattgaaccttggaggagcccaacaacggacggtgaaggtgcagacgttgagggtgcacagctgagagaattatttgatgtcacatctgcatttgcagaggcagaagcctgcacaccagtcatgggagcagcattttgaccactctggtttgaactctgcgggatagattgctgttcttcaggctgttgctgctgtgactgttgagggtttacccctcctgatgaagtcctccgaggaaagctatgcaaactagctgaaacaattaatagtagtagatgttaaatatgcacaaaacaagtggtaacattaataaggctgtaaaatacagttaacactatagcaacagactaccatgttctttggctaggagtaaaaatcagcaaggg

SEQ ID NO: 7898 - DNA, 8195 bp, Oryza sativa
acttttattgattttgttttgctgtttgattctttttttgagagaaacgacatttgagttctgcaaattgtacttatatttcaatcttttaccattaggtttgttgcatgtgcccgccaattggctaaagcactggaggtgccattggttaatgatctgggatacacaaaacgatatgtgcgctgccttcaggtacacttttacatgaatctgtttctatcatctgttctggatttctacatccaacaaatttagattattatcatatgcaaaagtcggcattttgtacataggactattattattctttgttgtgggcttgtggcacctgttgccatcctctacttcgttgaaactgttttatctgacctattattttgtcatctgaaacattggtacttccagattgcagaggtggtaaactgtatgaaagatttaattgattacagcagacaaaatggatctggaccaattggtacgtcgtttttatcttctgtttactgtgcagtctcatctgatctcatgtcatcttgtttagcattaagtaatcttcacatattatatgatcagttgtacttctacaactcctccgtttgttttcttttgattgtacgttctattcactattttttatgaagacaagtttccaggctgtacaatttttatccatttcccaaattcagtagtgtagttaacaaggaagtagagcatgcaatacatgctcagatgagtaacatgctgttattgatctgtcacaacttccaaccagcgactaataacatgtgtttcaattgagactgttggtagagggctggtttcctgcattttctagttgctttttcgccagatatttgtttcatttgtttttgtttattcaaccttcataacatacttggaatgaacttattctgagatacccttgctgatttttgtctctagccaaagaacatggtagtctgttgctagtgttaatttaacaccacactgctattatttgtttcagctagtttgcatagctttcctcggaggacttcatcaggggtcagccctcaccagtcacagcagcaacagcctgaagagcagcaatctataccgcagagttcaaaccaaagcggtcaaaatgctgctcccatgaccggtgtgcaggcttctgcctctgcaaatgcagatgtgacatcaaataattctctcagctgtgcaccctcaacgtctgcaccttcaccatccgttgttgggctcctccaaggttcaatgaactctagacaagatcatccaatgagcagtgctaatggtccatataccagtggaaacagtgctgcaattcccaaggtgaactcgacaacctcactgcagtcaaatccatctacctcttttccttcacccatgccaacaacatccaataacaacatgatgcctgcccctcagagcacaaaccaactcagctccccaaccacatcatcaaacctaccgccaatgcagccacctgctactcggcctcaggagcctgagccaaatgagtcccaaagctcggttcagagaatattgcaagatttgatgatgtcaccgcagatgaatggtattggccagcttgggaatgacatgaaaagaccgaacggacttacatctagtgttaacggagttaattgtttagttggtaatgctgttacaaataactcaggaatgggaggaatggggtttggggccatgggtgggctaggtccaaatcatgcagctagtggattgagaactgcaatggtgaacaatgcgatggcaatcagtggtaggatgggaatgaatcacagtgcacatgacctatcacagttgggccaactacagcagcaacagcaacatcaacagcagcagcagcagcagcaacatgacttaggaaaccaactgttgaatggacttagagcagcaaacagcttcaataaccttcagtatgactggaaaccatctcaataaagatagaacattacaagttcgacaacacggctgctctcattggcctcattgcttatgaagcatcagtaagagtgccaacacctcgaactgtgtcaaagcatttggcctttgcaataatgctgtcatggaaaaaggtcattcgcgacagcaagcatctgagcctgtcaactgtatgttgtaattgttcgtttagctgcttgtgtgttgtgcaactatggcattttgctgcttgcttcagttgtcttaccgaaagatagagttaaaaggattagagccttgcctgcacctgttgctatcctttgatggtacggtgttacttcttacccggaaaagaagttttacctccctttttttccatgtcagatgacatccgatatgtaatttatcgtcccctccaccttccgcccttagcaagcatatgttctgatatctttctttgcctggggattctctctttgtagccttacttgactttgtataagctgccataatttagtagtggaaaaaagtatcaggaatgttttcgtaggcttgtcgcgagatctgactggcaagaaaactggcattctttctttttgaaagatttcaaccattgtggtggagatttttcttgaaatattcaggttgacctgcatatgttgtccatcttgtttctgttgcagccatagagttgctcgttacaatgaaaccctgcataaggcaagggacttccatactgtcattacaatgaagattatctgtgtgtaaaatgcaagattggccaggccatgatgtatcttggctgatgggtttcaagtgctgatgaattttgctgacatgtagttgttgcacctcgtttggttaagataaaatgttgtcaagtacgtagtgaattaacaaagttataggcaacagtatcatcatgatcacagttataaaaaccgtgtttttgttgggggtttggacctgtgaatcctgcttatatatttatgacactggctgtacggccaatttttctagtagaaaacccactaaatcaataataaacaagagtttggtgggtttaagctacccagttttgctgatactattgatggtgtatcagcattcaagatacatcaagagctttcagaagagtttggtggatgtatgaccagttttgcaaatacccggttttaaagtttgatggtgtattttagacaaagcgaagagttaagggtcgtaaattgaaattatccctcaccacccaccacctcactggctaggcggaataagttcacttcatgaccctcaactgtgatcgaaatctaatccatgaccataaaccacaaaaccggatatcttgacccttaaactcctaaaaccggtgcaatttgactccctggacagttttgggaggcggttttgctgacatggcgccacgtggcacctacgtggcaatattgaccgagtcttcgttccacatggcgttgacgtggcatctacgtggcggtggaaataaaaaatatgcgtgggcccattagtcattcacacaaaaagaaatgtgggcccactgacatgtggggcccacatgtcagcccttcttcctccagcctctctctcccttctctctttctctccccttcttccccttcagcggacggcgggctgcgagaacgagcggtggcggcgcgcaattgagggccgtagcgacgacgacaggacgggcgagggcaggagcagcgagccgtgcagccaccgccaccttgacacatctccccgccgtcgcgccgccggcgctcgcggcgcccatccaccgtccacctgctgccgccgccgccgcatgcgccagagggaggcctagcacgctcgcggatccctcctcctcctcctcgcctcgcccgacgacgacgcggcttgcagcgatgcatcgcacgatacggccacgctgcctcgacccgacagcgtggccctccgcctctcatccgcctccttctccggtgacggcgcagcgcggcgctgaggctgggcggcgacgccctggaggcggcctgggcggcgttgggtggcccggccaggtggcgcacgacggaaggggaagaggcgacacggggaggtggccggctcggccgtgcacggaggcggcgcccgcgcagcagacttggctgtgcgtggcggcggcggttcagcgacgagctcgagctgggctcgggtgtggtgatgacgatggcttgggcggatgaagacggcggcgacggcggcttcgatggtggacgacgccaaggcaccgacattggcgaggtggagtcggggctccatgtcgccggcgtgaggagagaaagagagagaagggagagagggatgaggaaaaagggaaaagagaggatcacacgtgggccccacattccagtgggtcccacatttttttttgtgtgaatgataaatgggtcccacacatatttttaaaatttgagtgccacctaaccgccacgtcagcgccacgtggaaggaataccgggtcaataccgccatgtaggtgccacgtcaacgccacgtggaacaaagactcggtcaatattgccacgtatgtgccacgtggcgccatgtcagcaaaaccgcctcccaaaacctcccagggagtcagattgcaccggttttagaagtttgggggtcgagatatccggttttgtggtttagggtcatggattagatttcgatcacagttaagggtcacgaagtgaacttattccctggctaggctagctgcgaggatttgttgggccaggtcagcgaaacataggcccatcgatctggtagttgggccgtgtgcatattcagcatgctggcccacactgcacgcccaagcttggtaggtcaaagtagaagctggacctagagcttaggtcaacttattgttagtattgtatttataaggcatattttattttagttttacaaagtcaaaatattcttcaagacctcaacttggtaacccgtctgtgttgaaaggaataagaccaattcgtatgaacgatgccgaaaacttaggatgaaaatggtccaaaacggtattgcttttttattatttctacggaaacggttgattttttttcatatttataaacttaactcttcagtatcagctttaatattgtgacgttgacagaaattagaaaactaaaattttaaaagataatagtcgatagagatattatcattatattacttttctgtaaacaatatccgtacagtcgataaagaaattatccgtatggttggaaaatttctataccattttcacccccacccaaaagggtagagaactgggattttgcaagcacaatcatctggttcatgttcatacatattaaacaaattctgcctatcttaatcaacgccttttttttgcccaaatgaattgtccctgtcaactaaaatctggtaaattaataagtgctctgaaatattgcagcttactattcatcatttatagaaaagaagtaggactagcatttagtctcgtcatgcgggtcaatgaatttgggcttaatttgatctttgaacacatgggaccgagttgaatcttcagagaaagagaaacaagaatatatagcagttggaaaaatacggaggactaattcgtcagtcaagatcgttcttctgaacatggacttttttttaattaatatgctgttagttaatttggtagcagccggcgttgatcctctgaacaaattaacaaactgaacttcttaggattcctggaaaggagaaacgaaaaaaaaaaaagaaaaggcaaaagcaccatgcggtttcagttgatctgtcgctgttcttgaggtacacgtttgcatatatgttgtggtgtcagattattttattaaattaagaggaccacaaaagttaagaacccttactaactgctgctctctccatctaaaatactgttagctcgaagcttgttccacaaagaagctctctctaagatgggtttcactactttctaataatatttcaatttattttattattttagttatcgaatcaaaaggtatttcacccttctctttgttttcttctcctctactccatccattaaaaaaataactaacctcgtattagaaactatatccagatgtcacattctagtacgagattaattttttttctatggggagtacgtttcttctccgcattaacgaaagtcatgatagtcttttagtctcttatgtaatttaccttataactagctaaaacaacggtattttagagacggagagaatttagataacaaccttctcttttttttcttttgcttccatttgcttaccaggattgttgctgttgattattagctagctctctcctatttttgtgtgtttcgtagcaaacaatgcttgcctgatatgtgtgcatcagtacatgtgtggagcacatcattttcacttaattaatcatagatgtatgctatacttacagtatatattggtgcatgatgcatgtgcgtgtttactgtatttaagacaatcaatgaataatagctagatcataattgtgtgactgttgctcgaataactttcgtcctcgatcgactcatctaaaagaggcaagccttttgcaagacaccatagcccatttgtttcggttcatcttaatttttaacttcctccttcctataatatagcaatctaaaatcagatagtacgtatcttgctgctaagaatctggcttgattcgtaatactagattacgtcatatccaatcctatgttgctatattatgggaagtagggagtacttctttataattatatatgtacattttggtcagtctaatttccgttccttagtacatacaattagttcaaaatcgactattatgtttcagaaaaaaaaaatctatggtgtatttggcaaaactgaaagtaactatctctttgtgtggaaatgtatcaacctttttgaaccaaatcttcaaccttttgcaatcaaactatacaaaatacaaccgatgcttcacgttggggcttttctattggcccaagttctcaagatactttgcaactttacttggttagcaagggacaatagagttggcatgtggttttttattagctcacaattagagctaatgatctactccaacattagttttgtacctgtgtactactctacctaccaaccaacatatggccttaatttgcttttggcacaattgactcatgctactcatatatattctaaactatattattattaaggttgaaatcagcaatgacctttgttggtcgctagccatcaaatgaatggaaccttccaatgaagatcaaactggggattctgaatatatccaatgaaaaggatagcaatccatccattgatgcaatgaaggaagaggttagttggtgattatttaactagaggcttaagttaatctatgtacgagtaatccagattaattggtgacagtaacatagaggcttagcatccaaccaactctgattattattaaattacgattcataataatacaacaagagtacgtggtacacctgtaaggcttaggatggatggaatatcatgatctcagcttgcctgttccatgtgagcataattcctccacccaactacattcatgcacatattatatgtgtgcttgagaaatacttcaaaaaaatattagctagggctcataaacatggagctcacttgatccttttttctacagagaagaacattaatcagctacaggatggctcgatctggtggcagatcctatagttgtggacccataaaaattctagagcacaagcaaacttaactatatatagtatatttgctataaagtttttattttattttctttaactacatagaattttaatgaattattcgtcgacgagcctggatggccacccaggttcaccgggtgggtgtcgatggaagagccacctcctgagcaccatggttagctgctaaaaaccgctatggaaaattgtacatagcaagtaaaactttcatgcaatactcaatctttgagtaatttttagaaaaactacagacattttgactaaactatcacaaaaatatagaattcaagacggtgtatcatagaacggtagatttagcatcaaaattatcatgaaactacatatttaagtgaagcatcacaaaactataaacttaatactaaatttatcattaaactatatatttaagtggagcatggcaaaattataggatcaatttatcataaaaaatgcaatgtttataaaa

SEQ ID NO: 7899 - DNA, 6058 bp, Oryza sativa
aattactgttatgatgccaatatctacgatcatatcgaaagcttaattacggagtttcttaggacattattactgatcaacagaaggagatctcgcataattggagttgacaacactcaagagataaattaagagaaacctcagaaagagagaatatatataacagagagaaaagctcaacaatttgtatcatgagcagctaattaattaatcgattcacctcatataggaaattgaattttttaaaaaaacttatttggcaaagttgtaaggggggtttcattcatcctctccttaatcactagtggccatgcatgcatgtccctagctacccttttttcctgatctagtgcatgcatgcaattaagatgcgacgcctaattaattacgattgatcattaattaacaacaaatattaatctcagcttcttctctaacaacatatccattggataacactatcgatccatctccggctcgccgccgccggcgacggcggctacacgccgacgccgaggaagtcgaagtacggcacgcccttccgcttgtcgccgccgccgtcgacgtcgccgtggttctcatggccgccggcatccatcagttccagcgtctctctcatgggagtggaggagaaggtgatggtggacacaggctgcgccgccgccgccatggacgtcgtcgccggcagcagcgtaccatagctcgtaccgttaaacgacttgatcaagaacggcgccgccgccggagaagaagaagacgacgacgacctgttgatcatgccgaagccgaagcatagcgagctattgcgcgcgcctgatgacgcaccgccgccgctgaagtcgagctggctggcgtaggaggagaacggcggcgggtgggcggcggcggcggcggcgcgggcgaggaggcgggagcgctcgcgggagcggcgggcgcggacgacgtgccagtggttcttgacggcgttgtcggtgcggccggggaagtggcgggcgatgagggcccacttgttgccgtggtggcggtgcgccgccagcagccgctcctcctcctcctccgtgaagggccgcttgttgatccgcgggtccagctggttgaaccaccggagacgacagctcttccctgcagccaaatatatttattacaatttattattattattctccaattaaattcagcacagttattagtatttattattactgctattactagtagtttttttaatatataacgctgatgattttttatatgtgtgatcatttgttttattaaaaagttaaacttgatttattattataggttctttaagcatttagtccgaaaatgtttgtttaagcgcgagttatgatttttcatgtttgtataaaaattacattgtttttcattttaatcgagcacaattatttattattatactacctcccttcgttttttaatatatagcgctagtgatatttttatatgtttgatcatttgtgtttatcagtttttttattataactcattaaaggtcctttgagcattcagtcggaaaaaaattaaagtttgtttaagcatgcgatatgctttttaatatgtttgtataaaagttttgaataaaacgaatgattaaacatctattaaaaggtgaatagcgtcttatattaaaaaagataataactaattggtcaataataataataataataataataataataataataataataataataataataataatttgtttttacaataattaacaggtgataaagaaataaatatgttgactctgcttggagaatcacatagcaatgtttgcaaatgataaatatatggtcaacttggcttatattctgatggcatggtggagattaattagggaaaagcatgtgtacgtgtaggtgatcaactcttgacacacacatgcatgcatggttgggtcgtatgaactaccgagcgcatgctcatgctcatgcatgcaagcgtgttcatttcttctttttattatgttgttttttgttatttaattttttactactatgtatttaattaactgttgttaattttcaaatcaataaattaatagtatagttaaaaaaaatctctgaaagacgttttgggttaactaatttgattttgaagatggaaatgaaacaaacggacatcataattccaaacgtgacgaagtttgttctagtatccctggacatgcataaccagtttgataataacattacttataaatcgatgaaagaggatcccaaaacaaggaaagaggaatcacaacaaagataagtaataagcttgatcggaaaattgaaacagctagaatacatgcaaaacttccaacattaattagtaattcagattagacagacgatcaaattaaatggccagctggcctttagtaattactggaaaatattatccttttgataaaatatggttgcggtcttttttgggagtagtataaatggaagaaattaaccctcagctctaattaaccagacaactgtattcctctatctccaagataaatacgaaaaataattaattagaaaaactgaagcgctcgctcataaatatatacaagattaatacaaagaaccgtatggggagcatggctaatttctttcaaaaggttagattaaagtatatgcatcacagaaattttgcttacaaactaacacacaagcatgattggaggcaaatcaagaaaactatttttttgcacaactctctccgattaaatgaacaaattaacaacaattaatacacccacaaaaaataacatatgccaaccatagcatccaagatttcgatccgattcaaaccaaacaggcatgtacatatgcccccaaaattttgaacacaaaattaaatataatccccatctaccaatttctagacaaaagaaatataaatcctcatcttctctccatgagaaagaaccaaagaacaacgaaccaaataaatctaggtagatgaactagacctatagcattaatttctttgcaactatatatctagcaccagaaatgaaacaaactaatcaacaccatcaaagaaaaattaaccatcaccaaattaagagataaaaaaaatcaaaatcaatcaacacacaactatagtttaaccaacaacaccaacctgatctgccctccagcttctcggcgatggagttccagttctgagggccgtacttctccaccagctgccggagcttctcgtcttccccgggccgccagtggcctctcgggcacgccgacgacgacgacgacgccggcttcccggcgccgtccgacgtgttcgtcgtcgacgacgacgccatgatccttcacctagctagagatcgaatcgatcgagtagaaatcaagcaaaacttgactataacttgctagctagctatcttgcatatctatctttgtttttcagatcccaaaatgattttctcttgataagtgagaggagaggaggagagaggggatttttcttgggctaattattagctagcttaagtaagtagaattagaggggaaatgggagattgagtgagggagaaggggtatgggtagtgttaggatacccatacccatatatatatacaagagagagacacacacatgtttggggtagctagttagggtttggatgataggtccctctttagtttagtttagcatgacaagaaggtttgggcagcttaattgcaccctaatcaaaataactagcatataattgtatggcactacctatatctctttctttctaatctacattctatatataagtgtatgtatgtgtgtgtgtgttgttaattaagtatatctatatatatcgctctcaccaacttggattacctgtttggctattcgctgaagaccactgctctcacagctcccatcaaacacaaaccaatcccttgattacttctgccttgtacttcctctctaacttctccaacaatattctctctctatgcatgcagcaggagacatcatcatcgaaatattgttaattaacaacaaattaattaaagatgttatctaaccatgctcgtgtgttgtttacgtctttgtgcatatagggagaaaacgaaatcgtctctccgtggacatgtataagtaatgatcattggtaatatgtctgaaagaaacatttctacgcatcagattttcttattttatatatatatatatatatatatatatatatatatatatatatatatatatatatatatatatatatatataagatgaaatgtatggtcagtgatcaacatatatatatggcacgcaaatttaaaatattcatctgttgataaaattttacactacaaatgtatgcatatatataaatctatatatcacattacaaacagaaggacacaaggaggtgtatattaattgcaattattatttcaatgcaaatgtactttgatcttacctctgtgcaactgcgtgggaaattctattagattagttaaatattactcaaaactatacctccaaatgaacctaagtctatatatataaatctgcgtaactgcacaggaaattcaacaagattaattaattaattgttgatcagatttgtaaagttttttttacctcgctgcagcttttgttttttcctttttctacctcctggcataggcttgtctggacgagtgccttgcataacaaaaaaaactcttttccttctaatatattggcatgcaatcattttgcgtgttcgcggaaagattttcaatttttttagatcattcttaccctgtgtactttcaaatacaatcagtctcttcatttgcaaagatatatcaaatagaaacaagacctatatactttcaaatgaacttcaattagctctccacgattaaattgtgcgggacggattgcgacaacctatgttcgattaattgttggtactctcacacaacttgtaaagctctaaatacatgcttattgtccatgtcaaaaaaaaacatgcttattgcattgtatatatactgcaaatgcaaatcgatgatcatctcttgaattcgtcgcaaaagtttgttatggtcaacatctatgagcccatacattcccacaggaggtaaaccgttcgagctctgccattacagccacccaacagaagcagaaaccctagtaatggccaatgaggcagcgtacacagaggggtggttggcttggctgcatatacatatcctgatcgatcgaaaagcccaaatttgcagtcttttcagcatgggatgcaccgcagaaacaagggatgcattcaatcttccatgctgctctgttcattgtgtttgggagatttggagcaacacatgcatgtacaagggatgtgatcagagagcagttagttggcagtgtgatatatgtgtatatttatgcactggctgcattgtaattgatgagcttgatgtacacatgtaactacatgtgtgtgtctatatatatatatcgtgtatatataccctttctcgtggtttcataaaatctctctataatttttttaaaaaataagtatataataacatatgtactgcacaaaagatataccatttaatttcatttttatgagcttaatatagggtcattttgaggttatttaattgcttgagcatgccctctttgtataatttgcatttaatttgtctgcagctgttctcaacattgtcatccaaggtggtaactgattgatctatatcatgggattccatacttgattcccaaacagatgtcctcataataattcttgtcactttgtttagttttagagaggcatgcacatgtttatatgcaaccaaaaacaggaagctgtttaggctaagtaatgagccacaaccaaaagtctgttccaaaaggacaagtagggcccaggaacaatggacaaaatctacaagacaaaagcaaatggaggaaatttgatgcaaccaatattcaaaaaatacaagaaatctaaatttgcagtatgtatacataatccgtgtttcttcattttcattctgtaaaaagtaattttgctagctcttgctaaatagaccttcgaaggaaat

SEQ ID NO: 7900 - DNA, 11569 bp, Oryza sativa
ctcatgcccccgcccgccgccagcctcgcgcccacccgccgcccgtcgccgcgttcgcccccacccgccaccgccgacccacccgtgagatagagaggaaaagtgaggcatagattgagagagagaagagagagaggaagagtatgacatgtggatcccgcaaatttttttataaataaaatgttgactggactgccacgcgtacgacacgtagaccaaaaccaccatggattgaaccgagggggtaattcgtccggtttgcatagttgggggtaaagaatgtctggttttgtggttcaggggggtaattcggacgaccgcgatagttcgggggtgtaattcgtactttttcctttattatatccggaagaattggagagagaaacagctgtgtaagtacagatttaccctttgaatttttttctttttctttttcttttttcttccttatccttttctccctctctcgttctttctctctttctctctctgctctcaaccgtcgccttcaacctcgcccgcggccgccgccgctcctcctatgctcgcccaccgtcgccgctccgccctccgcgctcacttgctgtcaccgctcctcccaggctcgcctgccgttgccgctcctccttcgctcgcccactgtcgccggtgctactgctccatggcttcatgtccttcatgcccagcacggtgacgtagacatgaacgcgctcagccactcatcagtagccgacggcgaccattggcgcgaacgcggtgccgaacgagcagtcagcggcggcctgcgatgttagctaaataatgcaatcttgtgcatctagtttctgtagttgcattgcatatgattggctgtgttagaatctgtcagcagccgttttactttcagttagcatgtagctgttttctagctagtttttcggttggactgaattggatcgtgggatggcacggtcagtagtggatccagatcaatcgggtgttttttctgttatgcatgtaacaaactctgtaattgaggagaataattagaaaaccagaaaagcagcaaggtacttcgctgtgccaaaactctgctcgttctactctgttcttcagttaactattcatatattcgacaaaaggttcagagattgtgagagtgagagtttgatcctgtaaaaatgagaccgtgtgcttcacatccaccatcgtttcttctcctctcttgctctttgcttggtgatgagaatgtaagatgtgtttaagcccgtgattagtgaagactaactaaagaaaatgtttagcggcccacgttggattaacttgagccaaaggcaaactagtttttaatgattgtttctctctcctatttctctaaaaataatcccgccggtgtccaatagctaattaccagtttttacgatgccctacagcaaatacacgttcttacgatgtcccctagctaattacacgtttttcagatgtcctgtagcaaattttgccaaatataatttcatcggcctttcgtagtcaataaaaattcatggtcacataagtgtatttcggagaccaattaagttatcgtccaaagcaacaagtatttgtcaccaaagatagcattacttaatgaatcatagcatgtccttttgcgaagaacatatatacgtacctaaagcttattaacaaaagcaaaagtcatgcattcgatgagtccgtttatagataaaaggaaagacgagaataaatcccatttttccacaacatgtacttttttaagaaaattaaatatgatagcaaaattgagactaatccgcatctagtcatctaccccataaaaggagagatctccctgtcatatacagcactgctatacatacgattgtttttatacgacgtttgtacgatgaaacgtttctctcctaacttctaacgtttttttagcgatgaaacggatcgctcccctgttgagcccatatccaaagcccaagctctgacgtgctggtctgctctctcgttggcatgcttgcgtagccaaccaaagcaatcttctttctagttatatattaagcaattttcgttctaattatatcttatatagtaattgtacttagcgctcatttgttatgtggcaggtgaagcaaattactcatacatatatgttccttacaccttggacagggatagcatcaggggttgctagctggcgcgcgcgcgccagttgctcccggcccatcagccctatttttctttttttcgcgattttttttcgtttttcttttgcgatttttttcgcttttttttccctttttttattactttttttaatctttagcacacttatttttttaaaaaaatgttttgagttgaaagttttcaaatctcgatttgaaagtttttaaatatgagttgaaagttttcaaatcttgagtcgaaagttttcgaatcggagtcgaaagttttcaaatctgggatgaaagtttttaaatcttgagtcgaaagttttcatatttttttcaaatcttaacttaaaaaatttcaaatctgtacttgaaagttttcaaatcttgagttgaaagttttcaaatctcgagttgaaagtttttgaatctcgagttgaaaatttttaaatctgagttgaaagttttcaaatatgagttgaaagttttcaagtcgaagttgaaagttttcaaatcggagttgaaagttttcaagtcggagttgaaagtattcaaatctaggttgaaagtttacacatatatggaaaaattcggaaaaaagaaaaactaaccgtgtcttgccgcccattgggccgtgtgggctggcgcgtgcgcgccgccggtgcgtacgcgccaattaggattcatggatagcatcaaccatagttggaagtagaatctaatggccacaatcagaattggatgcagaaaaagtttatatatatatatatatatatatgaaccaatgttaaacaaggtttgcatatgtttagatacagagagactgtatagtgctgctcagcatattaattgatgtcacatggtaacgaagcagaacttctttcaaacatattccactcttttagtcatgagatagaaggacaaaaatatcttcttttcccttcagattagacagtaaatttagttagattgaatactacctggtagattattttaatataatctcaagtataatataatctcaagtcagatgctgcaaagaggttaattgggctttcgggcccataagcgctcctgccacgtgtgcgtgcgccgtgcgctcgcgttaggttcccctgccatccgcgtcgttatgtttgatcgtacaaaaatcggaagaaaaaaatcgtatgcgtagcattttccatgtcatatatatgtgcctagactcaagtggatagattcatgcccctattgcaagtcttttggagcacatatataacccagctcaataagttgatttttggcaggttcaaataagtccatgcgaatgggataacaacatcatgtggcccaccgaagtgagctttgcacgaacctgaagtccagagtatgacttcagcttttctatccaacaacaatatacatgggtgtactgtgtacaacgccatgcaggcttcacattctccttttgatttcagatttatccaatctcactagctacctcctatgtacttgtttccactttatatcgcagaaattgcttggttcttacaaacggaggaggactatatagaaataaaacatggtacgagaaacaaataacaaaaataaaagaaataaacatggtacgccaaagagaagtatccactatgcaatataaaatctactgaaatttgttagttttgaatcaatcaccaacatctatactatacgttggacattgcagaaaatagtccaatcctataatttgaactattgataagaaaaagataagcaaatgcgagattacatgagtaatagttgggtctttgaacggtccatgtttgataagaaaaatataagcaaattgaggttacataaatgctagttgggtcaaaaggaaatcctaagcttagcaaaagcaacctagaaaagaacaagaagaaaaatgaaaggactagaaagtgcaataagattcttgattaataaaaataaatcaaacttgaagattacgtggacaaattatccctaccaagttctccacataaacaattttgtcaaatttgaattggtcctagttgttgactagcatttaagtagctttaaacataaataattccaaaaagatagttcaaattcccgccaaaacaaagataataattcacattaaaaacacgtcgacggagaaaaaaattcctactatcctattaaataaacaaactgtttaaccccaacaaaaatgatctaatcacagaaccgcaaaatagctacttctgaatcattatcatcctcgtcagcatcagtgagctagagctgctaagaggaacatgaggacatgcatgaactcatacgcattggccaccccatagcatggagcacgcactcgttttgacttattttttaattaatttattattaatcaatcaattaaaacttcataccacacacaaacagaaaacattaccccaaaaaacccataaaaattaaaccgaaaaacgcccaaaccaaaaagataaaaaaaaaacccaacgccccctctctaatcaacccctcccctaaccttaccaccacccaaagccctacccgccccactcacacccacgtgggccccaccacccctggccccacgtgtcagcgagtggcagcgcccgtcacccccgcgttcgctgtgccttcccccttaatcaaatccagcggatatttttgacgtccgcaaggacaaagtctcgccattttctcctccgttttgttttttttttcgttttcttttttcttcctcgctttctctctctctctctcctcctctccctcttcttcttcttctctgccaaatcccatcgcgaaggcgagagagagagagagagagaagaaaaagtgaggggattaacaaactcgcgagtttttcttttttttttttgtttattgtgtgaatttggcccacgtcggcggcggcggcggaggagctaaaccctagccggaggtgaggtggtggtggtggtggtcgggaagtggcggcgccggtggtggggcgggggggcgatttggcgcgcgcggccgagctccggatcgccggatttgtgcgtgagcgcgtggagtttgtggcggtgtgctcgtgttgctgttggtggtgaggtgtgaggtgaggtggggtggtgtggcttctgctgctgctgctactgctgctgctggtgcttaattttgctcgggttcgtggggttgggaagcgagggatgcgatctgggaggtgttcgggagctcggtgttgcttaattccggtgctggtttgcggtggtgcgcgcgcggcttcttctcggggtggatttggtggtggttttttttgttgccctcgttgttgcgggtggatttcggggggagggagagtttgagggatgactgctcgttcttgctcaattccggtggatcttacggtggaaggatggcgagctgagtaaaggcgcgcgatatcttgctgcggtttgtgcggagcttcggagcactttgtcattgctggcaaggatgatgccgtcggggccgctcaacccgatgggtcccgggcagccggtgggcgccgccgcctcgctgctccggacgagctcaagcctgcttagtggtggtcagcaggggatgggcagtggcggaggcatgattccttcgcagtcgcccttctcatcccttgtgtcgccgcgcacgcagtttggtgctaatggcctgctgggaggtggctccaatgtttcctccctgctcaaccggccgtttgggaatggtggacatatgctcggtccggggttgatgccaggtggtggtgggattccaatgaataccctccagcagcagagaggagggcttgatggtgctggcgatttggttggcgtgggaggttctgatcctctctcgtttccttcatcgtcgcaagttagtttgggcaatcagctgggttcagataatctgcatcaaccaccgcaacatcagcaacaacaacagcagctggatgctatgcacgacttgcagcagcagcagcatcatcagcaactgccaatgtcttacaaccaacaacatttgccaccgcaaccaccacagcagccacaggctacagtgaagttggagaatggtggcagcacaggtggggtcaaattggaaccgcagatggggcagcctgaccagaacagctcagcccagatgatgcgccatgctagcaatgttaaaattgagcctcagcagttgcaagctctaagaagtttgagtgcggtgaagatggagcagccgacttcagacccatcagcattcctgcaacagcaacagcagcagcaacatttgctgcagctgacaaagcagaaccctcaagctgctgcggctgctcaactgaaccttttgcaacagcaacggatattgcaaatgcagcagcaacagcagcaacaacaacaacagattctaaagaatctgcctttgcagagaaaccaattacaacagcagcagctacttcgccaacagagtctaaacatgagaactccaggaaagtcggccccttatgagcccggaacctgcgcaaagagattgacccattacatgtatcatcaacagaacaggccacaggcaagtttttgggttattcctaacaagtaatttagtgttatgtgaaggccatgcgcttacagtttagtgtctctatttgttccttttggtgcaggataacaatattgagtactggagaaattttgtcaatgagtatttttctccaaatgctaaaaagaggtggtgtgtatctctctatggaagtggtcgccaaactactggagttttccctcaggtttgatgtgctgtttccgacttgccattttttaatctagaatatagattatcttgttcatatattttcttatgcaaggaagttctgttctattatttaattggcaggtgcagagtagtgacagtgcctcacattttaaatttcctttcaaattgttagttgaagttctctatatttgcccttgtaggatgtatggcattgtgagatatgcaatcggaagcctgggcgaggctttggtaagcattattttaatttgcacatgtttctttgtcaattctgtttttacatccacttatgccactacacctttacagagaccacagttgaggtgttaccacggttgtgccaaatcaaatatgccagtggtacattggaagaattactatatgtggacatgccacgtgaatcgcagaatgcctctggccagattgttttggactataccaaagctatccaggaaagtgtattcgagcaattgcgtgtggtacgcgaaggacatctaaggatagtttttaatccagatctcaaggtattatatttttaatttattatttgtctttttttttggttactggtgggcctttaaaattagttgtataataaatggtgccttttgaactaaagcatgtttccttttcttgaagatcgcgtcttgggagttttgtgctaggcgacacgaggaacttattccacggagatcaataataccacaggtatttagccctatagctatatagagatttttattcaagacaaatgtcttatttcaatattctgatttttgggcaaaatgggaaagggttcaatatattttgtgacgcttggtgtttctaagcaggttagtcaactgggcgcagttgtgcaaaaataccaaagcgctgttcaaaattcgacaaatctgtcaactcaagacatgcagaataattgcaactcgtaaggagattttctctgatgccctcaatactttccatgttcagtttattgcaaaatcattaatgctttatccaccttgctccgatatgcatatttttgtgttcttttgaaatttatcttatttgcaattgcaaagaagccgtgtctactagtgtaaatacttttattaactctatgctagcgtgagctgtcttccaaaatgggacgtagcctctgtctcattcttcgagttcagggccaagctgtacaaatagttaaatactagtattccgtagcctaaccatttagattttgtgtcatagcactagatagatttgcactatataatggatgtacatgaattttcagttagaagtcaaatggtagtgtgagggcatacacaatgtggaagaactccgatctggctcctctttgtatcctgccagttaccttatcttttgcattctggttcgatgtctatatcccccgtaagaaaattgacattatgccgttgtcaaagtgggtttcactggaatgccatcctgcaaatgggtttcgttaaaatgtcattctcaaatagggcaacacaccacaatgccatttcttccatttattctcaatcaaatgaattttgccctgtttttcttgatgagctgaccaaaatacgtcacgctcgttctctctctctgtctcgctgggctgtggctgccgtcagcaatgcggcgccattactgagctctggccaccccgcatcaggaaggatgggaccaacgccgttgtgcacccaccgcacgccaccgcactctcccgatgaggacagctggcggcagagctccatgaggatattcgcgcacgagcatgatgaggttggtggcgtgcaatggagctggaggaggccactgctgcttgaggaggctgcggtggcgctgaaggaggccgctggtgcgagagcttggggaggacaccggcatggaagctggaaaaggccggtggtacgggcggcgatgcaggagcttgagttgttctcctctgtttctgcctcaatccatggcaggtgcaatttcatcaattgaagttgcaaaagagggcaaaattaaacaaatgaattaaaaagggatgaaatggcattctagcaagtagctaccatttgagagtggcattttagcgaatcccacttaagagatggcatttcagtgaaacccacttttgaggatggcatgtattcaattttctcattgcctgcagacttgtctgttggcttgatgctgccaccagtaagcttgagaaagcggagcagcagcagcagcatgtgaagaggtgtcgagagtctgagaaatacataggatcatgagatcaggactttaggagaagatgaggcgaagaggatgatctcctgggttcacttgagagaagagatggctgttgatctggtttgggggcatgatttagggaaggagggagagggtggagatatgggcttgtagattgtgtgtctgagtggttactagtagtaggctgccctgagtaggtgcgaaaataattctccgagaccaagtctctgtttacaccgtcctcaaaacatgacaggtagacataactgccatctacaagtagttaattctagagtacgttagtgctttgagtagggtctaaacagagacctggtctaggattattgttgtagcgggacttttttcctttaacctgttctttttactggctataattggtatatgatggattttcactgaatataactactgctaattgctggctaggcacctgcctagtgtccaagtgcccccaaagtgccaaaacacagtgctgtgcaaatggcgtgaggcatatgtggttttctggtccactggttgagttcctcatggcacggtagttttgtactgtactctgtgatgtatgcagtcctgcatgtaattctctactgaactacacgcattcccccgaggtatttcgattaagacgcatccaaaactgtggccaaggaaggccacggaagaaggtcctacatgcatacagcctttctgcatgtagtagatggaaatttacttatttgaaacattctatggaaatttcatttatttctttttctaattggatctctgagacaaattatgcctgataagaaagttactattgaggagcacttacaatggtctagttagaaggcaagttagagcagcattattcaagtagcgtaacatgtggaattaacatattttgtgttacatattttgcatgtttgacatgtgcattaacccatataggcgaaatatctattaaaatatatagttgagactacagaatgagatgttttacaaatatacaacattcttttaatgccactgtagtgtgtgaaggcgttacgcaaaacaaaggtgtggggataaccactgaattttgaaggtttgcgacccagtgattttggataagtttagctcactgaccatcagccccctaaaaggttaagcttccaggggaacactggccatttattcacgtccatgttcatctcaggtctatgatgtggatggttaagtgatgttggatgtgtatacagaaaaaatatcagtgcaaagtattctggacctatgggtgtatggtattgttctagcaccatgtgttcttattctgttagggaagataaataatttatgtgttcttagatgccatgcatttattctccataaaagttgaccttaatccatttctgagataacaattacataaaaatgttgttgctatagaaggtagcattttagctagtaagggatcttggagacttggattacacacatgatactggatattacggtgacatgctcaagcaagatgtttcacatgtattctgtttatcatctgcttatctccttctgtagaggtcactatctattgacaaaaaatactattgttgttgttttttaagttacgaccaaatagttgggagtccttaaagaagaggtggtgatggagtgtgctctacaactttttcttcactttcagatctttcaagcgtgcacttgaaggatctttttgcatttgaggattcttttttgctttttttcactttagtgcttttggtatgtttgcttccgaacattattttgcttctttaataaattatatgtcacagaaaaacttatgagggtagaccaatttgtgccttttagggctcactttcctttttcactgttgtttatgtaccaagtctgttgattttgtttttctgtttgattcttttttgggataattgacatttgagtactgcaaattgtacttatttttcaatcttttactattaggtttgttgcatgtgcccgccaattggctaaagcactggaggtgcctttggtaaatgatctgggatacacaaaacgatatgtgcgctgccttcaggtacacttatacatggttctgtttttattcacctgttctgtatttctacatccaacaaatttagattattgtcatatgcaaaagttggtattttttacataggactattatcattctttgttgtgggcctttggcacctgttgccattctctatttcgttaaactaatttatctgacctattgttttgtcatccaaaacattgatacttccagattgctgaggtggtaaactgtatgaaagatttgattgattatagcaggcaaaatgggtctggaccaattggtacgccatttttatcttctgtttactatgcagtctcatctg

SEQ ID NO: 7901 - DNA, 6697 bp, Oryza sativa
ccccgtgccctctatcgcccaagcgccgtcgccctccaatccgccgctgccgccgccgctccggtcgccgctagccgccgtgccgtcgacgccgtcgcgttcgccgtcgtgcgggccgtcccgtccacccctcctccgttggaatccgccgccgtgcgccggtgagcaccgccatggccgccgtcctcgccctctcccattttcctctctccctctaatccctctcatcttgttcgctaggtggttccggagctcgtcccgccgtcgccgtcgccctccatcgctcgccgtcgccgatcgtcgccggtgaggcccctgctcccctttctccctctctcccgcgccgcttagccgccgcgccgccgcctagccacttagccgccgctatcgccgtcgtcttccgccgccggccggtcgccgcctcgcgtcgccgctgtgtgcgcgccgcgccgccgcgcgccatggccgccggaccggcttgagccatgcccgcgggcgccggccgcgagccgcatccgccgcccgatctaccgggcggtagatcggggccgtccgttcggccgcccgcgtggccgccgcgtcggcgccacgtcagcgccacgtggtgcgccgccccatccccggtccgtggactcggtccaccgtgaaccaccctccccgagtcactgccatgtggggcccgcatgtcggcgccgcccctctctctctcccgggatttatttattgcgcaataattcaattaaggatttttctgtttatagtaaaaacacagtgaatcttctaaaattcatatctaattcatccgagctccgtttaagcccgttcaagtctcagtaaatcaagaaaaatgtgtagaatccattaaaaatggttttgttctctgtttcagtagtcttatagcctgtttgtattgtttgctttgtatgtcgcttagattccggctctcccgacgctccggtgtacttcgaaatagtcgccgaggttcctccagctgcagagcaaggcaagtcatgcttgtcacttgaacatgttgatcctatattgcaaatgctctattgtttttcttcaaatactgcattgttttataatattactatgggatgtttacatactgtcatagccatgctattttgtaccatgttcctttgttagcttgggatataacatgactagagattggattagagagtgcttagccatgtttagttcaactagcacgcaatgggggaaatcatattaatgtatagactgtaggtcctaatgttaatgttggattagtaccaccgtcctggtgttgcttaattaaaataaatcctatggtgggctattggtgcatggtttgctagtcgcgcccatggcacttaaggaccggttcgcgggaaaccctggaagaattcctcgtacttaccacaagctagcgtgggcaacggctgggcttgtagtgtagctttcctctagccgacgcatccaggcaagggtgggcgtgatggagtttggatgggccccgcgacggcctatgcggcttccggattcacctaggcacgagaggagactgcccactgccttgcaaggagtgggggtgaaacctgaggtgtggtgtgcttggttagagggggttatgcgaagggtcctgtcacggcctctttccggtatgtcgtggtggcatgtcggcgcatggaaacgtgtcgtggggctgtgtcttgtgggtacagttgtacacctctgatcagagtaaaactattcgaatagccgtgcccgtggtcacgggcggtcaaccagattcaccgtgattagtctcaccctagtgtagtctgttggaactgattagttcaggtggatggttgggcctgttgcaacgtggtgtagcgttgaacagtggatggttaatattgattaattattacaactgttttacttctttcaacttctatttataaatgtccgctttatgcaaatgaaccattatagctatcccttgataattccctgcatcatacccctattccggtatgacttgctgagtacagagggtagtactcagtcttgctctattttccccaaaaccccagagtttgagtatgcgtcagatggtgccttctccgaggagtaggcttcgtccgtgccgtcgaggatgcctgtggagtggtgttcccgccgcggtgcaagtcaaggcttagctccagttatctttttattttccgctgcatttatataaaacttttataatgtttgtaagacgtggatttgtatgtcaactttgtcgtttgtgtaccccggccggtcctagacggggattttaatgcacactctgcttggaattctatttgggaatttctgggcgtgacactcctcaggctatgtctctggatcaatcaaacgatctcttctacacttggcaagttgatgaaggtagttggacttggttcttccaatgtggtgcataggagtggtgtcaaatccaagagtcttgtagagccgaacgggattctcacagggaaatcatgagatgcccttccagccccagaactgcgaccaccacctctcccgcgacctcttgtattaggggcatcacttgaccactgtcaacatccctaatctgaacaggacggttactggattgccttgtaaatctaggagaagtacgagtgccactgccactgccgccctcaaccactttctctttacccaaacgaccacgagtataccgaataggaggactctcatcaccggacacatcctgagaggctttctgtcttttctcacgagtcatagtacatactgcaacaggaatcaataaattggagtgcagtagttaggcaaaatttgagagaaacaagaatggcaggctagctggacagcgcccggaggttccgggtgcaagaacaccggaacttccgcccggcaaaaatgaagaacataggtctcaaaaatagccagtgcatgtgaacaaatcctatagatcggtgatctacaaggtagcagaaacaagactatccaagtggttttctccctaggttcacagatttagagatcgggataaaaacacaatgaaccgagagagggaatcaaaaagtgctaccttgagagaagaaactgcgaatcgatcacagaaagaacctcccagccaccaatgtggatgaatccacggagaagaaacgaatttgattggatgaaagtgaaaatcgccactaggagcactttggcggcgactagggctggcggtggggagagagaagaaatgaggagagagaatacggtttctaactccccctgagtatatgtactccccgacaccaggaggttccggacagggaggcccggaacttccggcctgacagataaagggcagtcaggcccaaaaacaaggaagagatgagaattcaacgaggagaaatagggaactatggacatgcatagacttatgacgtatatgaccagccaacaatcaacattacataaccatggtcaatatacatcacaagaagggaataaaagccaaattttcgcaataaaaggcactcaaaggattttgcaaaaattttcataaaagggtttttggatatagggggaatgtttgagctttattcctggtatcaagaccatcttctaccaagaagtgatctcaaggcaaaaaagctctttttttttaatggcaaaatttgctacagaacatccaaaaaacgtgtaattagctcgtggacaccacaagaacgagaatttgttgtcgggcatcacaaaaaacgtgtaattagctcctggacactcggggctttattttattattttctatgaatttggagagaaaaacaccaaataaagacaagtttacccttgggtctcgacctggacaatgacgacgcattgggttggccggcggcggcgacggagccgaacaggatgcagcgcttgtgttctgtccctatgatgggtctgagcagcggcggccatcgccaggatgctccgcactgtggccggcgtgcgtgggctcatccccttggtatggagctaaccgacgtgttgatcgacgacaccgacgcaatgtccggcgaccggagaacacggcgcctggtacgtgggcgatggtggagagttgtgacgtcgcggagctgctcctcgccagcctcgacaccggtgtcccattctcccaccgtgtcaatggcagctgcttcgcaattgcaagggagagaaatggggatcaaacaacaattcatcagcatgtattatgaaagtaaacactgcaaaaatatcaaatgttcagttcaattagtacctgaacaatctcactatccgggaatttcctcacatccttgccgagcggcgcggcgccggagccgattaacttgagagagctgagatcatacttacctgccctcccgtgcttggtgagcgcgataatgaccggcggcacgcagaacaggtgcgtgacgcggtgcctctgcacagcctccatcagggagttgatgtcgaaccgcgacatggagatgatggcgttcccgcgctgcagctgcgcgtatgtgatgacggagaggctgaagatgtggaacatggggaggaagtagaggaacacgttggggccctcccagcgctctaggggcttgtttgagcccgttgagcgccttgtggagcttgtacatatggtttggcaactttggatcctcgaaccccggtggttgctccacatagactaactccaagaggggtccattgagaaaggcgctcttaacatccatttgatataacctgaaatcatggtgagcgacataggctaaaagcattcggattgactcaaggcgagcaacgggtgcgaaggtttcaccaaaatcgagaccctcgacttgggtgaacccttgcgcaactaaccgggctttgttccttacaaccactccatgttcatcttgcttgttgcggaagatctacttggtgccaatgacattttggtcgggtctctccaccaatgtccatacttggttgcgagtgaagttattaaactcctcttgcatagccatcacctaatccagatcaccaagtgcatcttcaaccctggttggttccaaagaagagacaaacgaatagtgttgacaaaagttagcgacacgagaacgagtagttaccccctttcttatatcaccaagtatgttgtcgacgggatgatctctttggacaatgtgatgtattcttggatggtgcaccgaggggacatgagcccgatcaggatgctctacagtgccctcggcatcaatcccatccacttgtgccgtaggcacgccttgactatcctttgcctggaacttcctagcagatggacccagaacttccgggcctggggaggtccggaggttccaatcatctggtcccggaacttccgggtcaactgactcttgacttgttgtagggctattggatgtcgatgacgaaggttgatccctatcttcttcgtcatcctgcgtcttgactggtcgtatgtctccaatagccttagaatcaattgcttgtctaggatccgcatcatctacaacatgtacaacaacttgctctccttgggagccattagattcgtcaaatgtcacatcccttgtaacttcaacaatactggaggttttgttgaagacatggtaggcatgtgcatttgactcatagccaagtaagaatccctcgtccaccttacgtgagaacttagatgaacgaggcctcttactcaaaatgaagcatttactcccaaagacacgaaaatatgaaacatttggcttcttaccactcaagagctcatatgaagttttctttaggattttgtggaggtagaggcgattgatggcatggcatgcggtgctcacggtctccgcccaaaagatatccgaagtcttgtactcatcaagcattgctcttgcggcttcaataagagtttggttcttcctctcaacaatgccattttgaggaggatcataggggggtggagaactcgtgcttgattccctcttcatcaaggaattactccacgtgcgtgttcttgaattctcctccactgtcacttcgtaccctcttgatggtgagattatagaggttttggccttgcttggcgaagcgcttgaagacatcttgagcctcactcttgtcatggagaaaatacacccaagtaaagcgggaaaaattatcaacaatgacaaaaccatacttgttacctccaatacttatgtaggccacgggcccgaataaatccatatgtagaagctcaagagggcgtgttgtagtcatgatgttcttgataggatgtggattcccaacttgtttccaggcttggcaagcactacacacataatctttctcaaatgtgacattagtgagcccgaggatgtgttccccctttagaagagttgccaaattccgcattccaacatgggctagtctatgatgccatagccaacccatggaagatttagcaatcaaacaagcttccggattcactctatccacatcgaaatcgaccagatagagatcacccttcaacttgcctttgaatgcaacggaggagtcatcccttctaaagacggtcacatcctcatcggtaaacaagcaattataacccaacttacacaattgagaaacaggtaataaattgtagcttaatgaattgacaagaaaaacattagagagagattgatcattggagatggcaattttacctagaccaattacctttcct

SEQ ID NO: 7902 - DNA, 10147 bp, Oryza sativa
ctagtcccacttgtttcattcgaaccctaatatatactccctccgtcccataatataagggattttgggtggatatgacacatcctaatacaatgaatatggacagacggtctatccagattcattgtattaggatgtgtcacatactcacatccatccaaaatcctttatattatgggacggagggagtattttctttttcatgatgtacacatattgcttagagagggtacagtacctgatactgtaccttgtaggcaactgaattttcacacgacaatattctgaacttaccaatgtttcaaaataaacggtcctgtgttttcttgtttgtagacttatggggctgtgggtttttagcacttcgcagtgagagctgttaagttaggattatgctgctcacaaaaatgcttaaaatatacttcaattagcagaatatatcctttgatgatggcaaaaccggcctggatgagaccaattacagtgatgtgtctgaaataacaaaaaaatggaagcagaagggtacggtgacaacttacacaccaaccaggccaacagagccattgaaagaattgcatagaggtacaattgctaaatggtgagcagtaacactccttgtgcgtgacaaacaaagctaaatttccctctgtttggtaactttggtttcaattcaagaacatacaattttttaggtgcaactgtggtaagcaaccagtgtgttcttttcctgcatcctagtgctaaggtatctttggaagcaccaaggttaacaaactgtcacttttaagtagctaactgaaaggattaaatgctaaatgacatcataattacagattatctgacatatatactaactgttttcggtgatgaactgatcgaaaatagaataggaaataaaacgacatttgaaaaatcaaccttatcatatatttaatttgtttctcttacatgatccttcctatttttaattactaaagatccatgtgttggacaacactggtgtgctatcatgccatgcagtgtgctgccatgggggatacttcctactttctaatatacccaactatcaacgtaagcatcaacttaaggttgaaagaaaataaaaattagaaaaagcagagggaaaaagggtccagttaacacggcaaaaacccatttttctcaaaataactgaacaggaaaacagctgttgaagcaacgagccatcacatgagacagtaaagctataagggcactagggcagcaagattaaaacaatccagttgctgcataaatagcaataacttaaactacagcagaaatcaatgggtatggaaaaatacaggaccatgaatgaacatcaagtactgatcctcagagcatgaagtgttaggtcagatataggcctgaaagataattaacctccaatatatccatccaaaaatgatatagttggacttcagcaggcaccttgccgaaatgaactccaacatctcagtctgaggatgtcaaggttgcagctcaggaggcactttcccagaacaaattgtggcataggcatcagcgagcccaggaacagcattcttgtgttgatcaatgtaccttgctacgaaatccttctcccgcagtatggcatatgttaaaaagccagcattttttatcaatcccttagccaaaaggacttctacaatataatgcctcggcatcaaccgcttctccaggctgcacgcgaacaaaacaggcttactcaaaatgtaatcaggctccaacccgactttggtgaccaaaaactctatctttctgcaaagattgttcacagaaagtcctagaatacttggcattttgtagaccataacacagatattgtcaatggagcatccaagagcgctactcaagaactttgtattgatgcgaagtttctcctcagaaattgctagaataaatggctctttgcaaaccatatgaccgatcttgtccacgcagcaattaagggtgctactcaagaactcaatcttactgcgaagcttttcctcagaaagtgttataatagttggcattttgccgaccatatactcgaccttgtccatggagcaattaagagtgctactcaagtacttcatcctcgcagatgcattgccttcggtgatgttgccagcaatagacagcatgtactttaatctactggaggcgagctcgacaccaagcttgccagtacgctccacagccgcttccacccgctttggattgaacgtgaacagccatccgggcatcttgacaatatctcgaacagttagcccgctctcctggaacagcgcgatgttgggcttgatcaccttctcaacatcagctctgacaattgcgttgttcctcctcaacatcttgagaagcgtctcgaaggatccccccaagaaggggatccagaactccagccgctcggcgacatcgcatttgcggacggccatcgcgccgccggcgaggaggaacctgccgatttgagggtccgacaagcccacgcggtcgcgcagagacgtgacgcggcgggagacgttgtcgggcctggcgcagaggaggtgcgggtcggaggcgacgacggcggcgaggtcggcgcgggagaggccgacgccggagaggacggcgagcacggcgtccgggttggcggcggacctgaggtgggagatcttcttggacgccttgagcgcctggtcgccggtgaggccgcaggtggcgacgaggtagtcctcggcggagaagggggtcgcggtggcggcggcggcggtggagagaggaaggcggaggcggcgcagatgggcgtagtaggaggcggaggcatggggggaggaggggacgcggagcagcgggaggaggcgtctccggaggtggagcatggcgccgcggcggaacgccgccgtcgaggtcggcggcgggggttttgcccggcggggtacaagatggactctttctttcttttcttttctttttttttaaaaaaagtgcgcgatccaacggcccgactcatgatctcgtatacggatcgacggttgttatagttacatatgtctctagttatatagtttatgagttgcagaactgtatcatatgtttagtagtataaaaaaaatagatttatcacacgattcatacgcttttcttaacggaaaattttactaccgagcatcgtgacttcgtgattttaactctaaaacactgcacaaagtgaatttgagagaatcgactcgataaacatggaaattagctcatggaaactgcacccattaaaatatttatttctagccgggtatgagagagaactcgtataaagaaatacctttgagctcacgtatatggtctttcagtctttcggtctttcatctatgtatctcgctcaagcatatatggcactgtatgtaagcctttagtttttttttccccttctacctcacatgctcctcttgctactctcaatctcgcaagaggacggggcgaggcaaggcttgatggtggcaatagggtaagaagatgtggaggctgatcgttcaagtgttatcctctccatctctttgcatccacctccgaatcatcacttttctagttgcggcgcgtggagggccacaccatcacggaggaacgatgccgtgaggccaggatgaaggatgcatcgtgcggctgttgacagaaaacacgaggcctgggagatctgcttaactccagtgcaggtccaaaactcgccttcggatgtataagtgtgccagttgatttgatcctgtaatcaacaagaaataaaaacaaaagaaccgtggttaaatctataaatgatagccgatcggccagatgccgatgacatatcatttacgtttgagccgatgtcatgtatagatcgatcggcgtttggaaataaataaaaaaggactaaatctattcgatcggctgtagatgttaacgatgtataattcttatgtcgacatatactttaaattaagtgattgggatagatcggtcgccatgccgagacggtataaatcacttaagctgaaatatatgttaataacagaattatatatgtttacagcataaccgatcagatagatccagcatgcatcagctaatactccgatgcaactctatgctaagatattaaaacaaacggaatataccaaacagaagcttaatatacgtgagtgcaataatatcttgacatgaagggcagatttaacatatcaataaagtatatggagcaaacatagttaaatcagataagatcggctgaaactccgatgctaccctaatcggcaaccagaaagcaggctagagattgatattctaaacacgacttaatagatcaaattcaactgatgcagcattaagtatgaaaagaagaacaatatctagacaatcaagccaccggaagtttcatagagtggtagatatcttatataatccaaatcaacagcaagatctaacctgatcgactgccttttgtatgcaaatgttagccgatagtagattaaatagagatattgctaaggattatgtaagatatatgataacttggcgaattatataaacgagattagagtgtcatgaagatgtaagcactaatctatgagaacataattcgtcataacgagtttacctcttgttgaagatcgacaccgatgcagctcaacccgaaagcaagaactcgttgaaatagaataaaagtaaaaggtggcgatgcgccggaattgtattgaatgtgtgtctttaattacatagggttcggggtctatttatacccgaagattacaagatatgcccataccggccatgaccattatctctaacaaacttctaaaatatcacgagtctttgcggcagactcttgcccacacttatctataaggaatttacataaataatctaattaatagatacaattgccttctcagaactctatccatacatggcaatcatcttgaagcacatcaacccgagcccgatgtcgcgcacaagtcgcattactagaatcggctataccaacttactcagcctagctcaaccttagccgatcctagccgtagccgatccagactctagccaattcttgctctgttccagaactcgatctccgcctccaactcttctctgattaattcccttttcctgatacgaatacttaccaaatttggttgtcaacagcggcgtggagggagtggcaacctgtggctgagtcacgccaccatgaaggctaggatggagggagcggcgtgcagtgctgagggttgcgtcatcgcggaggagcaatgactcatggaggccgcgatagagggagtggcatcgccgcaacaacgtatcatggtgcccttaatcaatcgtcgacactgacaagctccttgaaaaccgtgtcattttaccatgctcctccggcatggccactaatctcctcggccgccctaacgacagcatgtccacacatcccattgtgtttggaatggctggcatctacatctccttcccctaacgccgccacccatggttgaccaccatcgagctcaccgcacctcgccccagcctcctgtaggagtgagagaaagaggaagtagaaggggaaaaaatactggaagctagcccatgtgcttgagagagacaaagatagagatgaaagacctgacatgtggacctggggggtattttagaactttcacgtgatttctctctcctattcaaccacaaatgaatattctaatgggcaagttgtccatgagctaatttccacatttatagagtgatttcccctaaaagtcacttcgtacggtgtcctacagttaacaccgcgaaagtcacgattcctgtagtgttgggatgcgaattctttcgttctgtgtccctgccgtctccatctaacagctcatccctcagatgccattgtgtgtcaggccgtcccaagtgactgtagccctctgccccaatcaccaacttgatcaccgtactcacaactgtgaggcactgctcttcaccatcgaggacgtccatctcatctcctacatcattgctatcatcaccaacaaacatatgcaagaaggagctcatgttggggttgtccataccgtactagctcaagccgccgtcaatggctcctaaattcaactcgccacctatcttagtctcagctttgcctcttcctcgctttcctcccggtggcagccccactacacgccactgtgcctcgttgcagtcacacacttgtatcattgccacacatttccttgccaccgacggtctgatctgttagctgtgcttgcactttcactgggatgcaaacgacaacgtcgtgccgtggaagagacccgcccggccaccacgttgcctcattgcctgctaccaccaatgaggctatctctcattgtgcacaccttgccaaggcaggggttgagagttgaggctgcctcgcgatgggcttgcatctagcgcgaggcaacaaagtgggacaatctcattgacgtcctcttagcaggcggccacgtgcgcggccgacaatgtccgcctacacggtgtgaatttatatctttggtgataatttttaaaaagttagtgaattggattgcaaatttcggaatgtcatgaagcttgaaattttcaagagcccctaaatgaagggtaaaatatgtgcttgtcaattatcctagctagtataaacataatagggttaaaaaaaaggagcactacccataatccataaacttccccaaacacaaacaaatcacgccgccggcggctctgctcaccgccagccgccttccaccgccttcgccatgcttcactttcgagaactcctcccgctcctccgctccgccatcgccgccgtggcctctaaccctgccagccacacactaccctctctccacctccgcaccctccgcttatggactccgcaactgcgacatcgcatcgaggctcgagttcttgatccctttgttgggctcctacgaggtgcttctcaagaccgtcaagcgaagctaccgcatcctcacctccgacatagaggaggtcatcaagcccaacttcgcgcagctccaggagtgcgggctaactgtttgtgatattgtcaagaccaacccgaggctgctctcgttcaatccagagcgaatcaagcgctatgtgcatcgtgccgatatgcttggcgtgccccgttgctcgccggcattcaggatggccgtgtgctctaccaatgaaggcagcgtcactgcgaggatggagttcttgagcaggactcttggttgctccatggacaatatccttatcgcggttggcaagaggccaactattcttggcctatcaatggataatcttcgccgcaagatagagttcttggtgactgaggttggcttaaagctagagtgcattgtggagtgccttgggattctcaggtacagccttgagaagcgtatggtgccacggcattctgtcatggagatactgcgggcgagggggttgatgaagaaaggtgcttccttatatggtttaatcatgcaaggtgaggccgatttcgttgcgagatacattgatactcataaggacatggttcatgggcttgcagatgcttacaatgcatcttgttttgggaaaatgcctgtagtgccggattccactgttaaaaagagacacgggaggcgagatatatattgcaggggtaaggttagtatcgggccttagcatctgatgcttacttagatatcaattcatggtggattctcacttctgtgtcagtcgacttccatggtagaactgtaggtgatctaagttctgatatggtgatccatgcttcaaccatcgatatgtgcaaagcagatgagctgtcttgatctgttccctgcacatatcatgtcttattgctttagcacttgagctgacagtgttcaagttgtattaggctattagctttcctttttcatatcctacttgaccaaactcttgtttacatttcaagagattggccttaagaacatcgaattaccattttgaagttcattatgttgaaggaacattcaagaggttgctctgctctgggatcagccaccacctagtttcatggtttcacgcctatgtaacatacattaacctgtcaattatatttgactattttggttaggatttgctatgtttgaaatttggaacctcctgagttacatgcttgacaattacacttgtaggtcggctttacatctagcagacactcttttggagttttctgagttgcaacagtgatagaatgtatgagctcttggactgctttcttgttgtaactttgcaaaaaaagcaaggtgaataaatttcagacattatattttctcgaagtgcatataagattacaaatggtaggatccatacggaacatgcatacatttggagataggagaggagaaatgaggaggacgaggaagactagggggcaattttgatatttcactccgtgctgtggtaaaagagtgaaattgtaatgatgtttgcgatacaaagccaaacaactttgtgacttttaaagaaggaaaacgttcgaattaccctctgaactattgcagcagtacaagttactgcttaatctaaaaaacggatacttgacacctctaacttttcaaaccggataaataaccccctggtacttttaggcggttttagctagagctagcacacatgacaccaacgtggcaaaccaatcaaaaaatctataggacccactcgtcatatctctcacccatctctttctctctgttgtgtcttgcgatgaatttggagcggcgcctcatcgatcctgcccattggagctcgagcttgcttggggaggtccccaaagggtagcggcgaggaggcctttggaggtgttggctgggggtgagctcgagcactccttagggaggtggtacttgatcactccttggtgtggtgggcagtggttggagattgaggaggtgacacgctactgccgaggagcctaggaaggggaacttgggttcatgtgtggtggccggttataggggcttgttagctccccttctcctcgaggtggtccaactgtgagaactcaaggatgtggagctagagacgagagtactagttgacaatggcgggcgaggggagacgaacctaggtgcagatctagagcggaagagcattgaccatcacttccgaccaatgtctccattgacctccccaagtgagctcaagcatggcaagcgatattggcgagttgttgcctccatggacctccccgagcaagatcgagctgccgttccgagtagccgcctacatcaccctttatgaaagctcaagcttcgccttcaacgccctcctgagaagccccttcctcgccaccgcccactgcgcccacaacacccttgcgccaatacagagtggggtgatgaggctaataggtgggccctatgatttttaaaactccattactgattggattgtcacattagcgttaagtatgactgaaacctcttcgattgagtcagcgcatattttgtccggtttgagaaggttagaatgtgaaatgtctacttgtacagtgggtataattcaaatgtaccaacattttaggggtaatgcgggggtattttttccttgaagtatgctgaaaaacatttaaaaaaacaaaattacaggtccaagagaaatgaccggtctcccatatttaggggtagggggtggttagatccaggggtgtaaagttttagcgtgtcacatcgggtattataaaggttgtcgtatagggtgttagggcactaataaaaaacctaattacagaatccgtcggtaaaccgcgagacgaatttattaatccgtcattagtaaatgtttattatagcaccagtcaaatcatggagcaattagccttaaaagattgggtgaatagccaatgtggtccctgaagttttgcttcgggctcagtttagtccttgaggtttcaaatcatccaaacaagtcctccaaattaatcatttgggttaatatagtccttggacccacaaaaaagtaccacgtgagcatgccaagtcatcctcacatgtagcggtatgaatgaaatgatcattctacccttatataccatatagaaaagaaaaaaatcacaaacagaaaaaaataacaggccagcggcaatcgtaagtgacaattctaaaatgatcataca

SEQ ID NO: 7903 - DNA, 7325 bp, Oryza sativa
aaacaattagtactacaagttataatcattcacaaagtattaaatacgagccaaatctataaattctacaattacaaattatttcatcaccggaaaagaaagcaaattattaagccattagtagtatatgactttattgcacttacatattcatgatttagtgttggcacgtaatcttccaaaaaaaatcatgtatgaatataaatatttgggtacgcattggtaataaaactcacgccacacccgttaatacctcgaattttaatacctcgaatttgggttgggcatacccataagcacaaaatctaacccatgcctatgcccatcggctgcagtacccgtgggtacctagaccaatgggtaaaattttcatcccaattttcaacttgtactccttcattttccgcgtgcacgctttccaaatggttaaacggggtgtttttttgttaaaattttataggaaagtttccttagaaacatattcaagttttttagcgaatacttaattaattatatgctatctatcgctctgttttatgtgccagagggaaaggtttcccaacccctccaaaagaacataatcttagactaagtttgaactaattttttagcggcacgtaaaataagacaagtcattaagtaaacaagacaaacttgaaattaattaattaatttgttttttaaaaaattcccatatggtaattttatacatgaaatatatcaattagcagcttgggaagcttgctcgtggagaatgaggaaagcaggcgttgcaaaatgttgtttagaactcaaccttagtctcatcatgcgggtcaatgaatatataggcttaatttgatcttcgaacacatgggatcgagctaaatcttcagagaaagaaagaaagtatataacagttgaaaatatggagggctattcatcagtcaattattgatcattcttctgaacatggattttttttgtatatgttgttagttaatttggtagcagccgttgatcttctgaacaaacaaactgaacttcttaggattcctagaaaggagaaacgaaaaggaaaaaaaaaagaggcaaaagcacgatgcattcggtttcagttggtctgtcgctgttcttgtggtacaagtttgcgatgctttgaggagtcggattattaaattaaattaagaggaccacaaaagtttagaacgctcactggcttctctcccttcataaaagcagtgacggatctagaaacaaatatcaagatctaaataaattagttaaagttaaagttatagtcccatttctatctatatatagaaaaaaaattagtagggattaggtggagactcccattatcctcgcttcaaacttcagtagtagagacttgagtcctcgtcgctcctatgatacatccgctcctacctttaaaaatatatcttcaaagaaaattgtcttgtagatagaagctttgttttgcaaagaatgtttagtggggtcattaaacctctttaataccatttctacattttctttgttctagccattggaccaagagatactctatcattttcctcgttaaactatctcttgcgtaagttacttttaactagctaaaacaacaattttttattagagacgttattagagacgtatagagtatttagttaacataccctcccttacttttgtgcttcctgtttacacctaaatttggtatctaggatagaaataggaaaagattatcaaagtttggagttctgccggtttcctccagagagggccggtctgatcgccatgtgttggccggtctgaccgccatgtgttggccggtcagaccggcggtgtgtggccggtctgactggccgagttcgagtccggggctgtttttgtcggatcttgggtttccttactcgggaaggcatgtttcgggtttcctttggattctatcccaagttggacgtggaggagggcctgtagagggcaagaccaacccctatataagggggtaaggccggttcattctaacaatcaatctacaatcaatcaattgaatcgtttttcatattgcttttagttttctcttagtttgtccatctttgtcgattgtgccgtaaatcgtccgccgccactgcgagagtgcgacacctctttgtagatttatcctgaaaaacttctgttttacccacgagacgggtagttatttagagtcggctccgctagccggttatctatcaaaacccatctcgatttagcttttgctagattgaggtgattggcgactctaggatcaccgcaagacgtttaggtgttgcgatcgtgcttgtcaacttgtcacaaaaggttgccaacactttcatttgtttatcaggattgctgttgattactactatagctccctccaatttttgtgtgtttagtagcaaacaatgcttgttgcctgatatattcatcagtagtacatgtgtggagcacatcgttttcacttaattaatcgtagctgtatactccctccgtttcaaaatgtttgacaccgttaactttttaagtacttgtttgaccattcgtcttattcaaaaaatttaagtaattatttattcttttcatatcatttgattcattgttaaatatactttcatgtacacatatagtttcacatatttcacaattttttttaataagacgaacggtcaaacatgtgctaaaaagtcaacggtgtcaaatattttgaaacggagagagtactatacttgcaatgttggtgcatgtgtgtgtttactgtatctaagacaatccgatgtataatagcttagaccaaattcgtgggactgatggtcgaataactttcatcctcaattcatctataacgaacaatccttttgcgagacgtcaaaacctagtttcgattatctcgatgatttttacatcttcaatatatataataccatgctcatgcattgcaacagatgactcatatactaggacaagatccaacttattttttaaaccaactctttttttttctatttttctttctaaccaacaatttgatttttttaatggttttctgaaccaactcatttttttctatttttctttttaaccaacattttaattttttaatggttttctcgagtatggtgtggttgtgcgtgtaatgtgagagggagggatgtgacgacgtgtagtgtttttacagtagtaaaaacaattatgtacttttggttggtctgattttttttcctcaactatacagttatacaattagttaaaatcaatccttcatctccttagaaccgagtataaattaaaagttccttatgcttcagaaaaaaaatctattgtgtgcttggcaaaattaaccaaaaagtaactatctctttgtgtggaaatgtatcaaccttttgaaccaaaatctgcaaccttatgcaaccgattatacaaaatacaacagatgcttcacgtcgaggcttttctaaaggcccaagttctcaagatactattttgcaacaatgcaactttacttgcttagcaagggacaagctagagttagcatgtggtctcaattacccacaatcagagctaatgatctagtgaatacattagtttcaatttgtacctgtgtactactctaccaaccaaccaacatatggccttaatttgcttttgacacaattgactcatgctagctactcatattctaaattataggagtattattattaaggttgaaatcaccaatgacctttgttggtctcattagccatcaaatggatggaaccttccaatgaagatcaaactgggattctctgacaatatccagttaaaaggatagcatcaattaaggaagaggttagttggtgatttaattaactgctagatgtttaagttaaactatgtatgagtaatccagattgttgccagtaaactagggttagcatccaaccaactctaattattattaaattaatgttcataataatacaacagggtacgtggtacacctgtaagtcttaggatggatggaatatcatgatcccagcttgcctgttccatgtgagcataattccttcacccaactacatgcatgcatatattatatgtgtgcttgaaatacttcaaaaaactattagggctcataaacatggagctcgcttgatcctttttctactgaaaagaaaattaatcagctatatgttggctacagtggtagagcctattgggtataattttattactaaatctatggttttatataaattcaacgctaaatctgtattttggtgttgcactttttcgaatatagtttttgtgatagtttgattaaagtatatgtattttttaaaaaataatcaattccaaatgacatagtatagctctacatatgtaaaaaaacatgtcgggctgatatgtctcaacttaaagaataaatatcttgtaaatatccatactaaatgcatctaaaacatacatttagtgccattgaaagtactttcttgttagaattttaccatgttctacaaaatatatcaatatatcataatataaatttgtgactaaaattttatttctaagaccgcatctagtgcattatgacgtgtttttgtgaccataagtattcgacgcgcgagattgattggctactcagccctcatattaccattaaccacaacaaaacaccaacaaattaggatgagttctttcccccaagttcccaactcatttccctcgttttccgcgcgcacgcttttcaaactattaaatagtgcgtgttttgtaaaatatttctatacaaaaattgctttaaaaaatcatattaatctattttttaagttcttttatagctaatatatacttaattaatcatgcgttaatctatcgctctattaagcgtgcggaggggaggggttcccaaccagaacacagccttaatcaggccaccaacaagcaacatgtgccagctaggcttggaaatgaaacccccaaaagtacaccaaaaagggccccaccacaaaacacaaaaccggtactagctgggaagtgggaaattctatttaacagtccggatagacatccacccacaggagccatttgtatcttagttcttgtttttgtttttgactcttttgcattacttcctccaccctaaaataacaagttttacttcttgacatggctattaagacatggctattaagaaaagtgatagatgaggtataagctaggactataataaagacgagtgacaataagaatagtatggatagtttagtgataaaatatgtattttacaactacttgagataaactttgaaccctataagttattatattttgcgacggagcgcgtaccatgtggacattacaatggcaatacaataatagataaacattgtcaactgtcaaatcctccccttggcccttgggacccccatggccttaagctttgcaatcatgcaagatcactttggttttttccaacctagagagaagccaaagggatgaggagattctccatgattctaatttagatcgactatctccatgattctaatttatgaacatcctttcttcttccccttagtataggcggtccaaattggtgtgcctaaaatgcaggaacttcaaaggaaacaattttctttcatattaaaaaaatataacagatacaaaaaaaaaaccaccatgaatttgtgatgatttagtcggaaatggttctcagtcggtcgaaaattttccatatttaattaattattcagtgacgactataaaacctcaccgacaaaaaatagaaaaatcagattttgtatttggctaaaatcggaaacggtgccaccaccgtttcatctctacatgattggtttgcactcactagaacatctgtggagcctgtgctcagccagggtcagtgctaagtcagttggagatttggaatgaaatgcataagcatgaggtctttgccttgttggatgccggagcatggacagtggtccatccatggtcagagtctgtgccgttggcccgggagaaacggctgcacgcctttgacaatatgaggtgaccaattctccggtttgtgtggatcagatgatcaagtgatggtatatatactggagtataattcaattggcttgactatattcgaagtaacagattgataatgttatagattgatactccctccggtcatctttattagacgctgagagagctataagtataacttttccgtcgtcaaataaaagtgactgaaaggagtatagaactttttttagaaaaaaaaatttgtagattggcattgtaatcatatgagtggatgcaaatggagcaaaggaaggatgatgcagtgaattatgaagaataataataataataagacaaaagtagataagtaaatatgatatatttgaccagttgatcgatgcaagcagtaagcattttaattagttcatattttttttattaaagaagatcatatgtaggccccctccaaaggcaaacttctctagcatatctacagggtggcaaacaaaatcagatcctaaaatgtcaatttaaatgattgcaaatgaccagtttttcctactaaatgtatatactaactactagtcaatttggtcaaatttttgaaagtttgagtacacatatatggtttacatggatgggatatacaaagttctcatgggcagagacttgccttaaaaaacaacaaaatataatggcaaaatttgctataggacaaccaaaaaaacgtgtaattagctaggagacaccacaagaacgcgtttttgctatagggcaccgtaaaaaaactggtaattagctactggacaccctcgggattattttattataggaaaaagtacgaattacacccccgaactatcgtggtcgtccgaattacccccctgaaccacaaaactagacattcttcaccccctaactatgcaaaccggacgaattacccccctcggttcaatccacggtggttttggtctacgcggcgtaagcgtggcagtccagtcaacattgtatttataaaaaaaattgcgggacccacgtgtcatactcttcatccctctcttctctctctgtatgcctcacttttcctctctctctcacgggtgggtcggcggcggcgggcgaccacgggcggcgggcggggccgaagacggcagcgagcggcgggtgggcacgaggctggcgacaggcgggggcggaggaggaggcggggggcggcggtcgaggagccgaggccggcgatgggcggtggcggagaaggcagcgggcggcgggtgggcgctaggctagcgatgggcggggacggaagcggcagcgggcgg

SEQ ID NO: 7904 - DNA, 46193 bp, Oryza sativa
tgcgcaaataagaaagtgatggttttctcccaatccatatctcatatggtgttttgtccttatttctgttaggaactctgtttaacacatgattcgaggtcaacaatgcctccccccaccatgccttaggtagtcccgcggtgtccaacatggcattcaccaagtcagtcattgtgcggttcttactttcagcaatcccattagactcaggagaatagggaggtgtcctctcatgtatgatgccatgttcctcaaagaataagtcaaactcatttgagaaaaactctccaccacgatcagacataagcctttttatctttctgtcaagttgattttcaacttctgccttataaattttaaaatagtctagagtctcgtctttcgttttcaacaagtacacatagcaaaatatagtagcatcatcaatcaacgtcatgaaatatcgttttccacccttcatcaacacccccattcatttcacaaagatctgaatgtaggagttctagtggtgccaagtttctctcctcggcagccttgtgaggcttgcgaggttgcttcgattgtacacaactatggcacttaaaacctttgacaatggaaaacttaggaattaaacacatgctggaaagccgagacatcaagccaaaattaatatgacataaacgtgagtgccaaacattagcctcatcatccacactgccacaaatatggttcacagacttattgcagaaatcagaaagggaaaagcggaacaggcctccgcactcataacctttaccaataaaatatccatgtttagacacgactactttattagactcaaaaaccaacttaaatctgtctctactcagacgggagccactaacaagattcctgtcgatagaagggacatgctgcacgttcttcagctgcacgatctttcccgaagtaaacttcagatataccgtgtcaacaccatgaacagaagcatgtgacccattccccattaggacggtggaaccccgtgcgacctgataagaagaaaacaatgagatgtcagcacaaacatgtacattggtcccagtatcaacccaccaattagtagactgattaactgaaaaaacagtaggtaaattaccatacccgcttccatctccagtgttgcaaatggtcacattagcagacttagaagtctgccctgcaggtgccttcatccccttgcgctgtggacacttcctagccagatgaccaggttggccacacacaaagcaagtcctctcatcctgattaggattgttgttgttcttcttctgcttcttgaagttggtggtctgttgagctttgtatttccccttgttcttgttctaggccttgtgcacaacattggcactggactgcccaccatcgcccttagacgcaacatctttttctcgagctttctcctcaacatcaagagacgctatcaacccctcaacggagtattcctgtctcttgtgtttgagtgcagtaccgaaacttctccaagatggaggtagttccggagacctgctctcccgatcgccggtgcacgccggcgagcgggatggagtagtttacgagcgacggggcagtacagagtaggaggcaaaccctagattgatttcgcgtgtgttgcgtgaaggcggcggctcggtttatatagagataggtcgcttgatcagggcacccgcgtaacgaaccggataagtcgcgcataacttatcaagactccacgccgttttcacgcaccggattttttggaatgtttccaaaacaaaacaaatccgaatttcccgcagcaaaacaaaactgcaaaaggaggctgcatctgcgcaagggtgaggagccaattttgcggaccattcgacgcgtaggcgagcgagcgcgcgcgtgtgtttcccctcttctctccaccatacatgcttcaagtggctaggagggcatcctcccttttaaggaggtccccctctcgtagaataagtaaggtggtactaaactccacatgcatgctatctcataaggtgggcttttgtgattttccaaagaattaatcttcgaatgggccttagcccaactattaattctaacatctccaccagtggaagcagttgtgctctcggacgctgtccatgaagttccttctcggtatcgcttcatgctctgcagaccacagctccgctctccgcaccaacatgaggttacctgatagggtattcgtagcagtggtttggccatccgttggctttgggctgcacaaagcacagttatgtgtcaccagtatggctacctatacatggttctggatttattgtaaatagttgtagctactactacaacttgttagctgaataatacaatcactaccgaagaaaccatctttatccggtcagataaaatccacaatagcctcggttgcactaaaaaccgggactaaaaagaacttttagtcccggtttataagcgcaacgggagtatatgatctttaagcccggttcaaatgctgtcatgccccctggatctttagtcccggttggtgataccgatcgggactaaagatcatatttttaatcctgattggtactatcaactgaaaataaatctctcacacatcctcctcgattggcacggctgcctaccatatcttatcccctctctctctttccttctttatctcctcctcctccactccttctcaatcctcctcctctttccctcctcctcctccaacgattccctcctcccctcccctctccctctatgtcgcggaggccggcggcaggcggcggaggacgtgcgggggcgaccggaggggaggcagcaggcggtggtggccatcgcgtcgtggagggtggcgacggccgggcaggggtggccagaggggaggcggtaggcggccgcggctgtcgcgtcgtggagggcggctgcagccgtcacgtcgtggagggcggcggcggcggctaggtgggggaggaggcgacctctccctcccctccgccagatccggcgggaggggaggcggcaacggccgggcggggtggcggtggtggcgcgacgacgaagaattttttttcgaggatttgagatgtatttgtttttagaatttgtgatgtattgaatatgtgaagttatctgtgatgtatttgtgatgtttttttttagaatttgtgatgtatttgatctgtgatttagagatggtttggggatttcacaatttggggatgatttggggatgtagtgaaatcaatatgaatgcaataaaataaaatgaaaaaaaactatagttaataccaaccgggactaaagatggtataataccaaccgggacaaaaatccatttttgatcctggttattttaaccaggactaaagatggacatagtcctggattcgtagtcggggttacgaagcatgattgaagatcctttttccagtagtgaatcttattgatacttgagttatttcatggtactctatgatatgtattatgtgtactagttgagctactgttagttggatcggattataaaatcttgatacttgagtgataactgtcagattcatatgtatgggttatgaaaactgcgtaaagtcataccaaattggcacctatggggatctcttcttgttgttattgccaccgttccacgggtgatgctaataggcgcgtaagcgccgccaagcaaagtcgcgcagacgcgcacttgctcccagtcccacgcgagcaccttccgagccttccgctaaaatatgtgttagtgctaatctttagcggtttatactaattgatttttttaatgaaatgataaataaaatagttgggttgaaaattttaaaatacgaattgaaagttttcaatgtttagttgaaagttttcgaatttgagttgaaagttttcaaattttgacttcaaaagttttttatcttgagttgaaagtttaaaaatttcaattgaaagttttcaaatttgagttgaaaattttcaaatcttgactgaaagttttcaaatttaaattgaaagttttcaaatcttgacttaaaagttttcaaatttaaattgaaagttttaaattttcagtataaagttcattcgaatttcaattttttttcatacaccgtgtatataaatgatatgaagctaatcacgtgagatagaaaagagaaagacaaaaacaagtcagacgtgcttgcttccgcttctgtgggccggtgtgggcttagcgccatgcaccgataagcatctcgcgcatacgcggatgaggatgtgggccgcgcgtgaggcttgggccggaaacgcgcgcgagtcgtgcacccattagcaatttcgccgttccactgtccgagcatcagtgtcccctttgcattttttgcactcagtttgccggtgtagaaccaagaaggaagagggggagaagtgttggtataggatcgaacacaagtaaccaagcctaccagaggggggtaaatggtagggaaaaccaaaaacccaaaaacttttagcgaaaataaaagctaccctcaaattcgacggatcacggtctaaccgaagtagatgtgtcggtctgaccgcctggaacacgtcggtctgaccgatgtagatcgatcggtcgaaccgccgagatcgcctgccttcgcctgtcgccgccgccggtctgaccgcctataagctgccggtctgaccgccgggatgccgccgaacccgataaaacacagatcgaagaactctcaaagtagatgacaactttattgcttctctctgtgtttataaagtgcaacaacagcaccccttacaaaaaatctcgactaaactcaaaaccctagctaaactagcagctcaattgctctcaaagcgataccgggagacatcacattccctctctatttataccaaaaaacactactcaaaataggtgtaaaacttctatttccaataggactcaatacccgaaataccttaatttccaaaaccgcaccggccacataaaatccaaaaccgcatcgaaacggactcctctccgctgtcgacgcgtgtcccgtacgcactcggactcctcgtgcgcacgtccttcctgccgcatgggccagctgggcctcctactcctggaccaactcggcctccagccagctgccaccgaagcccaccgagccgctctgccgctgctcggtgcaaccgatcatgcacacatacacgcttcaccatgcatccctttttctcctcaaatttaatccaatctccttcgtgaacaccaacacttgcacacacacctcgtaaatcccgttgcgaagatctcttccacatgatgttcatccaccgtatgccatctcatatccaacttcgtcactcggtatttttgaccgtttggacctcaactcctccctaaatctagtcccgatcccgaccattgaccgaagttaacctccaagaatcctgactctagtcaccttctcacatgatatcctgaccgcactagacctctgctcctccctgagcatagtcgcggtcttcaccattgaccaaggctgacctcaagtcacatgcatataatcagacaaaacaaccgtttctaggcacagatatcacaacctgacccacattagtcacatgtactcacaccaacatccacacatctatttaaaccaattatttattaaatcatttgcgcagccaattattcatcacaaatattaatcatgacaatgatttcattagttgggagcattgttcgaactaaatctagcctaaccacctgatagcactaccgaaatagtcaccgagtctaggtaaaactgaattaaatcagtttacactaaggtttcctatcaattcacctccaagttaaccttctaagctaaatcacttctactcttcactgttatctaggggtgggcattcggtctaaccgaaaattacggtctcggtctttggtctttcgatcttttcggtctttgaaaagtgaagtccgaatttcagcgcgaaaaatgtcaggaccgacaaattcggtctcggtctcagtcctgaccgaaattcaacaacattttcatatatgcaaagaaataatggaaattttcaacacaaaatcacaaaaagaattcataagcacttatgagtaaagactcttattaggttgcatgcctagaagaagtagggatgtgaaaattaaagtttaatcctattaaacatagtggattgtaggttgcatttagtcattttttgataattcggtcttttcggtctattcggctacccgaggagactaaccgaattgaccgaataaaatttggtctttcactacttaggaccgaattgataaccgaatttctcggtctcagtcttttcggttcggttttttttacccacccctacttttatcagctagtacttgatacccataaggtatcagtagtaaggggctatttggttgctaccctgagagaaattgcctgacctaaagccagcctgagactaacacaggtcttgtttggttggtgcccttagattccaaacccttcgcctgccctgacgcagcccttcccgtcattagcgtgagccaggcgaccgaaatcgatcgcctgagctccaggcagcaacagcgatacatacttaccatcctaatctttatccaaagcggccacgcgacgtagattccaggagcgaagctgcgctgcttccgcgaagccgccgccgaccgccatcttgccggatccttgcgaagccgccgccgcccgccgtctttcgtaatccctgcgaagctatgctactctcgctggcgtgcgaagccaccgccgttttgccggatccctgcgaagctgtgttgctcccgccggcgggtgaagctgtcgccgtcttgccggatcccagcatagcagcaccgcccatgctagatgctgcccaggctgcctttcgtgcaaaatagtaagcagatcgatttgcaggttgccagatgcatttgcacatctgggcagaatcatctgaaggttgtgctcctgatgcacggatttgggatctatttgactcttcgattgcgttctcctctctctttttttccctgcttttttttctagatttttatcctcgttatgtatgcaagatttgtgcttgtacatgggaagttgggttcataaatggatcttggcaggaggtttagatgcaatttgtggcaagatttgtgacggccattaataattgatttagctgtgtaataattaaaggcgtaattgcatatttgtttctcaggcagcaacaaacaaccaaacaagcatatactcaggctacctgaccaggttagatgcattgtcttctcgcatgccactcaggcgcacagaaatttcaggcatgttgctcagggcagcaaccaaacaacccctaaatctagtacatggctaccagagctggtacccataaatatcagacctaatacacatgtatcatcccctgctacctatatatcatgtctgatacatgtaagtatcatgcttgatactgtagataacatgatacccttttaggtactataaataaataccgagaggtactacaaggtgtcattggtatcgtacataccatgatacttgcaagtaccataacacttgatgtaccacgagatatcatgatatcctaatggggtgtttgggactgactaaagtttagtccctctgcctaagtaacatgatattggaaaagtactatgatacaaggaagtatcgcgtggtacgaagtatcacgtggtactatggtaacagtgacatgaaatttgaaggcaccacgagatatcatagtaccacataagtttcatgagtatcgtctatatttaatgtttgtatcatagatattgtaggcgtatttagggttaacacttgtagaaacggtcgaaatttcagtaatttcaagacttttggaactttttgcacgacattatttacaatttaacaaattttgactaaattctaataaaatttgacaaaattcgcaaaaacaaattgaagaaaaacaaaaggacgagatatatatcatgtagatacacacgcgaaaaaaagtggattaatgaaatttgagaagattatagaagagttggcctggatagtcgcatttttttttcaggtgatacttaaaaggaagagaatagacagtagcatgcagctagcatgtacactccctccgtaaaaaaaaaaaaagtcaacctataagtcccattctagcactaggttagcttttttttttaacggagaaaatagcttagcttttgcattggcagaaacaacggggatgtttggttcatggcaacactttgccacaccacacttgtggctgccacagtctcttaggcagtctcttaagcatgtgtttagtttactgccacagttgtggcttgccacactttttcaatagcatgtcccacatgtcatagacttaattttcttgccaactttgccacactttgtggctagcaatttgtccaccacacttttgtggctgccacaacttgcctaatgttagttgtggtaaagtgtgaccagcaaccaaacacacccaacgtgtcgtgcggctcgtctcagaggtgtaacgatggatggacatcgttaactacggccgagtttagttccaaatttgagtttagttctaatttttttttaaaacttctaacttttccatcacatcaaaacttttctacacacaaacttccaactttttcatcacattgttctaatttcaaccaaactttcaattttggcggcgtgaacactctacattgtccctccgacgggatacagtttttctgtatgggttactgtaatttccgtagtaaagcacggccccattgctagttacagcaaatatacaaatatacagtgttgcgactcattgtccaaaagcaaatatagattcttctgttattacaatgactagacaaacttgtaacctgaataatgatcccctcctcatccatattaagccttgttcagagggattggaggggttcgaggataaataattccacacctcaatatatgtcaataaatcccctccaaatctaacagcagagctatatcatcaccattgtcttcatcataaaatagagtcgtcattcagaatctttgtaagatttgcattccttccatgatcaaaatatatgaaatctgactctagcaggcctttatctttatctttactaagactgcacgaagcagaaccaaacacatcaatagcagcattaacatcataaacttcaatggcgtcatcaacatcatcctcaaaaagatatccagatggtgggtgcaaaattgtacttgcattgccctcacaagtggtgcaaagacctgttcataaagccaaaacaaagacatcaacatacatgccaatggcaataatggttgctacaatttgtgtactacttgacgaaaaataaattaggagcaccacaacttagagttcagtgactcaccaaaacatgtgctatcttgaacagggcagcagatgggcttcgagtttgattcattaaatcgaccaggttgtgagtcccagaattgagcaaagaagagtgtgcgcttagggtttggtgttgtggttgcctcacgatttagtttgagcacagtgccatgggtgcttgccaagaagttagcatggtagcatctccagtagtgggattgaggttcctccactccacatatgaggtcaagcttatatcttggttcctgcaataacaaacaagggtagacgaagtcttagcacactggaagaaagcaaatgcagcaatcaaacaaaaataaaaaaacgtttatactctaaatttacccaaggatgctgtctggagtatgtgactagcaattcttccagcttgctgcgaacaaacctttgccggttcacatagtctgaccttctcctcgataatgctgctaaagcttgtgtatcaaatggaggcagtctttttctgccaatcatcgtggttagctgctcttggatcattgcgttaagctgctcccaatcagcgttggagattacacagccggagccatcactaatggatctcagcaagtgctgcaggcgatcaagcttctcgccgcagagggacatgaggaatgacccaagcatggtgtgctgcgggtgctctgaagccttggctgcagcagagtaggggttcttgttcgtcatcaccgtctgctgtagcttgtcagtgaggtcacactgcctggaccaaaggtactccacggcctcatgcttggagagcgagcagccagtggtggtggtggtgatggcacggagtagggcgacaaggccgttgagggaacgggatgcaatgcgagacatggcttgggtgtcagagatatcctgcggcaactcaacctcacaatcgccgccaccgccatcctttggatacaggggagggtatgcggcgtcgtaccagagggtgttgatgatgatgtttgatacgggatccaaggggccgaagcattgtccagacatgaggattgcgcggaggaggcgtccgcggcgcatggagtcatctgatacgggcaggggcagcacggcaagtgccctgatgtagaagcaatggatggtgtcgaggaggcacatgttcagggacaatatgtgctcacatggcggggaggcatcatagttcacatgtccatgttcttcacaaccaccaagcactttcgctacgcattttgatagctttgtctctatggctgcgctatctatcgtaagatccgagatgtataggagtttctgaaattgaacatgatttggtgagattccagcaaaacggtcgggggcggcttgagcacaagactcaccatttgggcagcacaagaagtccatgttgggcgggggccattggaatgcgttgaggagcaggtccttgatggactggacgtcatgggtggtgagcaggtccgacccctgaagcttgtggacgataggggagagtagatgagaggggtactgcgcggtcatggtgcgcgccaggtcgtcgggcgcggggtggcctgctttgagcgcggcgatccggagggcgttcttcatcttgccaccgtcggggaggaggggggatggcgggagtgggagatggcggtcatggtggaccaacttgatggcgaggaggaggtcgtaggaggcgaggtagaggtagcgcctggcctggtcgccggtgaggtagcggaaatagaccttcatgaaggcgatgaggccgttgagagaggtggatgagatgaacccccaccactcgctgtagctcctgcgggtcctcttccgggggagcggcggtgggtggtcttggagttggaggggcggtgatccggagaggtgggcgatggcgttgaggatgatgttgctgacggggtcggcgaggccgaagcagtgtccgacctcgccgaggcagtcgacgagctccgggatctcgtccaagggcagccgccgcgccgcctcgtcgtacagcttctgtatggaccggaggatttcgttggccggagggtgccatcgcttctcctcctccccgtggtaacaggtgaatctgccgaagcgggggccatcggaggaggaggcgccgctccgactcgctgctctcttccctggattttttggggattgcacgccggatctgagcccccggcttgctgtcgatttgtgaatttttcgccgcttcatatctcctactgctacgcctaccgccgccacaaacaacgctagccgcaccgcacctgcccggcctcctctctctttatacgccgcggatacctatcctcgtaggaatcggatacggtgtaccctggagccaatgcccagcccacttaactcgctgggctggattacccaacaccaaacggacacggtccctttccttccttcctagtagtagtaaggaataagttcacttttcctccctcaacttatggccgtgtatgaatagcatccctcaaccgcaaaaccggctataacccatcccccaactccgaaaaccgttgcaaatcaacttcccggacggttttggaagcggttttatcctatgtggcaattgacttgcttatatggcagttgacttgctgagtcatcaagcaggacccacatgtcagcggtctccacctcatctcatcttctccctcaccatgattcccttcaagaaacgggaaaggaaaaaaatcaagaagcggaggcgaggcgatagaatcgagcagcaagatcaacggcaagacaagtagcacatgatggttgccgaattcagagaagacgccggtgatcacgcgaaacaagaaaggagaacgaacaaaacaaattagagaccacgaaatcgtcgaagaacacgagcaaacagcaaacaagctagcggagttcttctagcgtgcgcgcgacgcggagcgggtgtccgccatacgcagctgctggcaatgccgccgtcgtccccgtgccggagcctctccgtcctcatgctgcagcacaacccggccctcggcgacatccccagtggcttccttctcggacggacggcgagcttctcccgcgcgcggacggccgccgagctatttccccgcgcgcggacggccgccgagctcctcccacgcgcaaggacgcccggcaagatcctccccgcgcgcggccggccggcgagcttctcccccgcgcgtggccggccgacgagatcctccccgcgcaagccctgccggcgagatcctccacacgcgcagatggccggcgacttggaggggctgcctcgtcctccacgaccccctctcagacaatgccccggcgtcctcccgcctcctctgcgtgctcgagccgggccactcccccgcgcgcggcgtggccaaccgacgagctcgtcccccgtgcgccgtcgtcgccgccctgctgatagaaggtgagaggtggaagatatgaaagagaaagaggggaagagatgaggtggagactgctgacatgtgggtcccgtttgatgactcagcaaatcaactgccacgtaagcaagtcaattgctacgtaggacaagaccgcctccaaaaccgtccggggagttgatttgtaacggttttcagagttgggggatgggttatacccggttttgcggttgagggatgatattcatacacggccatgagttgagggaggtaaagtggacttattcctagtagtaattagcaataagcccacctgtcagttcctggacttttacatcgtgttttttttacctctaaactgtacacaaccgtgcaatttggatcccacagcaatatagatgcctgcttttaatgatgtggcatcctagtcagcaaaataaaaataaaaatattatgtggggcccatgtaagtgacaagaaaagacatagggcccacgccctcttctttcttctcttttcttccccagcctcggtgttagccacgcaaggggaggcggccgacgggagaggtggggagaggtggccggcaagtctgagagggtaggggagaggcggccggcaagccagcaagccgaagctcgtcgacaaggagatcatcccttgcgacgcccatgtttgccaccgccgcccagttcggactggggacacgggtgaaagactgagaaccgatgagagggtaagagggggtctggcccctcaggagcgattgaagatagaaagggatttagacaggttcgggccgctgtgggagcgtaacaccctactcctgtatgtggttgatttgagtggaagaatactgttggggaggtatgtcatgagggccttcagccaacctgccgaaaccatctaggccgtcaaaacaacggctaagttcattggcccaagcccttgggcgaagaatacagacttacgaaggaatgggtcaagaatacagaattgccacgacccaataagctcaaaattcactgatttggatataggaggagataaggaggccgccatccgaaaatgggctggattgggccagcccatgttcggccgaaccctcatctgcgccgttggatgcagggtttggcgtggacgtccaggattgcatcccaatgacggttggagggcatattttcgaccattccaactgccacaaccgttattggcagctataaaaggacctcccatcctcacttcttccacacactcaagcaaggagcttctcatattctctcaagtttaatatactctctagagtacagtggaatagaaatagaatagagtctccggtcctcggagttttcggaagagttcgggtatggctctagtagcttttccttcttttgtaagacttgcaatatttatagaatattattcttaatatatttatggtactatacttcactctgatcatacgagtaccgactttccgatatattattcgagatataattgtctagctagcttactcgggagatgcgactgtgtgggtataatattcatctatatgattgctctatgtcatgacgatgattgtagattagtatttggtagcataagcgaggtgcttaggctattgaatatcattatttagggttatatgctgcgggacagtagaggtgggccgctgatggtgatagctcagtacgggtattcctccacgttagtatataatcctaggttactttcctggggagggtacttgttgacggtcgttatcgatcagtttcgaccgtcaatattaccaaaatagaggagaaccagtgatgcttgcaatgcatatacatgttagaataataatattccactagtattaggtttactaaccttttgcagagaataaccataaagtggaggagaatcgacattaactcagacgataaatcaatcggacgatgtcgacaatcagacttatgcatgaatgggccaagagctcagaattgacatgatgaattgggccaaaattcacaagtctacgaagtgaaacaatagagcaggtcgcctgccgaatttgggccaggttggctggcccctggttcggccgaacctccctctccaccgttggatatggggtttggcagggacgctccagatcttctcctgatggcggttgcggggtacttcagacatttcgcagcagttacacccgtcatacatgcctataaaaggagctcactctcttcacttcaacacacacctcaagcaagagctctgtcatattctctcaagttagtttagtgttattaagctagtagaataggaatagagtagaaatcgggaatccggaagccttcggaagagttcgggtatggctctagtagctcttctcttctctattgtaagctttgtactagtattagaatactcttctttatacatttatggtattgaaatactttttgaatatataaatgactactttacattatgttcatattatactgaatatgttgctaacttatctgggagatgctttagtgcgggtataatgtttgcatatgtaattactctatgtcatgataatgatattagagtagtatctggtagtttagacgtggtgtctagattacgggatattattatttggggttatatgctgcggatgagaggtgggccgctgatggtgacagctcagtacgggtattcctccgcgagtgtatataatcctaagttaattccctggggagggtactcctccgtatttagccccggttgtatggtcatgacgggctgtcgtaaggaactcgacagccaggggtagcttctcgaagtaccaggagggcatcagatagagggtattagctagtatatcagataactacccttggaatactctcgggtgaaacgctacaatagtatatccatgcgcttgcggatgaactctataaccataatataccaggagtatttctgcgccattgctgggaattatatttctagtaatgtcgttaagaaataccaacaaacatttctggcccgttgccggggaagattcataatagagattacctgaactaatactttataattacctctgtataatcatttccctttgcaggctaaccttggttgttttcacttttgttgtgaaaacagggtagtgcatgactggtttcaacttgccgaaaaacttcaaagaaaatccagaagctttcttccggagcgtcagaccgcgagtcactgctccgtagaaaactctaccgactaagaaaccagccgtagcagcgccaaccgactttcaagactatggctgacaagactccccgcgagttcattgctccctctgctgagaatgtggccattgggccgcagatcaacatgggagacgtggatttcgacttgaagtccagcctcatcactatggcgcaggctagcccgttctgcggcaagcctaacgaggatgccaatgctcatctgcagcagttcctggagatctgtagcatgtacaccataaaagggtgtcagtccagacaccgtcaggctaaggttgttcctgttttccctcctcgggagagcgaagcagtggttctacgccaaccgtgctgctgtcaacacctgggacaaatgttctacgacattcctctcgaagttcttctcgattggcaaaaccattgcccttcgtggaaggatttccagtttccagcagacaagggacaagtccattcctgaagcatgggaacgacttcaggagtatgtggctgcctgtcctcatcatgggatggacgactggctaatcctgcagaatttttatgatggactcactcccatgtcccgcgatcacctggacgcggcgactggaggagcattcttttgtaaaacggttcgaggagccattgatttaatagagaagatggtctccaatatgggttggagcgaggaacgactccagacccgtcagtgaggtatgcacaccgtcaaggagacgaaattactcgctgccaagctagacctcctcatgaagcgcttggatgaccacgacaaacggcctcaaggcactgtcaaggccttggactcacacgttacatgtgaggtctgcggcaacatgggacattctgggaatgactgcccagaaacccgtgaggaggcgatgtacataagcaacaacaacaacgggtaccgtccacaaggaggccaggggtggaaccagccacgcccgtattatcaaggagaaaccaatggggtagccaaggaagcgccatccagtgactcggctgacaaagagattcagccagaaaaggtcgtgccgcaggagtactgcgacacatgattgctgccatttcctcaacggagtaggaaatagttcgtggacgagcagttcgctcgttttttaaagtgcatctagggccctaatgattttgatgattgattacaatgcgattagagaggactaacatttttattgaagcaaatgtgaaggttgttatgtcctcgacgtgttgtaattcaatgcatatcccgtaaatgcgacatcgcgatgcaatggggcaatgatcaaatggtatattgtatcttttaccttgcattatatcgtaggaaagccgtgctattaagggggataatgcatagacatataaggagtgatggccggacatagatagagagagagacagagcttgaagagctcggttggtgtggagggaaaaggaccgacctcgtcgtctatttataggccgcggaagtcggttcggacaggagaaggagaagaaggacatggcaatggaggcgtggagaagaagagcacggcgccggctctgtccgctgattggccggtgatggcggttcgctccaggggctgacgtcgatggcgtgaggtgacggatgacgtcggcgatggttgcttggcgtcgagggcaagatggcagcaacgtcggtggcagaactgcgggcgacggcagcggctgcgcgtgcgagcgtgcgccaagcgcgtccatggcacacggcggtggcgcccacgggacagggaggaggatcggctgtgtggctgggccagcctgggtcttggtctgttagggttagggagatgggccgagaggagacagaagtagatttcggcccaaaggaattgtttcttaatttctaatagaatttgaaggagatttggatggctaggtttgaaaggaatttatatttggaggaatttatatgtggagatgaatttcaaaataaagaccttctaatttatttgagtgcaatatatttagaggtagagtggaatttgaaggaatttatttggaagcacttaaataaaaaaagaataatattatgaatgatagggctcctaatttggatatattttgggggagtatgataggaaaatagatagagaaaaataaataggatcttagcccccaaaatatatgatatgggttttagagaattatttgaggcaaaaaggaaatttggatttctggatgagaaggataaaatctattttcttagcacaagagcaattattcacaatattgcaataataatattctcatgccgataaggggatcaagccatataaattaaattggcggctaggtaaaaggaggaatttgaatatgggaatgttggaaggagaactaaggataggtttaagatcaaaggatgggttaacaattaattccaataaaattggaattgctttggtttaggttgtagcgcaatattgagaggttccttggaccatagttcataaaagtaaaaagggttttcaaactaaatttgaataaaaggaattttgtcaaaagaaggttttaaattaaaactagatcaagaaatacctccagataaattttaaatggagatcgcaaaagaaattaaacaaaagagaggttttatgcgagttagttttaggaggtccctctaattataatatcctaggtttaggaggttaataaaaacataaaaaccggtatgatgtataattagaaaatagctagttttcacgatgttacatactccctccgtttcatattataactcgtttgacttttttcgtagtcaaacattttaagtttgaccaagtttataaaaaaaatatagtattatttttaacacaaaacaaacatataataaaaatatattcaatgttagatttaataaaactaatttgatatttcagatgttgctaaaatttttttataaacttggtcaaactcaataaagtttgattagaaaaaagtcaaatgacttataacatgaaacagaaggaataattatttttgacatgtatcatggcatacgacctcattgtttgcttattggcttacaagtcacaaccaaaaattgaatttttcatatgcttgaattttactctactcttaacactttaggccatgtttgtttcggctttcgattattataatatgaattactagcattaatctgaaacaaatagaaatattattatattctataagtcagattagtataatctggtaatctcctataaacatgctttttcagattatagggtggctaaagacccactaccctttaatttttttttgcaaattacccaccactgccatcgaacccaacaggttgaacgcatccgcttcctctctgcccagttgcacgcgaatacagcgcctccccgcgtgcatctgcttactctctccctagtcgcgcgcaaatccttcccccagcccccaccctgcgccctggctccttcccccaagcgcaaaaatccatcccaagccccccaccctacgggccccttccccaagccacgctgccgccgccgtctcatattcctcccactccacaatagctgagggcatccaaaatagccaagggcattatagacattggcttgtcaaactcaataatccatgccattaataatccagataatcaaataactcatagcttattctactattgcttattataatctagcttatagtaatctggcttaataatttagattataatagtcttaagttgaaacaaacagggccttagaagccaaggttccaaggtagtcgcaatgaatcctatatatacttataaagttagtcatcactaagtgcaattaattttaattctctattctcacagccatccacgtcaccttaaattaatctagccaccggatttgcatcagacgtccaagatcgtcatcgttgatttgcccatccaaatagctgatgtgcactgaagagtccaatatgtttgcatatcccttccgtcctaattgggccaatgcattcgagcccattctgttttcttcctttaattgcaccatttagaggaaaatttgcctataataacaaaatttgctaaaattgcaccatttagaggaaagtttcatctagtatgtactccctccgtttcaaaatatttgacaccgttgactttttagcacatgtttgaccgttcgtcttattaaacaaattttgtgaaatatgtaaaactatatgtgtacattaaagtatatttaacactgaatcaaatgatatgaaaagaataaataattacttaattttttgaataagacgaatggtcaaacacgtactacaaagtcaacggtgtcaaacattttaaaacggagggagtattagagaggactattacaatgtaaatttgttccatgcctctggcgactacaaatttacagctcaaaactgatattatctgcaatattaagtatttatttgtgttttctcggattttgaagtcactacatttaaatggtgcatccatagagcaaatgctttcagggattatatgacgtttgcagttactctaatgtaatattggactttatcagctgcatgagggatactaggcacctgcttaccatacgatgtctcattggttgatcggtacagaggactgcatggtcaaatgagcaaaaattaaaaaaacatcgaactgctaccaggtagaaggtaactcattacaaatccaaaagtccgccctttaagctactcggagagaataaaacaccatggcatcatccttgtggtctcaaccttctgaataatcaaaacagtggtgcatcaaacattttcctcttcctattcgtcttcgtcttcctcttcatcttcttcttcgtaagggtctccaaaagagtcttcatcttcgtcttcgtgagagttctcatcttcatcttcctccacttcgtcctggtcattgtcatatccttccaaaatctcgatttccttacaactaaaaactgcacaaagaaacaaataagaagagcacagtaaatttcaagaggtccaacctgaaaattcactccaaaataaaaacttcaaatccattgacaaacttagtgtattggaccaacccttcaaaatacaaattgacataaatacttcattacttctccagatccaaaatcagattatgtccactacttcattcaaagaaagggaaacataataaaatgccgtcacttggagaagcattggtcctttataatatggttgcatcctatgcggcataattgctggattctctatagtatagcacacaacaagaagaaaattgtatggtctagggactatatgggtacttatggcaattcataaacaagatttttggacacaatggccaggagctgtgagcccaacataacaaatataatttagtgtcaccggagaacattaccttaggcaaacaaaactactaagcaatcttgcccaattattggttactagctgctatgatataaccaggatggctagtgcagcaagctggcacactcagcacctctagtacggtaaactgatggttacagaataacaaagttttctcacaataatagagttcaacaacgagataaaaagtatgtgaggtacttgcgtacatggaaaatggcatgcgagctataagatggcaatatcgactctcacaaatatacaactaatgggaaagaaaatcaaatcaaatgattgaaagatataattacatactacacacatgttgacatacttgttatgttatgcaagaaaattttagaaatcttaatatgcttttttgaatacaaccagccaaaagagtagtctagataatgtcttcccaaccataccaaatgcagtgcatatgctttcaattcccaattaatccatgatcctaacatccatttcccaataacttagagtttcgatactgcttactacatttcacgcatatgaaggcaaaggaaaatttcagaattgtacaaagaatgaagaatgtttaagtatgttgaatgtagacagatttcaaaactttgagtactctcttatcaaccgcttcgcatttgatttcaactatctcaaggtgtgttgatattacaagtgatctatccattgaatggcagtttcctttgattttcattctatgtttaggtccctgtcagaaattaaacattttaaagtcaatagaaaaatgccccaaaacttcaacaagtaatcaattggccaattagataaggtataccttggaatagatctgaagaatgagattctctagaaccagtgcatgttcaagaatgcaagatagtgcactaaaatcatcaggcacacaccagtattcattgagtaacaaagtctttaacttggtaaatgttgggcaccattccaaatcccttttgaaaataaactgggtaaaatgcaaacaagaagataaacaaatcctcagagttcaactggatataaacatagtataatagaataataagacaacataaactacttaaagatggaagtgcaagcataccaatctacgttcatttatcagcaccaacgtcttagcttctgataaaccttccaaacgcatgcatttgtggtccttgatatcataacaaggttcaaagccctcacaacaacaatccccaaagtcataatgactacacgattctttataacagtagaggactctaacaaatgcgtcaactaacgatggcatccactcaagcactggagtcctgccatggaaatcatccagcttcagagaaacaagactcgggatagcgatacgtatccgagacgtctcactgaaataggaattggttatgctcaaacgttttgcagagctagatgagatcttggcacagtcaaatttgcatgactcaaacactagatgctccaatgctggacagctcgagaagttaagaaagctgtcgtttaggcctatgttcttaagctgtagcctcgtcaagtgtcgggagacaagtggcatctcatctatcagaaacgggaagcgataccatatatcgacatcgagcaagaggaaccgaaccttgtggagcaaagcatgcctgaaccagtggttcacccgtactgtgtcatcgaggccctcgtctctgtaccaatcgagccaacggaaccttagcacgcacgtgtcgagaggtgcgccatcacggagtagcagcagacggtcgagaaactccttattgtccttcacgcagcgcagatagatatcgtcttcgccaatgcgcagcccggtggcagacttccagaggtggagccatcgccgggctagcaggcacgtccggacagcctcctgcgccggtaggaaggagagcacgtggtggagcacctcgtccgggagggtcccctatgcggtctcccccagtcgagggaggcgattccttggccatcttctgcggagacattccgtcgaacaggttgcgggcgtcgccgcggcgcccccactggcgtagcaagaaccgctcgggcgacacgaggagcgccaaatcctagcgtgaacgagcaggagagagggctgtgctgttcgggtaagcagctcacatcgccgccggaagctttcccccggccaccggagaccaaagagaagagagtggaacgcgcggcagcaaggatacgcacgccgacggcgcgacactcgctagcccgacgaacggtcaggtcgcgcggggggtgggggagagaattccggcggggcgaggcggatggagaagcagcgctgcgatgagcggaggaatcgccggatcggagtggagatggagaagacgacggggtcacagactcagagtctcacggaggagatgaaagttttttttttcttctgtttttttttttgacgggaaggagatgaagggatatggctgggtttccagattttttacttatttttaaaaaaagatttaacaaataaattttcaattttaaagttttacagaactatactctttccaccctatcacacggcgggacataaatcgtcatacagtagggcaatccatgtgacgtggcaccccgtaggagaggcgcaccaacggagagcttggcagcggcgcaaggtgggcggcgagctcggcggcttcctgcggtctgtggcgacgagggtggcaatggacggcggcagcggcctcttcctagcgacgacggcgtcttcgagtcccttccacaggtgaggttcttcgttcaaccaccccccccctcctcccctccccttctctctccatagaccaccttctctctccctttttttcccaaaccacccgtgcttccgcaaatcacactaatatgtttgaaccgctgccttttgtatttccttttattttgaatctaacgtggagcttgagaccgctgtccatgatggtacattgaacatgatcttagtagtagtaccctttgcagtggtcaatgtacctttataagaaatcctcctgagcaaaagatagcatagcggtaaaagccatcaccttttttcatgcttctgcaccaaccatttcttcaagctgaacaagagcattgtagcatgcttaaaggccaactccgcgcttcagtaaccaaaatctcacgttcttatatttataggtcaaattttaaattcaaaacttaattttggaggtaattttgtggttcttttcattgtggtttatatttacagaatttgcttttgaatcgctaaggacatgtatctaaaagttttacttataaattattttttgttgccaataacccatatggataagtataagcgaaatgttagcttatatttctacgcaggggcggaattagagtatattagggggtgcccaggaaacctgattaagaaaattttttagctatatctcacttttttttcaccatgtgtgcacccccgtccatacaaacttagacaccaacatcaatttaaactcgatttaatgtagagtaaattaaacatgtggcaccccgtccatttcattccagctccgcccctgtttatgcggagtttcttgtaaaaaaaatgcctagaacatgtggtccctttgcatgcttaacaatgtcttaactctggtcattctcttatgtttagtatgcacatggaatactttgttattgatcggccagtaatatttacaagtttacatgagcaattagtaacatgaaagtcttgtgcccctcaaataacagactcccaattaggggtggatgtcgagctggctcggctcggtctggctcgttagaataatgagctagctcggctcggctcgttatcctaacgagctaaaaacccagctcggctcggcttggtctggctcgttagaataatgagctagctcggctcggctcgttatcctaacgagctaaaaacccagctcgttaggctcgtgagctttgggggcagccgacgaccacggaggcacggaagcagctcaacctcgccggcaccttgacagctcaccggcgaccacggggaggagcttgacggtggaggaaacgagctcgagctcgccggcgaccacggggaggaacttggcggtggaggggacgagctcgagctcgccggcgaccacggggaggagctggacggcggaggaaacgagctcgagctcgccggcgaccacggggaggaacttggcggtggaggggacgagctcgagctcgccggcgaggcggcgaccacggggaggaacttggctgcggaggggacgagctcgagcttgccggtgccgtcaggcacagggggaggggcggagagcggcgacggcgtgtgggacgagctcgagctcgccgacggcgtcgggcgtgggggcagggagagtcggagagcggcgggccagcggcgtcgggcgctggggttaggtggcggcgtcggtcgctagggtggaggcgcagagcggcggtgttgggcgtggccgcgtgggccgcgtcgcgtggcgccggcgtgtgggggagacggggagctcagccgccaccactagggaagggggaagggaagctagggttttggtttttggtctattgggccttctaaataaatgggcctatgggctttgtggtctggcagcctagctcattaaagctcgcgagccagctcgagctggctcgttatctctaacgagctaaacttccagctcggctcgctaggaaaatcaaacgagccgagccgagcctgtcacgagccgagcgagctaacgagccacgagcttcctgtccacccctactcccaatcatatgcatactatgttttgagattacctttaggttaaatgaaatgaacagggagcattctgtcaataatagttaatttgcgtttaatggtatttctgcttaagccagtattaatttgcgtgcgtatctaagcgcggccgtgtattccctacgcactacatttataaacagagtagatacagaactccccacaaaataaaatagcaagtattacagcaagcccgtaattaactggtgattacgaattttaggattagagaggactattcaagagtaaatttgttcggtccctcagcctctggtgattacaaatttctaggtgagctcatgaatatgttgatcagtgcagaagactacacggtcaactgagcaaagactactagaaatgcataataaaacgtcaaaccgcttctgggtagatgacctaagtaacctagggactggtttagttcccaactttttcttcaaacttccaacttttccatcacatgaaaactttcctacacaaataaacttctaacttttttcttcaaacttccaattttagtcaaacttccaattttagcgtggaactaaacacagccctactacaaatccaaaagtctgccccttcaagctacttagagggagaaaaacaccaatgttaccatcctttaggtctcaaccttctgaataatcaaaatggtggtgcatcaagcatcttcattgtcatcctcatttccctcttcgtaagagtcttcgtcttcatcttcatcatcatcgtcttcgtaagagtcttcatcttcatctttatcatcatcgtcttcgtaagagtcttcatcatcatctccatctctatcttcgtcttcgtcttcgtcatcatcaaaaatcccgatttcctcaaaattgaaaactgcagaaataacaaatacgacaagcacagtaaatttcaagatgtctcagctgaaaattaacttacagaagtttcagttacttcaaaacgaaaacattgaatcagttgacaaaggtagtccattagatcaatctttccaaatacaaattgctacaaataccacattacttctccataaaaaattctgattatacccactacttcattcaaagaaaagaaacataataaaatgccctaacttggggaagtattgaccctttatttcctggttgcagcttatactgcagagttgatggattctctatagcctggcacacaacaatagagaaatatgcatgctctagggactataagggtacttataataactggtaaacaagatgcttggacttcaggcctcaatggccaggtgccgtgagtagagcccccacctaacaaatataatctagaggcaccgaaaaacattatcttagctaaacaaaagaactaagcaatcttatgcagttattggcactagttgctatgatgtgactaggatggttagtgcagacagctaaagagcacattcaggcattcagccctatggtaggttaagctgagacttcagaagaacagtattctctcacattagtagtttgacaacgtgataagcagtctgtgaggtacttgtccacatggcaaatgacatgggagcaataagagcaagtaataaactggaattcaagatggcaacatcaacataaactgcaatatgcaactgatgggaaagaaaataaaatcaaatgattgaaagatataattacagccatattacataaaaattatcatgctggttgtgtgatgcaaggaagttttaagaaatctttgtatggtttttcttctttggatactaccagccaaaagagttatactaggtaatttcttcccaatcagaccaaatgcagtgcatgctttaatttctgaatcaatccctgttcctagccatttccagtgaacttaagagtttcaatactgcttgctatgtttcacgcatatgaagaaggaaaatctctgaaatatagaaaaaaatgaagtatgttctttacgtatgttaaatgtagacagatacttcaaaacttcgtctacaaagttatcaatcatttcacatctgatttcaactatctcaaggtgtgctgatattgcagctgatctatccactgaagagcagtttccgttgattttcattatatgttcaggtccctgtcagaaattaaaacatttaataagaacaatagaaaaatgtttaaaaccttcaacaacgaattatatgtcaaattagagaaggtatacctcagaatatatctgaagaatgagattctccagaaccggtgaatgttcaagaatgcaagctagtgcactataatcatcaggcacacaccaatattcattgagtaacaaagtctttaacttcgtaaatgttgggcaccatttcaaatcccttctgaaaataaactgtacagaatacaaataagaagataaacaaatcctcacagtttgagtggatataagcacggttatagaaatgatataatataaacgaactaaagatggaagtgcaagcgtactgatttttgtttatttatcagaaccaacgtcttagcgttcgataaaccttccagaagcacacatttgttgtccttgataccataacaagattcacagccctcatgactacaatccccagagttagattcactacaaaagtctttagtatagaagaagattctcacaaatgcgtcaactaatgatggcatcctctcaagcactggagcccggttgtcaaactcatcaagccgcagagaaacaagacttgggacatctacacgtactcgcaaggtcgcattgaaactacagcaagtgatgctcagacgtttcaccgagttagatgagatcttggcacactcgaagaaacaaaactcaaacaatagatgctccaacgctggacagctcgagaagttaaggaagctatcatttagacttataccgtaaagctgtagccttgtcaagtgccgggagacaagaggcagctcatctatcggaaccgggtcataaaactcccagttttcaagctggaggaaccgaactttgcgaagcagagcatgcttgaaccaaaaattcagccgggctgcgtcctcgatgagctctttgctgtgctcactaaaccttagcacgcaggtttccataggcacactatcacggagtaccaacagatggtcaagaaactcctggtggtccttcacgcttcccggatcagtctcgccctcgccaatgcgcacccccgtggcggacttccagaggtggcgccatcgccgggctagcaggcacgtccggacggcctcctgcgccggtaggaaggagagcacgtggtggagcacctcgtccgggaggtcccctatccggtcgccgccggtcgagccgggcgattccttggccttcttccgcggagacattccgtcgaacaggttgcgggcgtcggcgcggcgccccccctgcggcctgcgcggagcaagaacagctcgggcagacacgagggcgcgccgataactagcaggaacgagggatctcctgggtcagcaccaagcagctcgcatcgccgccgcggcagcttccggccaagaggccaccggagaccagagtagaacgcgcagcaccgcgtggcgcgtgcggcagcaagagtacgtacgccaatggcgagaagcccgacgaagagtcagctcgcgcggggagagggaatccgtggggcaaggcggcttgcagctggcggcggcggcggcggcggcgcgcgcgaggatgagcggaggaatcgctggatcggaggaggtcagcctcgatcagtttgaggcggcgaggagagagagagagggaagggtggggaaatggaggtgattagtttcaccctatttgcaacgatttgccactgccccacatgtatagacacatgagagcccacatatcacagtgagtggcgactcgttaattaccatatccaaaagtgacaattaaaggatgcatgtgaaaatatacccactgcattgttcatgtataattctaatgcttctttctttgggtgaaaatactccaattgacatcctaccagggtttcccaaaccgccggagtccgggttacggcgccccggtggtaagcacggttaccgcgcggtaaccacgataaccgtgaaaaaccgtacaaaatttatcaaaatttcaaattattttttaaatttatttgaatttaaggaggttaccgcagtatttatattaccgtacccccgcggtaagcttggtaactgcgcggaccttgcatcctatgcagttcctttaaatcaattcgaacacataggtgttcttctctcgtcaacttatagatttttcctcgatttccgttagcatgtgttttcaaactgataaacgatgggtttcatagaaaaaactttctatatagatgttactttaaaatataaataaacacatatttcaagtttttgataattaaaagtcaattacccatgcactaatagctttctcattttatgtgccttaacttcatattcatcctaatcaatctcaaaaaccacctagcccttcggtaattaaacgagcaaactactcccatcgtcgcgaaatataagggtttttggctggatgtaacatagactacgaatataaacagccgagtccatattcatagtactaaaatatgtcatatccgactaaaatgtttgttcgaaatacacccccaaacttcaaaattgggtatcaacccccctccctcaactattgaaatcgtctaatttacacacctaagtggttttcttcacggggtcgaggtcgccccgctgaccccgtcccctctgcaagggacgcaagcacccaacgccgtctgcgtcctactatcacaacacgtctaatatgtgacaggaaaacaaatggagggagctagacggggatggaggaagggatgaggccggggatggagggaggtatcttgccggcagcttcggctcctccgtggagcttatcgagggaggggagaagagagtgtgggattgacaggtgggacccctatgctgacgtggaactacttgttgaatggcatccaactataccaaaaccagcttaaaaaccactccaagagggtaaaatgtccagtattgatagtttaagggtgcaatatacctagtttcatagttcggggtgtaaattagataacatgaagagttgaggaatgtacaatgaacttatccctatattttggtacagaagtagtagtatgctagtatttgacaagaactgatcttttaagatcgcataacagctttatcagctattatttgataaggctctaaaagaaaagctatgtttcgacaagaatgaagtaaaaatgtcaatttaaaacaacacatctgataaccggcttaatcattgataacactttttccccccaagtatcagaacaagaacatagttgcagaagcaataagacatcacatgagcactaggaatcaaaattaagacaatcaggttgctgcatgacatccacaaattggacccgaaaagcattaggagggatcggatagttcttgtactgctaaaatcaagattcgagacagacattacaaggactgacatcaaggctcacagcaaaaggtgttttcatgtgatgttgtcttactcttagctatgagcctgaaaaataaaatgaaccttatatcttaagctaagacttttgcaggcattttcccagaacaaactgcagcaaaggcatctgcaaatccatgaactaatgtagtgccctttgctagtttgctgtggtcaatgtagaagtatcttgctagcaaaaatgatactactatattgctgtaaaattcagcaccatttttttatcaatcccttcaccccaggtatctctactaacataagggcacccacaatggttatctataggctctctataagagatccatatcagcatattttcctacatggaagatattaaatgaagagagagagcaaaactatctactaacttagagatagtctatagagaaaaacgagacaatgcatgagagagttatagatactcatgtagacatactattgtggtggtttactattaatctagtctattgctaagatgtacatgttttatagatagcaccttactttaccattgcgggtgctctaatgcctcggcatgaaccgcttctccagactgaaacaaaagcattgcagcctcaccatgcagtccaactttggtaaccaaattaactcttatatctccttgcagagtttattgttacccaaaaaaaaaaggatagaatctgtaatcccttggttgcttcttggcatgctgcacgaagccctttgcttggcctggatagaagttgggtcagctctacttgtttcatacttcctccgtttcacaatgtaagtcattctaacattttccacattcatattgatgttaataaatctagatatatctatctagattcattaacatcaatatgaatatggatctagattcattaacatcaatatgaatgtggaaaatgctagaatgacttacattgtaaaacggagggagtatcaatcataaagccgaaatcctttcaaccctacaaaacacaagggaaagatttctgtcaaccctgccagtactacagaaccaagtgtgagacagtgcacttagaagctccacacatcgcatattattaaggggcgcgggctggggcgatgttggtgcgggccacgtcgcccctttttcctcccgccgtccgatcaggcgtgggcggctgggattgaggcgcgcggtggaaattttgcgaaaaatccctccgatttatatataattcaatatgggtccctagcgaacagttcctatgagccgatgttttacgtgaaagcccttgtagtagccggatattccgtgcgtgggagagaaaaaacgcgaatcgggaccgcgctgtacaatcttaaagtcgaggggattttttgcataatgatccccattagcccacccacccccaaaccctagccgccgccttccgtctcgcctcctcccactcgtccccatcctctcgctctcctgcctccgcctccgcctccccctcgcgccgccgcctccgtcccgcgcgaccgcctccgcctccgcctccgcctacgcctccgcctacgcctctgccttcccctcgcgccgccgcgtccacctcatcgccgccgccgtcgcttcgtcgtctcccagcgcctcagcctccccattgcgtcgtcgccgccgctgtcgccccgtcgtctcccagcgcctcagcctccccatcgcatcgtcgccgtcggcgagcgcacccatctccgcctccactagcgtcgtcgcctcgcgccgccacttccaccttcgcctccctccgtccctgccgaccgccgtctccggccaccagcgtccggatctggcccccatgtggtcgggggacggggatctgacatcccccgtgcgccgggcagcatctccgcctccgtcaccaccgtcgtcgtcgccgagcgccgccacttccgccaccgcctcgccccgttgctgacgagcccgccgcccctgctgcgtgcttcgccgccgtcgccgacggtcggtgctccaccctccgttgcggctgccatcgaagaaacggcggtggtgacggagccggcgccaaggaaggcagtggttgcgtcgagaagaggaggaccgtacgtcgccaggcggctccggctttctctagaggagtggagttgcagagtgacgtggaagccggtggcacacaggagctagccgacgagcttgacaccgagcagcttgggctggagagcaagattatggccatcaggaacttcttggaaggaccccgaccatgtcctccgtgatcccatttttactttctcgcagaatatgctccaaatatgcaactttcttgacatgaactgtgcatgttttttgtgttttgtctcagcccaaccgccccaacgacgtgctggtgaaatagtgagcttactgcaaaaccggctaaacatgaacatcaccttcaaggagctgcaggtaaagcttttttgtccttctgttaattttattcctaagcacgtttgcttttctcatcgggggtaggacggtcctgctgcggctcaacctccactggggccacatgctttgactggccatcatcagcagggtcatccagcctcctccgccggcgagggcgaccagcctgtactgcaggcttggaccgccgtaggggactgcgggcgccatggaggggccgtgctgtccctgtgaccaatggacgatgacagttgcggctgccgcgagtccacgccgactgcgaggcggttaatgtcgatgacatgttcagcctgcgtagggatagccagatcggcaaggatcagtttcatggtaattttttcttgcagctcctccctgtcagcatcttcttcctctaatctattctagattttcagtgtatcaacatgattgatttcgcagccaaatataatccattccttccgtcccactcctattaaaaagcttgacctttttaccaaccgatgtcatgttgttagccacatcctgttcttagttttttctaattgtccattcgctcattgggttatgttaaatatttttgaacgggttacgaattttgcaatatagtactaataaaacacataacgtctctccttttgtggagttgtctgattattatctaggatcattcactgttaggcctcaacacatttttttaattcctccataatgtgagagatactaatgactgttctcaagcagtaaaggaaaaccacatatttagattagttagccttccttttctactcttctcccgccatgtattgtttagtttatagaggagatcagatggacatatgctaccaagtctgtcatttcaagttctaaaaaaaaagtcggatcatttcagtggtagttgggcaaaaatatctgttggcatgcgagaacttttgcctacttattttaagaatgtttttgaaacctaattaggctataactcatatatcttggaatgtcctatttgttatatttagcgttgttttcattactcactgatgaaaaatttaggcaggggtgcatggattcacatgtttggaatgagatcatgaaaggatagatggcatcccaaggaactgaagaaaaacaaaaaactgtaggatcagcaatagcagttagagaggctttctggttttttgaaagggtattttagaagtttactcaagctgaggttttggatacagttaagcatttcataaacctttctgatgtgctaatacactccacatgtaaatatagaaagttactataatggacttttccaattgtagctatagctgagtgctaataccataaatttgcaggtactaatgaatacataatgaattgatctacccctccactcaaagcctcaaatcatgtcgctccatacaagtcgaatggccttgacaaggcatcagagatatcggtttgttcggattctgctgatcaaagttttagagtcgaggtctaatatggttgatcacagggccaatcttgtgcaggtatcacagaacatgtttcaggcattatcttatcacatattccatatgcttatattatcatcctttttttggcataaatgcttgtaccatattaccagtagacatctgctagcccactagaatctcttgatggagacgttaaaaccgccatggatgatcatttagttgtctgtttctgcttctgccgacataaagaaaatcacaagttcactaaacatctcccacctgtggtgactgagaaataggagctcaactgcacctgcttcaggtggtcggctttcctccatgggacatggacagagctatcatccacaatgtagaaaaaaaattaatattagctgggttagctgaaggacaaggccaactaaatttcattaatattttaggagagtggttacaaagattattacaccaacaatagggtgtcaaaaccgggtagaaaaaacaagggatcaaaacagccggaatcggtactgtctctacggaaatggccctcggtcagttggtaacaggccatatttatcaattaaactattgtttatatgtagctaaaaaggacaacggtcaaaaaggtaccaatgatatgaaacgacactcagtcggcagggaatttccgtggccattttcatccctagaaaaaaaccgacctacaagtgtcaaagccctcaaggaaatttaaaggtcatatcatgtaatatgcaacaatgcaacataactaaaatgggagggagggagggagggagggggttgttaaaaccaacttttttaccacaaaaaggtttcaaatttggatctgcatatgaaatttagttgacacgaatttttttgacaggttttgtttgctcgttgtgtgatcattgttgcagcagtacatgccatccatctgataaattaccttgaatgtctcaatgttgaccacttaacattagcaatttgcttctttagattcttattgcactccgaaaatttcactatatgctcaattctattgttcctatatctaaaagcagtatcatctctaaatgattatccacttaaagcagtaccatctctaatgctattgttgctatctctaaaatgttgtgagtggaacactctgaattgcttgtgaggagcaggtaaatggttgttgtagttaacctaaactgcaaccgttttttagtgtttttatcaatgaatgattctcctattttagtgccactaaggctaaagctatttggtagagagcttggtaaaaagactacttcctccaatcaacagtatttgatattgggagtaataagttagtactcctgatgtcaaatattattgctaggagtgaattcaaaaagttagtactccctacaatcaatagtgttattgtcaaatattattctcgtgtaatgcattagagatcacaattctttgcttagtagtcatttaccatgattttttttcattttctggcaaagttgaaaaattaagcgaccatgctcttatttgcagcagtttcatggatgcagagctattggaatttgcaaactaaaacatggaccccaatgaacgtcacgactttaaaagtatgtcttgtgcacatgattttgccctactcactttcttttttgcagatatattggcatcggttttctcgtatcacatttgatagatgaattgtttgtagtgttggtgcataatttgttatatacatatagcttccatgcatattggtaggatagaaggcattaatatggactttgcctgttgtacatgagcacacttgaggcctaagttagattttcagtcagccgggaggtccttatgcactatgaggaataaactagcacacttggaggtattgaggtgttcttctacctgtccatttttggttaacatggatagctactcatgtggtgttcaaactgccttgtaggattctcatagctagattaaaattcacagatattttctatgttgtcaacttctttttctaatggcaaatcgcaagtgttctcctacttcctggtgataagtataaccttgcttcttcttgttattaacaatcctgaaattgttcagtacaatggtcgttaatgtatatgatataactttgtgagagtgttttggcgattttttattatgtatgttttggtctgagattgagaatacatcttataaactgaaatcaaggcccaccttggcactaatggatcttcatcctctgtttatgtgtagtattgtatttctgatttcctaaagtggtcttggtgaaggttgatgatttgtatgttttcactatagtctcgttgtttctctgtttattgaattatactaagatatgactcaaatttaatagttgaaatgagcttaggcttttaaacctttcttccattatgtgtactgtatgcattattaatgtattaaattctttataagataatatccatgtttagtgacacttaaaaaagaatcacgaagaaatttaaccctactggattttctcttatgtatcatgaccaaataacgaaccatatcctgtgccataaatatatcttctgagaattaatatactaaggataaaatctgtcatatagtattaataaccctcctcagaggacaattgcatgcctgcatctttttttatgtacttgtttctgggtttcttttattgccatgtcctgtttgggtttcttttattgccatgtcctatttgggtttcttttgtgattgtttgctcttgccatataggctccacggtaccgactgtgacatattatacccacagatgacgatgaaatttggtggagcttttggtgaagaaaaagcaattggaggacgagaagcagggaatgattccatcgaatgtttgaagcatttgttttggttttctgttttcagatttcttgcaagcaaatttaaccatagcatcacaaatgcctagcccttcgatggaaatttagatgttttagtagtttaaagtgcagctataccttttcattgtatttgatttgcgcaagtaccagaactacctgaacaagtggaactctcattattaggagttttgttgtaattatgcccaaagacaaatgattgtgctataactatcactactagcaaatgtggtagtttgtgtctgatgacttttgctacagatattaatgaacattgattttcactaatcatagacaaacgccaattatgcatctgtttgagctgtccacaggcggcgcgccactggcgcgccccagcctctagtctctacaatggcgcggcacaaggagcttggcagatgccatctgttgcagcaaccaaggcaatgccatcctgttccaacttccacatcaattaagggtgtgtttagtttacgctaaaattggaagtttggttgaaattggaacgatgtgatggaaaagttggaagtttgtgtgtgtagaaaagttttgatgtgatggaaaagttgaaagtttgaagaaaaagtttggaactaaactcggcctaattcatttgagcttaaaattggttaggtgtaattatggcaggcatcaaagctaactttcgaagcatcaaatttatcatactgtagttttgaagtagataattggaaggcttatttagtgctagatgacagaacgatacagactatcagacatacataacttcttctttttcagtaatgagcaaataaagaataagagattgagggaaaggagcattcgaaaaattacccttatcatatttcctttcattctgaatgcatggcatttctagttcaataagaggatatccatgatatttgaccattcaagaatgattaagactacatcggtgcttaatcagccaaccaggccatgcattgtggcgtcatgtggactactatctagaaatcgtaaacatgaactgaaggttgagataaatcggaattaggaaatgcagagggggagaaaatgaagcatgaaaaactgcgagaaccctgtttgctcaaagtacgagaacaagaaaatagttgtcaaagaaacaagacatcgtatgagcattaaattaagggcactaggccagcaagcttaaaacaatcgagatgctgcataaatatccatgacttcaaccagcatagcattatcaacaatcagattgtttgtagttctaccgttgatgtcaagatttgaaaatagatgttacctcatcaactgataacctcagaaaatgaagtgttgcattagctatataggccgggagataatagacctgcaacatgagtccgaagatgttgagttagacttgtgcaggcaatttcccagcacgaacagcagcataggcatcagcgagcccaggaagagcatcctcatagtgatcaatgtactttgctacaaaaacttcgtcgcgcatacatacacaatggtagaagtcaagaccttttcttatcaatcccttcacagcaagggcttctgcaacataatgcctcggcaccaaccgcttctccaggctgaacgcaagcagagcacaggccttcgcaaaatgtagtcaggctccaatccgaccttggtcaccaagaactcttatcttggcacggagtttcgtctcagaaaatccagaacttgtggagacttgcagatggcatagcggagctcgtccatggagcaaccaagagtgctactcaacaactccatctttgccctttgattttaaaaagtctaacattttagattgcaataaagacacatacgcgtgcacaccactaacatttgataggtcctaaactacaagcagagcactttgcgtaacatatattataaaatatataaccaatgtgaaagtataaaatatttccaaatcatattaaaaacctacttcctccgtttcacaatgtaagactttctagcattgcccacattcaaatagatatatgcctagattcattaacatctatatgaatatggataatgctagaaagtcttacaatatgaaacggagggagtaccgtttattgtcccaaaactttacagtaaaaatcatggtgaagatccaatcctagcagcatttgcatatgaccttgggttgtgcaattccctgggtgaagatcataatatccacaattaaagcaggaatactgtaataatgctgcatttgaactcaaaatgagacagctaagcttgaggcacactctttagctgttctgtaagtaaggattatgctgtttgcagaagtgcttacaaaatcattagcacaatcatgatcatggtgatgtggtcttgaaataaatgagaaatagagcagaaaggatacaaactgacctggacaacagaaccagagaaagagttgcatcgaggcacatttgctaaatgatgaacagtgccatttccagtgcctggataatggtgccaaacaaacaatcacttgatccatatgcctgtctatgagtggcactcttcatacaatcaacttgatgtatcaaatcaacgataagaccatgcttttcgaatttcgactagtttctctagcgcatctccacaaagccaatgccagcacgttccaatttcaacacctcttcctgatcaattcgttcatttgtacttccaattgcttaggtgtaattgtgttagccatccaatgtgttcttttacttcattctagtattatttagctttagaaacaccaaaattaacatactgtcatccaagtagataactgaattcttaatgcgcagtgaaagtataattacagattatgtgacatacataactgattttcagcgatgagcctatcaaatggcatttgaaaaaatcaacctgatcatatttagtttatctctcttacatgatatgtcttgtttataattactagagatccatgccccgtatttcaccagagaagaatgattgaactgggcatggaaaacattgatctgctagcatgctaagcagtgtggtgccatggggatatttttttaatatacccaacaagctattgaaataacaattgaaggttgaaataaaatcaaaattagataataccaaagggaaaaatgatgcaggtagtactgccaaaaccctttttgctcaaagtacctgaacaggagaatagtggttcaagaaacaagtcattgcatcagcagtaaggctgtaagggcactagagcatcaagatttaaactatcaagttgctgcataaatagcaagttagcaacaactcatattacaactgaaatcaaaatatgaaaaaggcatgaccatgcatgaaaaccatcacaccaattagtgatcctcacaacatgaggtatgggcttgaaagataattaacctccaaagatgttatagttggactccagaaggcattctgccagaatgaattccaataactctgtccgaagatgtcagtgttggacctctggaggcactttcccagcacgaagtgcagcataggcatcagaaagaccagggacaacgttctcgtgctgatcaatgaagttttttacaaaacaactttcgcctagctgtacatatgagcaaaagggaacatcttttttcaatcccttcaatcccttcgcagcaaggacttgcacaatataatgcctcgccaccaaccgcttctccaagctgtacgtgaacagctttggcgtcttcaaaaggtattcaggctccaatctgaccttgccgaccaagaactctatcttgctgccaagatttgtctcagataatcctagaatttgtggtaacttttggaccgcagagcggagcttgtccatggagcaaccaagactgcgactcaagtactccatcctcgcggtggcactgccttcgctgatgttagcaaaaatacccaccatgtacttgaattggcctgaggtgcgtggcacgccaagctcatcggcacgccgcacaaacccttccacctgctttggattggacgtgaacatccgtggagcaaacctggccatcttggcaatatcacaaacagttagcccgcactcctggagcagcgcgatgttgggcttgatcaccttctcaaggtcagagagcaccagcacgttgttccccttcaagatcctgaggagcgtctcgaaggatcccaagaaggggatccagaactccagcctcgaggcgacgtcacacgcgtggatgcccttggcgccgcccgcgaggaggaagctgccgatctgggggtccgacaagcccacgcggtcgcgcagggaggcgatgcggcgggcgatgttgtcggccctggcgcagagcagctgcgggtcggaggcgacgacggcggcgaggtcggcgcgggagaggccgacgccggagaggacggcgagcacggcgtcgggcttggcgggcgacctgaggtgggagagcttcttggatgctttgagcgcctgggcgccggtgaggccgcaggtgtcgacgaggtactcctcgacagagaagggggtcgcggcggcggatctggcggcggtggagaggaggaggcggcggcggcggctgaggtccagagaggaggtggggagatgggtggcggcgcgggcgcggagcagcgggaggaggtggagcatggcgccggcgaggccgccgccggccgtcggccggcagcatgagaggcggagcatgtcgccggcgacggcgaggctgggtttagcgattttgctcggcagtgtggagtgtgcaattttgggcatgttcacttcgatgcaattttcaaccataccaattttttttccaagttaaaaaaaatgtcactaaatatttctatctgtcaaaatttcggtattaccaaaacttggtaaggtttattttggctacaatctaagcaagccctttgctttttaccccccttccatcaaatatatttgtatttgttttttcaagagtaaagtgcattggtgatccttaaacttgtaagcttgtgtcatgtaggtccctaaactctcaaaatatatatccaggtcctagaacttgtcaaagtgtatcatttaggtcccaaatcgacacatcccctctaggatcctacgtggcgctaatgtggcatatgctacatggacatgacgtgttattttcttttcttttttcttctttttttcgttttcttctttttcttcttttttttccctttcttctgcacgggttacagtgaaagaaaaagaaagggaaaaaagagaagaaaaaaaagaaaaagaaaaaaatttaaataggtcccatttgttagttaaaataatgccacgtcatgttcgggtagtatgtcatgttaacgccacgtaggatcctgaaggggttgtggagatttgtgaactagatgacacactatgataaatcattttgagagtttagggatctagatgacacaccccctacaagtttaaggaccgccccacctcttttttcagtatgaagattaggaaactgctcctatttttgtttcccctatgccaaaatatatttttttcaggaaaggtcagaagacatggtttctaaaatccactatgtttttttttaaaaaaaaatataaaagcactaggagtaaattgctattgccacactagggatctcaaaagacgaaagttgaaccgtattgcaagattgaagaggttagttaaaatgatagaacagagaagatgcgaataggagcatagggagatgcaaataggagcaaaagaagacgttgtagtttgattatttagggcccctttcattcaaaggaaattcataggaattttagaggatttcattactataggaatttttcctatatagtcctttgaatcaaaggaatggatcctatgaaattcctatggaatgactcttcccataaaagttttggagaaaatttaacatgatgtagaacctcatggaaagaatcctttgagtctttatctttcctcaaattactgtgtttttcctgtggctaaatcaaacaatcattcctatgtttttcctgtgttttgcaatcttctgttttatacttgcattcctgtcagaatcctatgtttttcatattcctctgttttttcattcctatgattcaaatgggcccttagttcttcaggagaagatgtagaaacaaggacgatgcatgttggagctccacaatagcatactcaacctcacatccaaagagatggaagcggtagctagacaaggatcacaagtagtggcaagtgtgtcttagggtaaaagtagtgaggattcagatcatagttgaggcacaaaagggacatgaaaaaacgacggctcgcggagtttacatgttggccataggcatagcataaatcttagcaagaaaaaaaatcaggacaacgagtgacccaaacttttgcatatttttcagttggttaaagttgttcaaccagccaattacataatgtgaaaattttgtttaccatgatttaggctaacaaaaagtctacactctacaaacaaaccaacatattggacatgactgaacttgcatgagttgcatctaagaaatctaagcaaagaaactgcaactatcatctaatccaatgcctgcacaagttgagaagtcaatagcactatgtctgaaaaccatatatcattcctggtgacttggtgagccataggtttcaacaaatcgcagcaagaagaatgaaacgggggcttttcttgcttccagcaataatgcaatatcaataatctaattaaaataaacctccaaatgcgtggcaatggcaaattggcaacccaatgaagagcatctccctaaaaacacaccagatgcagccacacagggcatgcatctaagcagagcacgttcagcattttcatgaacaccataatgttgacaaaaaaaggaaaaaatcgaaccacccacaaccaaaatcagctacgtttaatcagttgaacttgaacagcacattggatcttgtcaataagagaatggtagcagcccaaagattcacccattcacacatgaatcacccacaaaaggataaaactctgtaaaaagatttgacagtatttttttccccaatcaaatattattaagaacaaaaggcgccccaaatttagactttacctcataaaccacatgctttagaagcaaccaacaacacaaaagctacttccacattgccccattgccatccctgtccatacctcacactgcaagtacccactggaaatcccaccaatggctagggcagatggtggtgccagttgaagccaaggccgactttgcctatacaattcatctatcagcccagtttatcagaagtacaatagcttagaatcgatattatgagttgtatggatgcagttcagttccacttgtacatcatgcatatatattcaaatgaacctcactctctactccaaactgatttcacgctagtcccacttgtttcattcgaaccctaatatatactccctccgtcccataatataagggattttgggtggatatgacacatcctaatacaatgaatatggacagacggtctatccagattcat

SEQ ID NO: 7905 - DNA, 25195 bp, Oryza sativa
  unsure (1)..(25195): unsure at all n locations
tttaaggaataattaataaaatacaaatgggtaggtaaggtggcacgatgagggtatttgcaaaaaataaattcgtgaccttagtaaacactcttttataagaagatattgatagtggcagtaaatctgcgtgggtgtacgtgtatgcagtggagtacataatagtgcgttgtttttcttctgatttaaaaaaagagaaaattgtgtgttgaaggagtgagaatcaaggagtaaaccatgcataaaagggaattgcgctgttgtattaagaatcaacaggaaaggtaaaatatataggagtagcatcttgtttcattgtgactccatgatcgatctatacgtacgtacaagtatatatcaagcatccaacatgactaattacagatttttaggacctagaggtagctagctagtagctgtcaggatcaccttaattattccaaatcaatcctaaactgactaaactactccatttctacatggatgaacagctagctttgcgaggctttccagcatttttgcatggatgaagctctctcacagataaaagaagaagaagaaaaagaataaatttaaccaataatgaacagttgatcaatgtctatgaagatctccaatcttcatgtctacatgttaacagctcgcacggcagctgcagctagcgatcgagcaaaaccggccgcgatccacccatggacgggacgatgcgcgttggccggccggcggcgcgccggcgcggctagttacggttggtggcagctggctccggagccgcctccgggaccttggtgacaaccattgccttccgaatccgacgtgcccttgtcaaggacctgcaagatgagctcgccggtggcgacgccgccctgcaggccctgcagccagctgctgccaaacaagtcaccttccagcagcctcgccgccatgatcgcgttgcagcattgcatcagcagcacggccaccaccaccaccctcaccatcgccgacgacgacgccatgatcgaattcagctgcagttactactgtactaagttactaactagatttgtttcagagatggcagacaagaattcaagctggctgcctacgtacgtgaaaatggatgaagaaattaatattgaagcttagctagctaggtttgttggaagagagacaggacgggggttggttatatatagagtttggtggtaaaaaggcggtgtgcaacaaaagtgaccgggtctattcttcatttcttcggcgccatgtaaaacaacgaactaatactactattattaagcttttgatttggcagtttcgcctcgcggaacaaaaagaaaaacgcggtttttttgagctagcgtgcgagcgggccgcggtctcgtttaattcaatttcctacgtttgacattgactacaagtactgtacgtatggccatttcaagggattttgagatacgatcaaccaacaaagccaggttacagtacgttgttcgtttgctaactacattctcatgaaggagtagttagttaaaatagtatcatcatgaactcgattgtttaacctccttgcctgcgtcagctcccgttcgttgtcggaccaaccgaccggcgtacgttcgacccgtacttcccgacttgcatgtactccctccgtttcaaaatatttaacaccggtgacttttagcacaaaattggccggttatcctaatccaaaacttacctttggtgaaaatattaaattataagcccaccttaaaatatactttaccatggatccaatgattaggaaaaaatttatatattgccttaatttttttgatataagccaagcgtgtcaaacatgtgttaaaaagtcaacggcgtcaaacatttcgaaacggagggagtaactaactacacgttttggctgatcgagacgatttcaatcgatcgatgagcaagagaggggggtattcaacgagagctatagtcagccgaactggactgactgatctagctagctgttgtatacgacgaagttaaataattacgcacacaatctcatcactgatcatccaatcgatatagagttagctggctagctgctacatatacttgaattatattgtgagctagagttagctagaactgtacttcaggttagttcatgcctgccgttgccggtctgtctgctcactactggagaaaccattattaaaaaccgggactaaaaataatttttaaatccaaatttataagagcaacatcactatttaattattagtgccgattggtaacaccaaccgggactaaagatgatcatctttagtcccggttcacacgttatcagggtttgtcagcaccccccccccttccccattgcagtgcgtttggccaaccgccaacctacatgaagcgcctataggtcgttaatttataactttcgagaaattgataaatgtttttaataaaaagaaattattagatgagattgatattgatattatcctcaatgatttccatcatatcaggaaatgttcgaagaaatttttaagataatgcttatgagttttggatataaatattacttttgattgcaaattaaatctgttcatctgtaatatggcataaatgcatacattggtaattatattgatagtggcagtaaatctgcctgggtgtatgcatgtggagtagtagtgtgttggagaccaacaggaaagataaaatacaaaggagtagcatctcttgtttaaaaaaacacgaatattagagaataatctaatatcagataaataaaagagatgaggctttaaatccaggttagctagcccaccatcttgtgaagctagctggaaaacccggccgtggacgtttctcaaagtatagcatctcttgtttcattgtgacttcatgacctatacaagtatcaagcattaaacatgactaattacatactttcaggacctagatgtcaggatcaccttaattattccaaatcaatcctaaattgactaattaaactactcatttctacatggatgaacagcagctagctttgcgaggctttccagcatttttgcatggatgaagctctcatagaagaaaaaaaaagaattaaaggaattcaaccaaatgaacagttgatcaatctctacgcagatctccaatcttcatcactactacatgttaacggctcgcacgccagctgcagctagcgatcgagcaaaaccggccgcgatccacccatggatgcgacagatgcgcgttggccggccggcgaggctagttacggttggtagcagttgcctccggagccgcctccgggaccttggtgacaaccattgcctcccggcggcgaccctcccttgagcacctgcaagatgagctcgccggcgacgccgccctgaccctgcagccagctgcccagatcaccttccagcagcctcgccgccatgatcgcgttgcagcactgcatcagcagcacggacaccaacaccaccctcaccattgccgacgacgacgccatgaatataattcagatgcagttactacaatactgtactaactagatttgtttcagagatggcagacaagaattcaagctggctgctgcctacgtgaattaaaatggctgaagaattgaagctagtagtaaggttgttggaagagagacaggattgggttggttatatatatagagtttggtggctgtgtatacatacgtacgttgaaagtaaaaaggtatgtgcaacaaaagtgaccggatctattcttcggcgccatgtaaaacaaccaactaattataatactactattaagcttttgatttgtcagtctcgatcgcctcgcggaacaaaaagaaaaacgcggtttcaattttttgagctagcgtgcgagcgggccgcggtctcgtttaattcaatttcctacgtttgacattgacaagaactgtagtagtagctcgtgccatttcaagggattttgagatacagtacgttgttcacttgcctactacattcccatgaaggagtagttcaaatatcatcacgaattcacgataatcaactcgatcgttgtttgacctccttttctgcgtcagctcatgtacgttgtcggaccaaccgaccggcgtacttcacggcttgcatgtaatcaactacacgttttggctgatcgagacggtttcaatcgacagatgagcaagagggcgtcgtattcaacgagctagctagtcacttagtcagccgccaatcgatatgatcgatcggaccgactggactggctccaaaaaaaaaacagtaaaggtctgaataaactaagataaatctatagctttctttcatatgtatatacaaaatttgtagtgaaaacttcatgaagaattccatggtgttattgtgagtagtgaatgctcgagtccccattgtactcatgctcttgatccgcctctgatctagttgttgtatatgcatgaattgtgagctagagttagagcaagtataatagagagctataagaaggctgaatactgaggtggatgagagaggagaggagagagatgagaagcggactataagtttacagccggcttaggcacaggaaccaagaaaatctgtgagacagacaggtggaccatatgtttacagtgaagagttaaccactatatgagtgagctgatagataggctataagtaagcagctggctatattattacccttgctcttagcaaacttcaggtgttgctctctgactgccgttgccggcccggccgctgcattggccaacctacctgaaacctaggtcgtttataataactttccgagaaagtgacggcgactttgatcgatcgatatcgtctgtgaaattcatatgttcattcgatcaaatcgatcacaccgtctacggccggacgtgcagtgcgtgcgtatagtaccggcaggtttaattagtttacgcgcatgcatcagtcacctgctgacttcaatccacatcaccaattcaccaccagactcacccatcgatctcaaattgaattagggcctcatcgtacgcttcaactgatgctaaattttaaactttaaactttaattatagagttcattttaggatatattttttaagatcgtcttttaagttgttaacaacatataaaagctttagccataatcttttccttgataagtcgctttgatatataattggttcttagccaaccgataaaggctgtgtttagatttaggggtgaaaagttttagcgtgtcacatcggatatatggatacatatttgaagtattaaatatagactaataacaaaacaaattacagattccgccgataaactgtgagacgaacttattaagcctaattaatccgtcattagcaaatatttattgtagcaccacattgtcagatcatggagcaattaggattaaaatatttgtctcgcaatttacacgtgatctgtgtaattagtttttttcctatgtttaatacttcatgcatgtgtctaaacattcaatgtgacatgctaaaaatttttacccgggaatctaaacatgcccaaagctattgttcattgcacagacttttaatatgacacatgccatagtagtgcttattagctcctaaatcttttgtattttaagacaaataaagtcaatagtaagggtagtgtgtgtgtgtgtgtgtgttttatatgtgtggtatggaagttttccgacagtaccgataccatattccgaaaaactaataatatttttatcgacggttaccattttcaaattttatttttcccaatttctataagcgtggcattgaagttgacactaaatagttcaattcataaatataaaaattttccaatcatttttgccagtttccgaaaaataataaaataatgatatcatactaaccatttccgactaacgtaacttccaacaatatgcctgcggtgcagccatatataataccataaaatttacccttcactacaacatcatgacagcattaatttcttccaacaataccgcaaacttcacaaatataaaagcgaatcacgctattgtattaaagggaaaaccaaaaggaaagtaaatttcttctaatgtgtcggacagtatccatgcacatgatcctcagattacacactttcaggacccagctagctatatatgtccctgacttaccttgttccaaatcagtacgcctaaattgactagactaaactacaagtctactgtctacaactatgaacagctttgcaaagctccacttttacatggaagctcttacagttaacatgggaaaaannaaaagaaaaatgccaagaaaaccttnggaananttcccaaggnnaattgggggcacaatctcacntatgcaggagctgagtatatatatatgtcgaacttaattagatcttcatgtacatgttaattaacgtcccgcgcgcctgcagcgaacgagcaaaaccggtccgggaatccatccatggcggccgaccggcgcgcacataagctgccgctcgccgaccgaccgccggcgcggcgaggctagttacggcgtccagcattttccggatccggagccgcctggattgggaccttggtggcaatcattgcctcccggcggcgaccctccattgtcaaggacctgcaagatgagctcgccggcggcgccgacctggccctgcagccagctgctgctaccaaataagtcaccttccagcagcctcgccgccatgatcgcgttgcagcactgcatcagcagcacggccaccaccaccaccctcaccgtcgccgacgacgacgacgaccacgccatgtatatatattcagctgcagtacgtacgtactactgtactagtagtagcaacctaactagagcttgattaattcggctgttgattcgatcaatcggctagattgtttaaattaattaattcggagtggcagacaagaatccaagctggctgcgtacgtacgtacgagaaaatggctgaagaactgaaactatagttgtttgtgtggttgtggggaggcaggatcgattggctggttatatatagagttttggtggctgtgtatatacgtgcaacagaagtgactgtccaggtcggtctattcttcagcgccatgtaaaacaacgaactagtgctacttttaggctttaatttgattgatatttgtctcagctcgcgcgcggaaaaacgcggtttgtttgagcgagcgggccgcggtcacgtacgcttaattaattcaatttcctacgtttgacattgacaagtctagtaagtattcaagatcattgatacgatcaaccaaagccaggctcgtacgcacatacgttgttgcttgttagctacgtaccgtgcccagctacattcccatcaaccaaatatatgacctccggactccggtccttgcctgcgatagctcccgttactggactaccgaccggcgtcttcacggtttgcatataactacgtgtaattatagcatttttgaccatttagctagttgcaaaaacttattataacaagaatagatcatgccaaaatatatcttcaaccaaaaacacgcgacattggtttcatcgagtatggcgcaggtccaaccagggttcccccaaaccgtttttgcggtggttaccgccaccccacggtttggccgtggttaccgccaccccacggtttggccgttactggccacggtaaacgtgcggttaccgtaagatgtaccgtggtttcaaaaactgagaagattactgcacgtgataatcgtgtggtaaccatacggttttgtaaaccttgggtccaacatgttagcgccacgttctttggtgcataggttttgccatgctagatctaggaattgagttcaacatccaccaggccgtgctcgcctgtctttccttgccctctcattttctatcacgagtcagccgactcaacttgccctcttttcctgtcccacccaactcatctcctctcctatgtcttcaagcttcggttctctcttgtagggagggaactctttgccaccttgttgccttataaactatttggaacaacggtagcaatgctactatacaatcacctctcatttatttttcaactaatcttacgccttttctcaatccatcctcatttaagattaaacttcggtgatattataaaaaattcacaggtatcaaataataccacaaagtttccatatataccttcccttagtaccatgtcaagatagcatttcttccaacaataccacaatatatatatatatatatatatatatatatatatatatatatatatatatattgtgttaaaagggaaaaccaaaaggaaagtaaggtacattccagcttataagcagcaacacaaatttgaatttgaaaacttaattttggagttgattaaagggttcttttattatagtttattttttagcctttgcttctaaattgcttaagaacacatatacaaaagtttttattgacaaattgttttttgggttgttgatgagtaatttgcagcttatatagtttatttataaattaatcagcatgtgtgaaacgatcactgtgtaaatctcttcttgtattgacaagtgtgtatgattcatatatacattgaggatcaacctagctagctatatgtcacggactagtacgctattacacaaatcaatacgcctaaattgactaacctaactacaactatgaacagctttgcaaagctccattttctgcatatgcatggaagctaactagctctacgtgtgcaggcgtatatatagaacaaataaatcgtatcaaatgaacagttgatcgatcgatctactctacgagcaaaaccgggccacgatccatatcgtccatggcggcgccggccggtgcgccggtggccggcgcggctacttaggcggctggtagcactggcctccggagccggcgccaccttggtggcaatcattgcctggtggtcccgatggcactaccttgagcacctgcaagatgagctcgccggcggcgacgccgtcctcgccctgcagccagctgctgccaaacaagtcgccttccagcagcctcgccgccatgatcgcgttgcagcattgcatcagcagcacgcccaccaccaccaccctcaccaccatcgccgacgacgacgccatgatcgaattcagctgcagttaattactactgtgtactaactactagatttaatttgtttcagagatatggcagacaagaattaaatcctcttaattttgctgcgtatatattactacgtgaaaatggatgaattggagaaggtagtagctagtgtatagtgcggtttgttggaagagagacaggatgggctggctatatatagagagcgagggaagagagtttggtgtgcaacgtaacgtacaaaagggaccgggtctattcgtcggcgctatgtaaaaggcgctacttttaagcctttttttattgtcatcctcgcctcgcggaaaaacgcggtttttttgagctagcgagcgagccgcggtcacgtttaattcaatcgtcgtatgtttgacattgacaagtacaaataccattcattcaagataatattcatacgtacgatcaaaataaaaccatgtgtgtccatgttcgtacgcatgtatacgtacgtactcgttagtaatctttttttttaattgtgtgcatctcagttatatgtagaacaaatatatcatctagatgtaatttaatgagtttaataaaatagtaactttgcctgcgcgagctatagctctcgttgttggaccaatccaccgatcgaccccggccgtatacttcccggcttgcatataacttacgtcgatctcgtaactacacacaattttgccgagacgacacgtacgatcgatcgatgaagagatgaactagttagctactagtcgtattcgacgagctagtctaccgtggatatcgcgatataatatgaccaaataactgactgactgattactacgtagtactttacataatctacagtattaattactagctatgtacgcagttacgagcgaacttacttggtgcatgcatatgcatgactatatgaatggtgaagcaagctagcccggccgctgtcgtcagtccatgttgctctatcagacttgctggctgccttgccgagcaagtttaataatatagtctactgctcgctccaaatcatctatagccaatgtaatagccaatttatacaatagttgcttactatactattaatacttggtcccacctgtcatatacatattacgttttggagtccatgctgcagctagctatagatctgtagcccacttctcttctctcttcctttatctttttaaaatatgtttataaatagcttagagcctgctattgtatctgctctaaattagtccttatgacttccgagaaagtggcggtgattttgattatattagtattggtttggtttcatgggcaggtttattttacgcgcatcgatcgatcgatgagtcacctgctgcagactcatcaccaattcaccaccgactcaattgatcgatcgatctaaaaaaactgaattagctagcctgctacgttgcacatatcgagatcttaatcaaacgcagagagagtggattttaaactctctacgttgcacatatcgagatcttaatctaacgcagagagagtggattttaaactctctggaagatgtcctttcgttgttttattgtactcaaatagttataaaaaaatagtagaaaaatagaagaagtgttaacatgttatcactctacaacatacaagttaaaatttaacttttgcaagttataaaaagataaattaaactatatctggttaagtcaaatatatttttttcattgcaacatgttgaagttactgtgcaggttgcaaagtgatctatcatatattaatctattttattaaaaaaattaactatttaagtgatatgtaaataacatggggacgtcccttgagagtttagaaaatttttcccatttgacgcatgctatagttgcttgtttagttactacctagctcgatctcgtctcacatgtcctgacggtcaaatgctatgtcttgagtacatatatatgttgacctttatatatttcaatgttgaccaagtctaactatagttaagtcaaattgtgtaagatgtagcaggcatgttttgctatatgtaagaacaattaatatatattatatatgcatgcacgttacatgccagacaacctcatgttgtattgttttcatctcataagaggatatattatatagatctcaccatcccctcgttttatgtatgtcacttaaatagttataaaaaattataaaaattaataaaataggttaatataaaatatatcacttcacaaacataaaagttaaaattcaaactactacaagtttaataaagataacaaatataaccgtgaatgaatgataactttcagttttttttttgcaacttgtaaaagttgaatttggtttcgcatgtttgtagagtgatgtatattatatttaatctatgttgttaactttttttttatttttttataactatttagatgacatgtaagaggatatcctcttgagagatgaaaatccatatccttttgttcttctccttgctgttacattctgtttgcaatcactttgtaaattgttttttaaataaatatataaatacgtatcaaagtatatatatatatatatatatatatatatatatatatatatatatatatattacgtcctacacaatacatatatgtactttcattcattgtagtctaacaatttaataattattagtgttcaaagttgaaacggtcaactaatataaatgcatatatagatcatcatcaaataccaaaattaattgaattaatccaaataaaactatatatctttatcatctggcgaaaactactttacacaatttaattacaattgtctgactattttctctcctatatactccctccgttttttaatatatgatccgttaattttttaagatagattgatcatttgttttattaaaaaattatgtaattattatttattttatcgtgatttgatttatcatccgatgttctttatatttgtacaaaattattaaataagatgaatagttaagtgtatatcaagaagccaatggagtcttatatttaaaaacagagatactacttgcatgcatgatatgctctaattattgactactacactgattatgaataatatgaactatatatacatcattcgacttcttccaacgtacactccatctttacatatatggaagctcctaattactgcatatatcattaaaaaccaaataatgaatgaaacaatctctacagatcatctagtatatatttacatgcatacatgtcgacatctacatacaactaaacagagaagcagccggtgtcagatcgccgcatgcagcagatggcgatcgagtagtataattaagctagctagccgctgccgtggcatggtgcgccgttgccgccggtctcgccttgtttgcacccattgcctaccggcgtggttggggtgctggtcttcagtatctgcatgacgaacatctcgccgccaccgcctccgccaccgccggcggcggcgacgacgtcgcccttcaacggcctcgccgcgaggagcacgccgcagcactgcagcaacacggccgccaccatcaccgccctcaccatcgtcttcgccgacgctgacgccattaattatatgatttcttgatgaattcttaattaagctagctagctaggtgctcggcaatggtgtaaagctcagtgagacgacgagtgaattgaatatagcagacagaaagtgcgtttgctgtacgtcgaatgggtagctagcttgattaaagaaaagagtaatagcttgtttaatttgttggaggaaatcagacaacctggcttccttttatagtagtacagttcatatatgttcgtgacttgaccacacgttgaactgcatgtactagtaaaaatcttaacagatgaacgggtctaatcgtacgagtttaccagtagtactactaattaattaacaacataacatgccactgtacgcggttttcagcgcagtccatgtccaaggttgaacacgaatagctagttaggttcaagaagacgtgcagcagcagttgtagtgctgctacgcgtgagtattactatggaagctaaggggatgtttggttgatgcctaactttgccataactaagtttaggctagttgtggcatagtggcacaaatatggcttagaaatagttggccacaagtgtggcatgcttagctctaaatttgagagcatgacacgtgggtcccaaagtgtggcataacataattgcggcagcgaaccaaacacatgcctaaaaaactatggtatgactaaagtgtggcgtgacaaaatatggcaacgaaccaaacagctcctaaggcaaagttaatcagtcatgtatatacagttacactcctacaaagacctagtagcccctccgtcccaaaattaatgtagttttacattatttatattcaacgtttgactgttcgtcttatctgaaaaaaaaagtttatgattagtacttttatttttattaggtgataaaatatgaatattactttatgtgtgactaaattttttaaataagacagatagtcaaccgttggacatgaatctccacggttgcatttattttgagatagaggtagtgtgtgtatgatactccttccgtttcaagttataagatattttgactttggtcaaagtcaaattattttaagtttaactgagtttctagataaatatagtaatatttataatactaaattagttgcatcgaatcaataattgaatatatttcataataaatttgtcttaagttaaaaatgttactactacttttctctacaaacttgatcagagttaaagcagtttaattttgatcaaagttaaaacatacgaagtactagtcatgtgcctatgtaggaccgtacggacgttctgattaatccgtgtgtaactcgaccttgaccccgatcgatcgagcgtccatgcccttgaattgacacattcgtttggaccgaccgaccagtgaatcttcctcgatcgtaacggccgggttcgaccagttaattaattagttccctctgaaacaagcaacttaactcgatcgatcagtagctactactagtaagctcgtacatacacacgcacacgcacgtactatacgcctcgccgaaagaccggaccgttacttacacacatacgagtatacgacgagttgtgtagacgttttcatgatacgattgcgtgggtttcaagaaaagaatgatatacgagttgtgtacatacgcacggctcggtatcgcccatcgatcgatcgaacgcgatttggtcggctctgttcagctacgtactaccttcgtacacataaaaaaatcgtttaggacaacgtttaagtcaaaccttaggaatataaatcatgaataactctcaagttgttgagtttgaaaatataaaaattatatgaatagatttgtcttgaaaaataatacatatatcactttttaataaatatttttatagaaaaaagaagtcaaatttatgttttgaagaccgtgtcgctattctaaacgtctttctttacgagtatgagggattactaattcagcggtttaattaagttgatgcctgccgctagctagtcgcggcgcgtggacgactggttgaattcatgtgtaaatgctgcagttttcgccgaattctgcgtgcgtgcgcgcgcgcgcgcgtggtgcagggatcagactgatgctgcgcatgcgttagagcaggccgtggcacaaggctctgcgtctgctcggccaggccggtcgtccagtgcggatagggaactgggctgagaatttggggccgcggctgggggatttttttaagggaaaattgaaaccatctcattataatttaaattaccctttttttttaaggacgaggagatgggggcatgaggggcagatccagcacgaaggcgacagggtttcgagcctccactattaggtgaaaacgcccccacgaagactttactaaaattttttaccatatgtaaatgggagggggaacggtaactctatctagtttgctcagactctagtgctatttctttctggatccgccactgaacacatgactggtttcttttcataggtacctgcctaaaatctagactttttaaatatgtgtatacctagctctttaattgatttaggtagtcaaactagttgatcaatccaatacggttatgaaacatctccaaaatgataaagaatgtgttagctttctccccctcatccttttctcctcgctttctccctctgctaggggacggcgttcccgcacagtgtcgctttgcaagggagacggtgacagcaggagacaacagcgacaacatatccggatgtgcgaggcggactcatgcacgcgacaatggatccgtgagggcaaggcgaatggcgggtcccctcctattggcctcatcgtcctcaacaaccgtgtgcacaaggcaggctcgactgacaagccatcgagccttcctccctcactcctctctcgccgtcgagccgccctagcaatggcgccctccctcccttggatgtagagagggcggggatagagagaagggaaatgagcatctatgacgtggggcccatgattagccaatttggccaatgaggggagaactttggcaggtggattatcttggtcatctggatggagaggtgttagaggaggattttttttttctaaaattattaaaatttggtttacaaaatcaattgaaaagactgttaaaaacgctcgaactcgtatattagccacgttcaactgcatgcattggaaactaaaaaaaattaaggaacaagtctattttctattccattcgtaagcaggcactactagtaaataatttgtttttttcccccggtccagccgtgtaagtacacggtccatgtccttgaacgatttattaggttatttagcccactccgaaagttaatgggctggctgtgaacctccgcaaggcaagtcacgtctcacgtgtaagctggactgttggatatggttaaaacatttcggcctaccaacgatggtaaacatttaaatcaatgagccgtaagcccttgctacataggagtactccgtaacatggtgattaacaaattgtatttgaaaaatgcattcttattctctctagagtgatagtctcagtgttttttttttatttcaagacaatatataccaatacatactcactccgtcccataaaaaactaacatctattcatatttgtgataatagaatatgtcatatccattaccaatatcgttaattacatgcactactgattaatactaagcagcaaagacagaaattttattgtattaactgaaaaaaaaaatctacgtacggaaaacaattaaaaaccggccggaatcagcttgatcgatcgaggtcgtcgtgttcgcgacaaagaaaattaattaaaactaagtaacaagctaagctagctagctaccggcggccgggagtactgccgatgcatggtgggctggggctgctgggaggggtcgggccttccttgcacgtattgcccgtaggcgtcgttgtggcgccaccgccggtggtcttcaggatctccggcgtgacgacgaacatctcctccccgccgccgccgccggctgcggccaacggcctcgccgcgaggagcacgccgcagcactgcatcagcacggccgccaccaccaacgccctcaccaacttcgccgacgccgacgatgccatgtttgtgagatctctgatcttgaactttagctagctagctatattaagctgtaagatcgatcaagctgattgttatgaaactattaggaatatagagatccacaattaatctcaggcctatacaatgtaatcagctagagtattcctaatagagtactagtgccgatcgatcgatgagtaagtgatgatctgaatgtagcagccaattaattaagtacgtggacgtactgtcttaattgaacgacatgggacaggatgggtttccttttatagataactcgatcgtacaggtatacgtacgttggccacacgttcaactgcatatggagtatgcagaaaaatcagaaaaacaaacaaaggaccgggtctattgtctattcgtaagtatttactatgactaatgagagtttttactgtccttgaaagggggcggtaccaaatctgaaccgtcgatctagcttcatcggacggctgagattggatggtaccgcgtggtaccgcacgcgcagattggggcggtaccgctggggtaaaaccgtattttcgcgtaacgaggtaggggtccgtgatttcctgccgggatcagaccggggcttctcttccctttctctctgagcgccatctctttccttttctccctgttttgttctgattctcgacgatttcttggcccacgcatagggatttccccctctagaaccagcgcaggggaaggaaagatgggtccggtcgatcggcgcatgcgtcgtgcctttgctgccgccggcgcaggggatggggggatggcgctcagatctggaacgagcgcgcctccatccgctcgtccggtcgatcggcgcgtgccgttgtttccgccggcgcaatgatccccttggagcaatggaggtggtaggcggagggaaggatgggtgtggtgttcagaaccaagcaccggcggggagatgcggctgcataaggtgctgcgggtgtcgtggcgtaggaaaacggagaagaaccggaagatcaatgtgctacactgcgaagagttgagtccctgcgaaggtagaggtgttgcgggcgtatttcctttcgcgcagatggaaaaagctaagccgggtaaggtaacatcaagcacttgttcttcctttcagtttgaaagaaatgttgcaattgactggagcttggaaaatagagatagtagttttgaatacatggctgataattgattggaaataacctagatggaaaaacagtgttgcataatataaaagtttagatagatacacttagatggaaatacagtgtttcaaagatgccactaattggcttcaaagcttcattgtaacttcagatgtggacgaattttctgaatgtagacgtctgatgtcgtcgtggacagcaagcactatatttagagtagtgttgattaggttggcggcgacctttagtctgaaaacttcattcggttcctgaagtcaagagggagtgaaaaatatgtgtaagagatgtgtaacactaataaaatgtgagtcatagtagcttagtacttttcggagcagtaccatatttaagaagtcgctcgttaattcctttccatcccaggtctccatgaacttcaaagcatttaacccacatgaccaactaaccatagaaattgagaatgtcagttagcaataattgttagttaaaagcgtattgatgatatttcacctgtctttctgttgaggtacactctttgggcacagtggccattttgcaacatttgtgtcagtccaggatgttggaacaggacgttctttcaccgtgtaatcaatatacttggccacgccattgatctgttatgtgttaaaattacttagaacatatgttattatagcatataggaactgttattgcgatggagcttactaggtttttaatatcttcgcttgcattgtaccattgtggctgcatctgcattgagtcaagaatttgaatttcttggcatcttgcattaataacaattacgtaccaatgcgatttgtccctatttattggtaggaagaccttcaggaaatagcataagttaaagtagtttttggaaaggcataaaaataaatgatgacctgatttagtaccatatcatggaccatgtatctttgggcaaacgttgatctggattcaatgtatcttttacttggctttcctcttgtcttaccaacggcacaccaaacctggacttgcgtttctttctcaattagagcagaaccgtactgcctggtgtggccttgttgattgtcgtttatgagttctgtgtaagcttcaatgacctgttgcaaaataaaaaaaaatatagaaatgtatgggaaaggtagaaattattataacagataaaaataatcttaacgaggtgttcaaccattttgattttgatgaactatcaagcggcgttacaagtggcagtagatgtgcacgtgatagctctatgtcttgtatactggcaagaaccttagttttttctgactggaggatgtaattgattgttattttatctttcaatgtcaaaccaaggttcgctgatcctgaattggatatttgaattttgggctcgaatgtttttttgttatgtttgtagaatatgaaatcactttgagtttgatatgatggcttgactgtccttccgaactgacctcttagtctttctgcaatggttttgttattgtcatctgtctcagttgcttcatccccagtgattatgaacggagcttcctctgttccattaccatcaatctctttggctaaatttgtctcatcctagagaagaagacataaaaaattgaatgctcgaacaatagttttgtaaattagttcagtacaactcaccgtattatcttcatgcatctcttcagtatggtaggcatcctttcattgcctaaatcgaatgttcgattatcctcgactttgttgacatcagcttcttgtttgggtctaaatgcatcggcttgtatagggactgacttcctttttttggacagggtgtttttgatgtcctgtaagagttgcagttcatttagctatatattatgaacaaaagctatatattatgcagttcatttagccagtgctgctttatgcttacctcgatggctagtgtgtttttccggcatatttgttccacggaaagtaacttgtttgtcaatttgttctccatgaactgaatggacctttctaactgttggagcatgtcaacaagtactttgatgtgacctgaatgctacaagaaagaagcagttggttatgacattatgtgtaggaagtaattttttgttgataatgtgcactcaaaaaaactgagctaagaatgtattacctctacggctgcaatttttgctggagatttgattttcgtttcatggtcatcctcacactgatttagctctctgtcatcatctttttccttctcattgtcagtaccgtacggcatgtgatcattagcatatgcaaaagattgttgtgcatctatttcttcgttgtcagaaagtatgggatagtcattttctagttcctcaaaggcagtgtcttcctcaattctctgttcattgatataaaagtcactttctctgtcttcaaagccatgcgtgtcatgctcatacctctgttcatcattcaaaaagtctggatgttctatctgttcaataatctgtataacatatggcagcaattagcatatgatctactactgcaactagtatttctgtatgtgcagtaacttaccaatccccccccttcagctgttctgcagtcatatttgtttctcaacctgacattggctgcattccagaatgaaatcaggggaatctgacgtccattgtaattgatgttgcagaactcagagtttactgccttcacatgttcccaataccaacactgaatgcaatgtaaaaaataagcattttgagtacaataagaaaataaattcagcatgtgataggtttgtatagtacctgcagtaatggaagattgccttcaatattttttagtcctcccttgaattccttcaagcaatcgcagagatgttcccttgttaagcttgcccaattgatagtgtgaatttttgttacatctctcagtaaaggtagatagctggagctgacatgggcctttgtagtaggacaaaggatgtacccaatggtgaaaaacatcatccttctaatgaaatcttcctcgttgatttcagattgtttcgattcttctaaaattgcttcttgcaatgatatgagtgaaatattcttgctctcgccatccttgtgcctagaataaatcttgtaatcctccgtgatcaatggcggcagtttggaaatcaccggtccttcggctggaatatccaatatacactggacatcccaaagtgtgatcggtaaactcttgtcttggatcaatattgtttggcttttgacgtcgtaccgatcagctaaccaaatacaaattacccggttgatgttaatctctggcattgctaacaagcctccaaatccaattttttccatggccgctgtctggagtggattcaaacttctcaccattgttacaaatttatgtggggagctagcaatggtcagttcccttggtttctaagaatgagaaaagtgcatgcaagtaaatcaccgtacaagaagtgaagagcaaaaagtatgttgagaagaagcaaataaattttaaaataacatacataccacggagagaataggtagtttcctaccatgacgccctcttttgccagggttgcggcgacgagcagtggaagtgttgttgtctgccatagaaatgtttagaacagatatgtgcgtaggaaatttgaactgaaactctctacttatatgtgtgtagcaaaaaaacgagttaatgacaccggaataatcttgtattgaacttaagtacaggttttgtgtcgtttgatttttaaatgtacacatctcactgtgcatcggcatatattatacgtcaatccactgtgtcaggtgcatgcagccgtgtagcaatcaatgccattatagtctattctgtttccaaagcgaatatgggctgcttttgttgcatggcctcctcggtacaccacacataaaactgatatacatgcgtgcattccactcggtataataaagcagtcaagaacggcactgcagtcaagtatgaaagcagtcaacaaaactatgcatttacacggtttaagtatgaatgcagttccgtcgaaaaattaacattagggtgtgtaggataattttgatggaaaagttggaagtttaaagaaaatattacatccaatgtaatcacttgttgtacatgagatcactaattttcactaacataatgacaattactacaaacgatcccattaaccacgcacgagtatcgtcgagctcttttttctttttcattaattttttttatacgccaattctagttcagagatatggtcagccgtatctaactctaacttcattttttcttcctcggcctttgtattccgaacgaaacaacaccagtcatattgtttcgaaccggttagcttggtagcacgttccactgcatgccacatctgctcaagtgtcttctgaactcttgggtgccatggttcgtcgacccaaaaaaatttatcgcactgatcctcttcctgaaacgaataacagttcgtaaaaaccaaccgaatgaattttcttttgttttcaaggacttttgagctcacctccagcggacaacctaagaaccttcttcctgtgtcaggtccttcccaagctgtcctccgtttcggcgtgaggccatgcctgcaagttagtctggtgccaagctcctctccacaatactccgaatcttcaatgtacatcgggacatccatgcacagaccatggcgatattcctacaaacacgagatcggtgaagaaaaaaaaattgaaaaatcgttgaaaggtacttgtattttcatttaccttaacagcgccgtccgccattgcagcttcgttgttctgtaccttcttgcttgttaccatggctgttatctgtggagtgaggatgaggttgatggatgcactagtgtgaccagcaactagctacaaccgaagcagcatatatggacgagtactaaatgaggtagttggttggttcgctagtccaaccatcaatacaagaatttactactatccgacctggcattataaaaaaatgaaattataattaacggaattgacaaaaaaatcatataaaatgaaattataattaactagagacgtcgagactaggagcggtggttcggaccatgccgggtgtcctatgcgcaacacatagagactctgcaggtgttttcctaagtctattacttgtcatcggactataaaatcaactgttcagtactggtacacgaaagttacgcgttactatacgtgtcgagatgtacaaaagtgtgtataacatgcccagatgtacaagatttgtgtcacgttactaaattgagacagcagtacttaattcctgcatgcgcacacggttaccaatacgcacttacacagtccaccaaacaattactaatacttatccatccacccactcccctgtgcattaaccatggaaggtgagcagccaactcagttcgtccccttatttcttcaaccattctcctcctactgcttcctctttcttcttcttcttctgctctttcttcttcctttggcactggaggcggccaggctgtcctcggcactgcaggcgctgcggccggttgcacggctgcaggcgagctcgcggtgggacggccagctccgagcagtgcagtgtgccgactagagtcgccgaggtgagctgtggtaagagccgatttcggagacgacaccatatatcaggttctgcttcctcccattatattccatttttgatgcgtatcgtgatgcctatcttgtcacttagagtgaaacacaagtagcaatgggggacggaaatgaggtcattgacatttcatcagatagtgacgatggtgatgcctatcttccgattttatccttttttcgtagcattacacctactaacaagtttggattaaacacgagcagaacaagtacaaattgagataaacaagatttatcaaagcgtgcgccgttcaactattacaacaggtgtttattaattctcattaatttcagttttagctttcaatgattacaaaagtcatatgaacttgtgtatgtgaactctaaaaaacaggacaatatggacctcgtactttctctggattcgacaagtactgctggtatggaaatgatgtcacattaacaaaaagtatgcatcttcaaattgctcacgttgccgcagtaaatttgccgctgtcaagagaacccttatgaccaatgcgaaaatggtatgtaaaatgactttgttgcttcatgtagtttgtactatggctaatcaacttttcttgcagacctttgcagtccagtttagcgagcggtacataaacaagtacattgggagtccaattgatgatctgatggtgtctatggctggaacaacacagtcatatcaaatgaggctgaagaggtccaaggacagtagggcaatgctgaccactggatggaaccaactgattgatgcaaaagcattcgatgagggtgatgtttgtcttttccatttcaaggaggttgacgacgttcttgttctgaaggttcatgttctcaagtagtgtggtggatgaaaatcaccattttgtctggcaatatgtaatgccatccaaattcgtatgatgtaaagctagttaagaccttattatgtggttgacctttccagtacaatcttattatgtgctagttaagacttgattatgtgggtcaactatctgttaatggatgcttgtcaagatggaggaactatctatgtgttgttgtgtcagtcactggatgcttcgatgttattcttcagattactcaattgcgacacttcttcggtatgcactacaattatccaaagtactgagtaacagtagcacatccactaaacctggagacatgatgctatcaatatcagcatccactcgacttgaagccaacatgcaacctttccaagtactgagtaacatcatcagcagtttgactcaattgcaaaacatattaagatgctaatcatccaacccaaatataaaaaagtacttcaggtccattacaattttggaacatgttcaaacaatataaactgtacgcacacaacatcaatatacttcatgttggaccatacaaacatccatgttcaccacagccatcctgtactccaccctctgggacagcaaaatcacacatcttcgttcactttcctgtaaaaaaactgggctgcag

SEQ ID NO: 7906 - DNA, 30394 bp, Oryza sativa
  unsure (1)..(30394): unsure at all n locations
gcaaggggaagctgtcgcacctacttctttgaggagcgctgtgagcaaatcctaccccaacagcaaattctttcaggaggtacaatcttgtactttagggattttgggcacattcctaacagcatttattatccaaaagctcgttatgcatgtataacaacctactaattcggatacaccccctatctactctgcttgttgtctataatgcatgcagtcaatgttctgaatcattgaagtttgaccacaaacatacataaacatttaggcttgtgagatgtaatttcggatactaaatttgctgtcagaattaatttgttcaatatatcttcattgcaggggcaaatgaatgatgcatctgaggttttgggggtgatctttgagtgcttgcataagtcatacacttctcgtgctgactgccaagttaaatctcatgagatcaattatattggttcctgggattgtgcaagtagttcctgcatagcacactgtctttttggaatggatatccttgaacgaatgaactgccagagttgtcggttggagtcaagacgactcaagtacacttcatttttccacaatatcaatgctagttcacttcgaactgcaaaggttagtataccctgggttggatctcatggtatttattgattctattatttcctttcttctgtgattttttggcatgttatttcctttcttcgaactgctatggtttgttagttgttacttgttccatgatgctattttttttttttcaggatatgtttccagatcattcatttgatgatcttttgaagattgtgataatgaatgaccatctagcttgtgatccagaagatggtggttgtggaaaaccaaaccatattcatcacattctttctagcccccctcatgtttttacagttggtaaacttctttatcttcaatatgtatggatatctgcttgcaaccagtcgtttcagtccaggaggaaggagccataacaaatatttaatcttgcattttcgttgtgtgtttgttagcgtaatgctacacaattgcctgctccatttacagtctgacttggccatctttaaccaaacaactgctattccattggcttcctgcctgataacttctacatttgctattgaaaattttctgcatgtgcttgagggcatgtaagttctctgtgtaataatactctttattgacatgactcttcatacttttgctttttcagttttggggtggcagaacaacaaagaaagtgtggatgacatatctggaactttggctggtatttcaactgagatagacatcagtactttctaccgtggtctagaccaaggaagcaaacattctctggtgtcagtggtatgcctatgaggactcattttgttctttcacataatcacatttttgaatggataaaagggcatgccatttttctagggcatttcatgtttgtataagaactttcaaaattgacagtttgctaaatgaatggtacaataggattggatttgccttttgtattaactatagtgaatgtgctattagcctatttcaagttacacagtttgcagtacaatatttctgtcgtgaagtaggtactactggagtttactgctggcactatggctatactgtgggtacattgctaacatttctttttcctattgccattaggtgcattggccagtgggtgtagtagcattagctcaatattgtatatttcactatattacctaaccgcatctaaatccagtcttctaaagtagaaaaacctgtcaattaaataatgcatctagcctactatttttacacatgcaggtctgttactacgggcaacactatcattgctttgcttttgaggatgggcagtgggtcatgtacgatgaccagactgtgaaggtaacaacattataaaccttcagaggcatacaactctgctgattcttactctagcttataagaacttggttctggctcgtgttcttacttgctcccttgtttgtgcaggttgttggtaattgggatgatgtgctcgtaatgtgtaagaaaggtcacttgcaacctcaggtgctcttctttgaagctgcaaagtaattgttccttcagataggcttttccttgtggtgttgtgaagattagaaattgataccaaattcgttttgagctgtgggggataaaggcgtaaagtggtaattcagcagttgcactgatcagttagttttgtcatgccccgtcataaataaacggtcacatgagaatactagaaatagaaaagccagtaatccttttgtttaggttttttggagcttcggtatagttctgatccctgatcctgtcaataagattttggcataggagtgggagggtggccattcgatcgtttgccatctagaggatagagaaaatttcagagattcataagcattgctgaatttattttgaagctgatccgaatgcatcgacgatgtacagagttgtgtttaccatgggaaggctataggggtggtgttcattagtttttggagaagggcgagttgtgatgcaaaactggttgtattcgttggaaaatgttggggaagggatatgtttttgggagcacggtgcttacattgaaatgttacagaatttccataatcctggcaatgttaaaatgaatggtcgccatgttctttaaagcgatgttaaattgcctgagtgtgttactctggctggtctttgcaacagtactcttcgaattccaagctcatacgttcactattttcctcgattatttccatcatgaagatgcatttatttctcaatgggttgtacagacattgcgatttaagtggtaggctaaataaggctttcgctgttatcctatgcattattgcaatctttagagtggccagttttacctggtgcgatctatttttagtcgtccctatactgagttctctctttcccgtcatagtagttcctctaccttgtaaatttgagactggggtttccaatttgtgcgtagcagagcatattgaaatggacaccggggcacagaaggatgttgaaaatgcgagacactgaattgttgcaataaaaatgggttatgcagcgcaataagcttcgggcttgtttagattgatgtccttttaaatcatgttattatttggtaaaattgataattatttggttatacttagtttgttatcaaattttgatgtctattatcaaattttgatgtctacgtaatcttgacaacattatattgagcaaattctactaaaacttagcaatattattcatttgtcaaaattttgacattaccgaattttggaaatgttcattctaacatcaatgtgaacagacccttcgttaaaccttggtaatgttatcaatttgttaaaaatttgacattactaaattttaaaaatattcattttaacatcgatgtgaatagacccttcgttagtagtactcctatacatgaaagttgctaggatggtttggtggacagagcgccgccaggccgctggaggccggggtggacggtcgcggcgccgcgctaattgcggcgaggcagggcggcgccgcacgcggcgcggtgccggtgccggtgccgacgccttcgcgtgcgcggcgcggcggaggcattataatggcctcgtgaccagctttctcgcactcgaaggccttaatttccgggatccaatgggctaaataaaaggcttcgcggcatccaaaatgggctgtattcaattcggcctgatcctaccaaggccattattagttttctggaatgagagaaaaaaaagagagagaatattaaattttgcaattgaattttgtttcactttgcagcaagtttagtattgatttcactttatattacaaagggtatacagaaaatatgtttcactttaaactggtttgtactgtcatataaatgaacaaagtttcgtcaagattttatgaaatttcacaaaatttatatagttttgatgatgtgtgttgttgtaaggtgaaacttatttcgatgcactttaggccctcttcttttctccaacaagagttggatggagattaagattttcgtggcacgcttttcaagctgctaaacggtacgtttcgtgcgaaaacattctatatgaaagctgctctaaaatatcatattaatctattttttaagtttgtaataatttaaacttaatcaattatacgttaatactatatctcgttttgcgtaaaaaaacttaatctttatcttcagaagaaaagaacaccacgccttagtgtaaaatcgtcgtatgtgctaaatctgatgcaaagggacataagatactcgctaagataaaggagaaagtgaaaacctggacatgagcggaagtgaaaagactcatgaaaatgttaccatagcttttttaaaacatttgtatagctttttttttattatttctgaagtctttgtaaatacttttactcctactctacattgaaattggcactatcttgtgtcagattgttaaagaaaaaggagctctttacatggtgcaaaacgcaattaacattgaaataaaaaaaatccttgattctactccgtacgtagtccatatattttctttcagccttcttgaggttatcggcttactgcacgggcatttcgtagcatgagccgtcaaggttgagagaacttgttggtcaactaaaagcacgcacaggaactgagcattagggcatgtgcacatttctgcagtggccgaacgtgatggtggtgccagatagactgccactgccagccagctgctagatctcgtttctgaacccattatataacaataatactattaaattcctaccaaataaaaaatcatactacctccatattagaatataaaaagttttagagttagacacggttattacagaaatagataaaatttaatggagagatgttgtaattggttgaaaagtggagatagatgagaaaagtaaatggtagtggggttgtgattggttgaagagaatgttggtaaaaaagtaattatattttgggacaaatcatatatgctataaattattatattttaggacggagggagtactacaaaactaagcgccattttcacacacgccattgcgaagggagcataactcaactgattagttacttctggtggaaccaatccgtctaggtataaatcctagggcctgttcactttgatgtcattttcaaccttaccaaattttagtaaagttgcaaaaaaaaaggctacatttagttcgctgccaaattttggtaactatataagaaatcatgctaaaattttggcaagttgccaaaaaagtggcaagttttttttggcatcatagtgaacatgcccctagattttacacgggtgctaatatttacgactaattattatttcagtggtaggcgatgtacccgttggcagcgagacgtttgtagtaactttgtcaatctcaagatatatcgacccagtctttcggaagtgcttatagagataaggtgtacgtgtgtatccataagagtgagtatgtgcgcgttatgtacgcttgcatttatattgtgtttctataaaaataaaaacttatgcaagcccagataggcagtacagcgtagcaatactagcagtactactccactatatacttagtactactactactgtaatgaaaccattaagcaccaactaataaaatacaagacagatttagtgagcacatatactaatactaaaatacgtctcgagatccagatccgtacagcgtgcctcgctatctcgcattaacattgcaaccggtcgaaggtatggctatcgatgtctctctcctgtatgcacgtacccccttcttccttgaagcacaaacaaaacaagatctccaatgaaaacttggtaattccttgcttccttcctccgctccccgtcgccgcgtgcgcgcaccgacgcagccgcaaccgccactccactccgccatgcgcgcgacgcctaagagcaggtacaatagcaggctattagctagctataaacatattttaatgagataaaatatgagagagaagagcagcaggctataaatctgtagacagctgcagcgcggactccaaaacataatgtgtatatgataggtgagaccatatattaatagtatagtaagcaaatattatatgaattgactattagattagctatagatgaattagagctagtactgtgagtagggcctcgtctcggtgcaagcccactactggctccagaattcgcagcgattagcgcctggatttctcggttgcagctggctcgccgtgcgtgacacccgatttttgcatcggtgactcggttgcgtcggtgcgaccatttcttaggtttattggataaatggatgtgccgtaatttctctgtacgtgctgagaggagctagttgcacgttgtacgtggccgtatcattcaattttaaccacttgttttccaaccaatcgagtggcatgaaggaagttaacagaactggtttatccgattggctctgaactttgaatacgccttttcattaattttctgcagtttattttgtatggaatgataatgtataataataagtagagtaggattgaagggaactccgttttccattggtgctcatgacggtgttccatacatgtcgtacttgatcgcatacgcggaaaaacaaacaaactactacaaaaaccgttccgtcctacgtacatgcgtggcattcgcctttgcacttttgatgattgcacgtactagtatgtagtacatcagtaggattcaaagccaaaaaagaagaaaaagttaactcctgagccctgatgcagtgtcgtgcctcgcgtcgctaggcagccaaaatctgcaaagacctaaagaaaaagaggttggcgccgacgacgacgagcacgcgagatcgatcgatccgtccacattctcgctggggatttctcagtgacaccatcagtacgcgccacgcatgtgattgtgaatgtgtgtactagtccaacgtccactgtctctcttccaaagtccaaatgcactgggccatcgtacaattgcaaagcaaaaccggcgactcagattttgaccatatgctggctgctgctgctcgcgttacatgtgaaccagcatatatatacacatctcgctagctggtaaacaatgcatcagcagtagaaaatgcaggatgctagtagcaactactacggaccactagtctagtacaagagtgttgtgttgtccccagctaggcagccaggaggcgagacggggcctcgtctgctgctcgatctgccacgcagcatgtggcgatcgatcgatttatcgatcaaaagcctcgccccctgcagcgtgcgaggaacacggatgtggctgccgctgctgctgcagacgcgacccccccttttcccgtcctatttaccctctcgctcgattcgattcacggacggtgagtaaaatcgggaacggtgagattttggacggaacgaactgttcgatccagacatccggtaacggacacacggtaataaagttgtggaagagtttggtgatggtgagtgagatcatcctttcggtttcagtttcaggccttcagagtttacaatgctgtcacgtgtaccgtgcaacaacgcagggatggaaacggtcagtctattacagaaaaaagacggtaacatacaacttcgatttattaaatttatttctcataaaattaacaagttaacttaaaagaatttatcacacgaatagtcatagtcattttgtttgtagtaactataagaataatagaaaattaattcatcatatttatcgatttaactatttagtactaccgaacaatacgatgatgaaaggaatcagaaaaaaaagtgttatgtatggccagaataaaattttttatctaaaacagtatcactcacaaaacgaggcttgaaattgtgctcattttcgtgatcatttttatccctcgtgcttacgagcgagcggattatcctgaagcacaagccttgatagttgatacggtccagataagagcgtttcggttgaaaatcagccggccggtcgcgtcgtcgttccatggctagtagcctaatactccctccgtttcaaaatgtttaacaccgttaactttttagcacgtgtttgactgttcgtcttattcaaaaaatttgtgaaatatgtaaaactatatgtgtacatgaaaatatatttaacgatgaatcaaatgatatgaaaagaataaataattacttaaatttttttgaataagacgaatgatcaaacacgtgctaaaaagtcaacggtgtcaaatatattaaaacggagggagtagtacgtactaatgtactagtagctgtaggctgtgtttagattcaaacttccaactttttccatcacatcaagatgtcatacacacacaacttttcagtcacatcgtaccaattttaactcaaaatttcaactttgaaagtaactaaacacagccgtatacgtgtactacttacaaaacaacacgacgtatccgttgcaggctcatgtcgtagacgcaccgtctaacgtctcgtctccgagagggatcaacgctccaaacgcaagcgtccacgggtgaaatttttggtgtttttcgcctacctcatagtagtaggtacgtctcgtatttggcagattgtgctgcattgcaatgcaggtgatgggcccatgcgtcgtaatctgcatgcacgcgccgtatacgcggaggggacaaacggcgcgtacacgacgcaccggtacacgtacgggcgctgcacagcgtttcacgggccttttcttttgcttcgcttttggccttgggagcattcaggaatcaggattcatcagcagctgaagatatgaagaaatcgtacgtgcagctgtgcgatgagagaactgcaaatgcggtgcagtgttgggttggtttggtttggttggtccctctcctccactataatccactcgcctactggtactggtattacctctttttcggcgatgaaatcgcctggctttatgtaaaggcaagtgttcccccccctgctgcttactggctttattagagtaggtacaatagcggcagcacggactctaagacataatatgtgtatgataggtgaaaccatatattaatagtatagtaaacaactattatatgaattagctattagattggctataaatgaattgaagctagtagtgggctatacgcttagttggtggttaaacatacatggttcgtcactgatgatggctcatttagtcgttgtgttttttttttgacattggagtaaccactgacgcgttgtaacattggcctgatggatatcgtgatatttaagtgttcatacaatcatactaccaatctatcatgcaagttctactggcattcagttggcatttttcgttcattgtaaaagctagtaggtacggagtatcatgcataatataactgctcctccgtttcaaaatatttgacactgttgattttttagaacatgtttgaccattcgtcttattcaaatttttttttatgaaatatgtaaaactatatgtgtacatgaaagtatatttaacaatgaatcaaatgatatgaaaagaataaataattacttaatttttttaaaaaaaacgaattgttaaacacgtgctaaaaagtcaacggtgtcaaacattttgaaacggagggagtatattataggccgattgggaacaagatcaagtgctcaaccgcatttctgagccatatgccgactgaattgaatggggctccaactaacctattgcgtataggccagccacggttactgcatagaaattgcgatggaccttcaattccatctaatagatgaatcgtgtactacttacgcaccgaacaactcatggtggccttcccccatgccctttgtcccggtggcctcaccgtacctatgaaagatacctttcatttcgttttcattttaccactactcctaccttgtactaggagtaactaacttgtcagccttcccgatgtagagtgcccatttcctgaatatggcatttgctgatgaagtgatgacactggctagtggagtggcatgtgctgcgtgtgtgtgtgaactgtttagctgaaggccaagacatcaatcttgcatagcattaaacctgacagagattggtatccatgttgtttgtgatgatttggatcagccatttttataagaaaacaaaagctgttttgattgacaaagagcaccactaatccaccactatagcaagcttagcagatcatactacttgtgcatttccgtgtttgcccccctggttgtgtcatcgcggtttgcaaacacctgcacatcactacgccgacagcttaaaattagacaggtgtacgactaaaaagggcttaaatctactactgtttacataaggacatctctgctcgatcagctatgtactactggcagcattcagctacctccatctgattactccatgctctcaaatcgtaacctccaacagattataggactcaaacagctcagtgactacagatgattcgaccgaagtcgcatacaaatgggtgtgagattgtgagagaatggtcaaatttacttggtatacgagtaaaataatctgaactccgaagcatgttttgaggagggaagaagtgagattagcaccgagaagagtgagcttttgcagagcaaggagtagtaggtaggacaagtggtgacggggagatgagcccactgtctcagagctcacatctcacaggctcacagggtcgcagtgatgagctgccatctttgtactgttccagtgtttctactcctcttgcccccacacgggcacactctttttcaactcctctctttctctctctacgagcaactactacggggttgagagagagagagagagagagagagagagagagagagaatggccattataatagagccataggccaaaagctcaactgcactgagagcagcatcagcagcagttcactgtcactcttcccaagaacgggtgccaaggaatcctagaatccaagaaaggcagcagctgctgcagcaagaacagcacagggggagaggtggtggtggtggtggtggggaagaagaccacacacattcggctgggtggtggtcttcttcttctgctgctgctgccgctgttgccgcttgttggagtgaggagagtgggtgagtgatggggagggggtgcctggctgcgctgctcggcggcgcggtggcggtggccgtgctggtcgccgtcgtccactgcgcggtgacgtacgacaagaaggcggtgctcgtcgacggccagaggaggattctcttctccggatccatacattacccgaggagcacacccgaagtatgtagtagtagtaacagcattcttcaagaatgtgtggttttttttgggacatttcgtggaggggagtttctttttgggggttgttcgtggcgtgggctggcggtttcttggtggaaatgccatggaaagcgaggagctttgttctagctttgttggaggtttttcctttcggcatcagattattcgccaaccatttttttttctgaacgaaatgagggggttcttgaggtttttcttgaaaatgctgctcttttggtctgctcctgcaaccattttgggatttttgttgctctgcaatggtgatatgttcatgttccaagctataattttttgggggtaaaaagagatgagcttgtttggtctcgaatcttttggtgctgtactgatttttcttcgtgtaaatatttgtcagatgtgggacgggctaattgagaaggctaaagatggaggcttggatgtgatccagacctatgtcttttggaatgggcatgaaccaactcctggaaatgtactgtctctttcattattaaccccattttttaacagtgtaatggcacatcagggatttcaatggtttttgctggcttcgtgcagtacaattttgaagggaggtacgatctggtcaggttcatcaagactgtccagaaggctggcatgtttgttcatctccgcatcggtccctacatttgtggagagtggaattttgggtattcctcaagccttaatttgaccgtagtaaaaacacacaaatgttcttttttttcaccattttctgttccttgtatgtccatattttactttcgtttcatgacttctgttgccatgtaaatttgcagtggatttccagtttggttgaagtatgtaccaggcatcagcttcaggacggacaatgaacctttcaaggtttgtggaagtatttcagcatttctggatcttaccagaggtgtaaatcttgttcatatgtgtttctgacttgagttttgctttgcagaatgcaatgcaggggttcacagagaaaattgtgggcatgatgaagagtgaaaacctctttgcttcacaaggcggtcctattatcctctctcaggcaagtgcaaaactttgcttcccatgtcatgtatattttttttagagagagggcctcaaccatgtcatgtatatggatgcaagcacattgtataacattgggttagtacgtagtagtggttgagtaatgtgttgtttgcacgattcatcttagcctgcacattttcctgggttgctcatggtgcggtgggtgttattgtttggacacagattgagaacgagtatgggccagaaggtaaagagtttggggctgccggcaaggcatatatcaactgggcggcaaagatggccgtgggattggacaccggtgtgccgtgggtgatgtgcaaggaggatgacgcacctgacccagtggtatgatgatcttatcctctgtcaaatactaccaccatcaggtgtaaattgtgaaactataccgaacatgttaatacaattatacaacgatacaggacatgctgattcgtatttttgcgagttcagtgggttatctccataagaggtcatgattggtgttctaggtttctagcatatgtatgagcatatttgtcgcctactcatatatcaaacatatattagaagaagaaaaattgacgccaaccacattgattttgatcttgtgaaatttcagtcgtggaatatacaaatatctcatgacttctgtacgaacaaattattgaaattacatttaacctctgttctttaaacagatcaatgcatgcaatggtttctattgtgacacattttctcctaacaagccttacaagcctacgatgtggactgaagcttggagtggatggtaattttttttccccgaggaaccaatatctagtgttgcaagcacaatcccagtacttccattgatgtggttcatgtttatataatttgattctgttgattcatagtggtagtataattgctccaatatgcaaaataattcaggtttactgaattcggaggaaccatccgtcaacgaccagttgaagatctcgcatttggtgttgctcgcttcgtacagaagggtggttcttttatcaactactacatggtatgacagatagaggctcacttatgttttctttaagcttcctaaagggtgatactcattcttgttggttaattgattttccctcaactgtaaaagtatcatggaggaacgaattttggtcgcacggctggaggtccctttatcaccacgagctatgattatgatgctccacttgatgaatatggtgagttacaaggaatatgcttagagacgttttctgtattgagcatgatttataagtgcccttatcaatattatcatcttctgctgctgttatttctctacactatgagcatatttgcagcttttcaagcattaagagtggatcttttttaaaaaaataaaattcagctacaccactatattcttcttactcaatccttttcttgtggggctaatacacaggacttgcaagggaaccaaagtttgggcaccttaaagaactccatagagctgttaagttatgtgagcagcctttggtttctgccgatccaactgtgactacccttggaagtatgcaagaggtctgttgtgattaccctttcctctcagtgaagtatatatatcttaaccagcttgatgtttcatttacatattgaatttatacttcaggcccatgtgttccgatcttcctctggctgtgcagctttccttgcaaactacaattctaactcgtatgccaaagttatcttcaacaatgaaaattacagccttccaccttggtcaatcagcatccttcctgattgcaaaaatgttgtttttaacactgcaacagtaagtttggcatatgcttatcccattatagcatggtttcaattctgtatcccttttacctggatcaagtatatgatgactttgcttacctgattcaaactgttgtaatctccacaggttggtgttcagacaaatcaaatgcaaatgtgggcagacggggcttcttcaatgatgtgggagaagtatgatgaggaggttgattcattggcagctgctccattgctcacgtcaactggtctacttgagcagcttaatgtcacaagagacaccagtgattacctctggtacattacgaggtaatgccagtcgataagttgcactttgcacgtaaaaattgcaatgtacataacgatgaatctgggaaatggtgactattagaaccccttgttcgctgaactttgcattgattttctgattatggcaattgagaaggtgtcctttgttctaaattttagttttcacagaagtaacgattttctaaaattatttcatcaccattgacagtgtggaggtagacccatctgagaagtttctacaaggtggcacgcctctgtcactcactgtgcagtctgctggccatgcgctgcatgtcttcatcaatgggcaactccaaggtttctacttgaaaatgctccccagtctatagagtattaatgtagtaaaaacttagtgaacaaaataacccgcaaaagaagtaatgaataaaatgattataattcccttttgtaggttctgcctatggaaccagggaagatcggaaaatctcatatagtggcaatgctaaccttcgtgctggtacaaacaaagttgcactgttgagtgttgcttgtggactgccggttcgtgctctcatctctgcatgaatttgtacatgtttacagcaaatgatcaattgtatgagttggatttttcttgtcctgctatatagaatgtcggagtgcattatgagacgtggaacactggtgttgttggtcctgttgtgattcacgggttggacgaaggttcaagagatctgacttggcagacttggtcctatcaggtatattcagcatactggtagcctggtgcgagttaacgtaagaatgaataaacatgtgacttcttccattccaggttggcctgaaaggtgaacagatgaatctaaactccttagaaggctcaggctcagttgaatggatgcaaggatcattggtagcacaaaaccaacaaccgttggcatggtatagggtatggacaattaaccttgccataatcatttgatgattacttgcctcccattcttacgatagtttgtttttgtaggcatactttgatactcccagtggtgacgagccactggctctggatatgggcagcatgggtaagggtcaaatatggataaatgggcaaagcattggacggtactggacagcatatgcggaaggtgactgcaaaggttgccattacactgggtcatacagggcacccaagtgtcaggcaggttgtggtcagcctacacagcgctggtaagaacattcacaacaatatttgaattttctggcacctcttgccttctcttttgctgtacacaaaaccatcatgtactacttgatatttggttccttttcccttgtccattaaaactggagtgctccatcacatccctttttggttctattgtctagtcagtggagtactatattaacaataaaaattgaactcttgcattcaggtatcatgtgccaagatcctggttgcaaccaactagaaatctgctagtggtttttgaggaacttggcggtgattcttcaaagattgcccttgcgaagcggacagtctcaggtgtctgtgctgatgtatctgaatatcatccaaatatcaagaactggcagatcgagagctatggggaaccagagttccacacggcaaaggtgcatttaaaatgtgcacctgggcagaccatttctgcaatcaaatttgctagctttgggacacctcttggaacttgcggaacattccagcaaggggagtgccattcaattaactcaaactctgttcttgaaaaggtgagaacgctgtttggtcattttggtctacctgaaatttttttcttaaaataatgtggactacctgcacctggacagaaagacccttcgcagcaaattaaccctgttcaaaccacttgaattttttatcattttgcaaagaaactataatcactgcaattagtccatgaacttaccacacatatcactgattttttctggtgcttatttgaatagaaatgcattggactacaaagatgtgtcgtcgcaatctctcccagcaactttggtggagatccctgcccggaggtgatgaaaagggtggcggttgaggcggtatgctctaccgctgcatagggcaatttctttgccgagacgaatttagagatggcaccaaacaggtgggcttgtgcttgatcaaagcacacagaaagcgatgcagagtagagttcaactgtaaagtatcgacgccacatagctgtggctggaggattagagatcgattctagcattcactcagtcgaatttcagattagaggattctaactctactgcatctccatgaattgttcagagtgaccaactgctaattgaagttggtcctgggatggagtgcagggagagtaaaggcaaaagattggtgcattcttttgctcgcgttagtgtgcgtgttgtgttgtttcatctttcttgaaaggaagaaagatgccgatgaattgtgcatgtatcccatatgaggaatcgttgattgtgcagtgagcatgatatgctgcagaacaattgctcgtgtcatattctgaagttcagaaaagaggttgtcaatttatcttcttcagataaaccatataattcttgtgatgaggcctgagggagatttatgccacagacatatgccgcactagaaaacaatttaatcgttttaaggtaggaaagataccattgttgttttttcctccccaaagtattttttgtctgaaagtatgaaatgtggatgatgtattcagatagcatagggtaccttgtcaccaactgagctcaataattgaacttgcatttctggcaatgaaaatgggggagttttccctttcacaacagtaaaaaaaacggagaacaattgagctcaatctggccggcagcgtgctaggcatgatgcttgcggctcaatgactgacaaaacattatcctgaatgaaattgtggaccttgccccttccggaactgatgaccacatgaattattaacagttgagaacataggggcatgaatgcagcaatagctcccaacagtaatgaaacaagtagtaataattttgcatctcatatatgggacaccccccggtgcacattcagaaacgaacaaatgattgtgctaaagaaatactgccacagccaaaccgacattcacgcggccaaaaaaaagagagaagaagatgcagagtaaccacaagacattcattcagctctgaacaacaatatattagtgctaaaatggaagagcaaacaaatgcagcgtaaacaacaatcagcaagcaactgtctctctctgattaactgatctgataaaggtctagaaccataaactaggggtttagaaaacgtatcctgtcagtcagaaaagcagatgtcgcgcgtcccgttgcgcgcagcaaatctgcagcgcaggggcaatccaataataaaaggagcttcctttttgacgatgtgctccccctacccttcgacctcgcctgtcggctgactgggatgcggctaccgacgcccgcccgatctcctgaatgttttttcgaggttatttcgtcatgaatttgctctccaatctgagtgatatggtatccaaaatcagtgcagaatggcatggcaaatccacggcttcgacgacgccagcgaatgttgcatgttattgatgcataagggcattagggcagcacatttggcatctggaactggtcgaccgagctagattgaaatgtcgttgtttgtgcagtgagcatagcatcggttcgttggattgcatactgcaagtctgcgatgacggtgcatttcaacggccaatgtcagctgcgataggattcaacggctgcttgcatccatctcagatggtttcgatagagaagcactgtatcgtctcgaatttgagtgatggtacccaaaaaaacgatgaagaaaatcttatgtggtaatctttgttgctgctctacctccatgttgccacgacaagtcgaaaacaagcgagaaaacaagggggacggagaattgaactccgaccccctaccgtcgcgaatcatgtgctgcctttcctttcgtcttcgcgcgtctgttttgggccgtttcacggacaacggcatgtcaaatccacggcctttctcgtgctcgtgccaaggcctccaggcgttacacgctcgtcatcggcccaagcagcaagccaccggcccaccgctcctctttccctacttcgccgagcccaagcgccgccgtcttcgacgacgccaacaaacgccgcagaaaacgagatttggggcctgttcactttgttgcaaaaaaaaaaaaaaccttaccaaattttaacaatgtcaaaattttgacaggatttcttatatagttatcaaaatttaacagcaaactaaatgtagctacttttttgataactttaccaaaatttggtaaggttgaaaatgacatcaaaatgaaaagggccttgaagtgagagatgtacctccaaacaatttttaatagaaaattgtgagtgtgtttaggattgatcacgggatcttggagttgaaagatcatgggcagcacagcacagtatcggttcattggattgcacactgcaaacctgtgatgagtgcgcatcatcaatggccaatgaccaggatgactggtgtagtagtaccacgtcttgcatctcagatatgtctgatgtctctaattcgctcgaaacaaatgtagaaatcttaggtgcacaatggtgatgattcctgttgcagctagccagcgatcttaccgttgccttgaaaaataacgataatattgagaaaacagggggttcggagaactaaactccgaacaccacccgcgccgtgtatttgggccgtctcacgaagatgtcattgcaaaatggaataagttcacttttactcctttaaaagttgtcttaatctaatccatgatcctaactgtaaaaccggatatctccacccccgaactactgaaaccggtgcaatttaactcccttggtggttttaaatggcggtttcgctgatgtggcgtctatgtgatagtgttgacctagtctgtggcattgacgtggagtttaggtggcattagagttaaaaacatatatgtgggacccatttatcattcacacaaacaaaattatagggcccactgacatgtggaccctacatgtcatcctctctctcttcttcctccctctctttcccttctctctctccacttcggccttctgcaagaggcgatggcggcagcggcagcgacggcggcggtggcgcgagggtaggcgctggaggcactggagcggtggcggcgacggacggggaccggagtggcggcggcgcttcgggctagagttggcgtggatggaggcggaggcggcgacagaggagatggcaggcggtcgagggccggagcgacggcgggtcggcggagagcctggcggccggtggtggctagcggggagagagctagtggcgaaggccgcccccatcttcctccctcctcgccgggctccgcacgcacctgccccgatcggtggagcggattacgcggttgggtccgtaccacgggctgccaaaggcggacggcttgggcttcgcggcggacttacggatggtgatgcgggcctcgccgaagagggatgtggacgccgcgcgaccattactgcggaggagagcgccgtggcgagtgagtgagcatctgagttgctccacggctctggggtctacgccggcggctgtggtggcacggcggcgggtggccatggcgagttgttcgggccttgcctgcctgccgccgctcccgcccgccgatgcacggctttccgtcggggcccagctcccttgacccttgatgccgtcgcctgttgccgcccgccgctgtgcgcccttcgttgccatcgagccgctaccctcgtttctgtcggatgaaggtgaatagaaaggggagaagaagagagagataagggagagggagggaggaggtggggctcacaatattgtttgtgtcaatgacaactgggtcccgcatatatttttaaattctaataccatataagcaccacttcaacaccacgtcggacgaaaactaagtcaacactgtcacgtagtcgccacgtcagcgaaaccaccctccaaaatcacccggagagtcaaattgcaccggttttaacactttagggtcaagatttttggttttgtgattcaggatcacggattagattttagttacttttaaggaaatccaagtgaacttctccttgcaaaatccacggccttccgctcggtcgggtccatgcgcacacccgcgcgtcgtcgtcggcccaaccaaacaccccaaaaaaccaccgaaatctcacgaggcggcaacgcatcaaccccagtgcccgtgtgcggccgtgccccgcgcccgcgcggctgtgccgtggcgggctcgcggcacggcacggtgacgcgcgaccgtacgtgcagccactcgctcgacacggctgcctgcctgcccacctccaagtacatttaacgtcacctccatcctcacacatggactgtcctcccacctgtctcccgccatcgtctcgccgccgcttctccctctccctctctctctactcatcatgtgtgcggatgcgtcgcccatgcatccatcgccaaaattattggtcacctgatgaccgattctctcctgtgatttcagtgcagtttcagcgagatcgatctacctttccgggacgcctccatgcctgtggcttggttgacgatcaaagcgtgtgcgtgccgacgctttatggaaagtacgagatcttgatagcaaagcgcagagagagaaaaaagttgggaaaaaaaagggggaagaggacgatgctggatgacggaataaagatgcaattctcgattagattagatggatagagtgatagatagatagatagattgatagatactattgttttttgtctctctctcggacactcttggcctacctacctcctgttcatcatcagtcgggagaggcaaaagctacgaaagccatctgtccccagctaagctctgcttttgcaaactgcaattgcaatcgcagtgtagtgtggagtgtgtgctctgcctgtcttgtagccataggcacacaagaatgtggttgttgatctggatcgcaaggcctgatcgtatcggagtaacggaatgtgacatcaaaaggcgacgacgcatagaaaaatatctcgccgtctgattttttttttactttacctttgcatcttctcttctctgtcccatcctgctcatatttcaccacctcgtgcagactggaactgaattctgtatagatcctgcatgataaagagttcagtttgtatatgctgctcatgaactaagccgtacctgtacgtacgcaaccggatcaatcatagaatttaagttccaagtgatcacaatatcagttgctacctcgggatgcagtcttgcaggctccattggtactttatgctactatatagatagatgcctagatggtcaatgtttatctgccaattctaccaccatctgaatgtatatatatacaatcagccagaataaatagttgtggcacatgaacaaacaatcattggcaactgatgtgaacgatgatgatccacagatcgaacagctgctggaacccggttggctatctccactagtagcaacttccacaaggctgcttcggcgaaaaagaaaagaagaagtcagaaaaagacgacaagagaaacaacccaactgcaaggtgatgaccatctagacagacagggttaggtagtgcgcttgctcagcagctaaaatgttaatggcatcatcacccgtgcgcgtttcacgtgacttgacatggaaaattcttctttatcccccgttcggtagagaaccattttctgaacgcatttcctttttgttcttgtcctcatttaaagattacaacgtgcagtttttaatttcaatatcaattaaattgttaataagaggtgcatatgctccttgttaatcccaatccgtccttaacaatgttgatctgggttagttgcatcgtgattacctccgtaattttcctaaaattattggaccttttgtctgaactcagctgtcgttcatctagcgtgaaactgccacttgttcgtcaggtagctcctctcttctcttcttcctatcctatctttccgtttgattttgacagccttgtgttcgcatgcagcgatgattggccacattcagactcttgccaattgtcctgaacagcgttctcttctatggactggtcttgaacagtctctgaaagtagcagaagtttattctctattatcctacagtatctcagatgaaaaataatcattagaaacttctgttggttataggacaccacaccgttctaacagtgtagcagaagagattggcgaatcatgtatcgacacggcgaattaagatagtcccaatcacctaattccagtgacgatccaacagaattgaggtcagcttgataaagaaaagtaaagtggacaaggtgagtgtaatcacagaaacgtaagtacatgaggaccctgatgcaattgcgttgggtggcacaggccgatcgatctgaatgagtctgaaacttcttcggtcctttttcttttgagggaaacaggagaggagacccctcttcgtttcaggaaccgacatgctagtatctgttagtagctggggtgatccaacctgatgggatgtctataactaaatgtgatatgacctgtgtttcttgaaaagtaaggattgtgaactacacatttctgattgttatgggcctgtccctctaaaatggagtactactctctgtcttgaatatagtcgcaaatgaataatatgtgtatcttctcctctttgtaactgtaaggttgtgggttcgcgaaaaagaagtgaggttgtaaatttcaaactagaattgtaaatgtggaattaaattcgcccaaatctatgaagatccctgtcatggcattattgaatagatttgtagtccattgaagactaattcgtttccttgtacagtaacgagacttctaggtaacacaatcagatactgtgtaaaaaaaataaatgagatgtgacctgtgtttcttgatagtaaagacatgctaatgacattctcaacgatttcctaatagcttgaacaaaacaaacctcatgatgaaactgaaattactaaattatttataatttttctgagaatcatatgccttagaatacattccatgaaaattgtgaacagtcacagagacaacaatacgcattccttgtccgactgcatgactctaccctattatggttcaaatcccaatgtctacaaatatggttttgtgcatccttattcggtatagaggctagaaataatcctctttttctttaaaaaaaatgcgttggttgtcaattatactcagctataataatcgcattttttcgccgaatctcgtctcttcgaagttggcccacatgtcagcgagaggcacctgcaaagcaaaggcaaggagttgggaggtcaaattcattattggaggggaccatgaagacacttgtccttgcacatcactacctcatgcccaatttctaaagcaagtgtgtgccaccaaactgaaataaagttgagcattagttttgtggccttgggggcctcctgttgcacttttaactagaaatgaaaagaaatgagagattttgggcaatgcaaatgtatatatgcagtacatttttttgcacttcgtcctgtgagatgtctgcatcctccccctatgcaaattgctaaggagcatctcatgatcagttggagagattggaaggttcagaagggaaaagagggtttaggtctaccaactggttgttagcagactaatacgtcttaacagatgccgtcacctactccgagtgatcggcctcctagcaatcaagaaccacctaaatatggcaagctgggttagaattcaggtaaaaacacaccaagcaagtgataactgaattgcacctactctatttgaatgcacagagtgaactaactgaactgctcaacaagtactgtttgctgtaagcgcaaactcaagaagagtaaaaactgagagtttttagactgactcctttttgtgctactgtcagtggatgaactgagttaattcattggaaaaatcattactacttgattgttcagtcaaaaaaattgaaagtgaaagaatccactagaatttgcggctagctccatgtacagactacaaaccaaattgcaagttcagattgagcgttggatgatccagggatactgcaatagttgcattcagtcaatctcgtccgttcaatttcctgctgcatgttcgactgctacagccgatgaaaattccagtgaatccacgagttgaaacctaagtgagaaaatgagggagcggggaaagagatagagaagaataatcgaaaggaaacagacaaaatggtggtggggtttctttaggatttgtagggagatagtgttaggcagcgccttattggtggcagccgtatattattgctcaaggaaagagtgaggagttagaacaactctagtgtagcctacagagtgaaaccaaaagagagaaggaaaaaaaataacaaaaaggagtagatgcagttttagttcttattattctaatcttctctcttgttgcaatttctttttagaatccttgggatcatctctgtccccgttctgggtggtttctgtcatactccaggaactgtcttgttctagctctttgcttggtctgaaagtcgatttctgcacaggtatatagccttatcctatcaggtttaacgttgttctttggttgcatcagtttgtctttgagtttgatctgagaaaaccaaaaggaattatctttttgggcttgattggtgttcatatgaattcttggtattgtcttctgccttcttgcttgttgaactttccgtttcttgttagctcctttgtggttggttggtgtgccaactgaaaagattgcttcttgttacgtagattattgttgagattgttttctgaatttctcaagcagcggtgagtttttgttgaaattgagctgaatttctctgaaaccaactatttctggatgcattcgtttttgtagcttgctgagaaattcagactcctttttttccttttcatgatttcacaagtactggtttgaactgctattttgttcgcattagatgctgaatttatcaaattgcaggtactgcgaaagctttgggaatagtattgcagaaagcgcagcaatctgaagcttactgtccaaggtagacagctgacataagcagtttagcacttgagctatgttggattcacttcctcgtcttcctgacatattccagtttttcctctcttctttcaagaatcggaattacttcagttgtactaggaattctgaacttcgtttgtagttgctgtctgaatttgtggctactgtttactactggactcatcgtcacgtctctgacaaaactcagtacaccatgttgatgcacgagatgtttttgctcctattaaatcttctgtggttttttctctgaaacgtctgactcaagtatgaatgttactagaaagcaacaacctaaaatcagattgcagcaatccagcagtctgaatttactacctgaaatcatctcaaagacgaattggtactactagttttgaatcctcactcgttttttttgttctcttttgcagccagtttgcagctgaagccaaagactgaatctttcatcagggtttgataatatcaaatacccttgtgatgacagagttaatcagtttgtctcgtcatctacgtgatgattcttcttcagtctgtctcttcttctgcttctgaagacgatggccacattcttctcctcttccaccaatcagagagacctcaccggcggcggcggcgacggaggcgacatgtcgttccagcactacccaccgccgtctaacccttactcggactcgtcggccggcggcctgatcccgctcccggcgagcatcgtgtcgcatagccacattgcgcacggcggcggcgacgagccggcggcgttcagggaagcggcgacggcggacggcggcgagatgggcctgcagacgcagctgctcatggcgcacggcgcggcggcgcggggacaccagggcgggctatcgcttagcctcggcacgcaggtgccggtgtctctctaccagtacaggccggcgggcatggcggccgcctcgctgctcagcccgagccagtcgtcgccgatggcggggaggagcgcgcagaacagcatctacgtgcagaactcgaggtttctcagggcggcgcgcgagctgctcgacgaggttgtcaatgtccgcgacgcgatcaagcggaagggtgacaagaaccagggcaaggattccggcgagtgcaagggcggtgacgccgccggcgacgacaaggccggctcgaacccgcaggagcaggagagcaattcagcccccgagctctcgccgtcggagaggcaggatctccagaacaaggtcaccgcgctcatggccatgctcgatcaggtaatgcctcgatctccatgactccatgtcacttccgaacaagaagaacgtgctcgtcaatggaggttttgttgcgttgtggcgcgcgcggcaggttgatcggaggtacaggcacnnnnnnnnnnnnnnnnnnnnnnnnnngtcgtcgttcgacgcggtggccggcggcggcgcggcgaggccgtacacggcgctggcgctgcagacgatctcccgccacttccggtcgctgcgggacgcgatcggcgcgcaggcgcaggcggcgcggcggggcctcggcgagcaggacgcgtcggcgcagggcggcggcggcctctcccggctgcgctacatcgaccagcagctgcggcagcagcgcgccatgcagcagttcggcatgatgcagcagccgcagcacgcgtggcgcccccagcgcggcctcccggagtccgccgtctccgtcctccgcgcctggctcttcgagcacttcctccacccgtaagaaccacctccgccgtcatccatgtcgatcgatcgatctcaatctaatcctcaccaatggcgccatgaatatccataggtatccgaaagattccgagaagctgatgcttgcgaggcagacgggattgtccagggggcaggtgagattgagctccatgaactcgacgctctcatgcaaagctgatggattcaaatcaagaagagaattccatggttttttttttctttttttacgtaggtatcgaactggttcatcaacgcgcgcgtgcggctgtggaagccaatgatcgaggagatgtacaaggaggagttcggcgcggagatggactccaactcgtcgtcggagaacggcggcggcggcggcggcaagggcaaggacgaggcgatctcgtcggaggaccgcgacgagttccagagcccgtcgagcgccgccgcggcgaggcacgccggcgtcgcgggccagctcaacaacccgttcaagtcggaggcgatgggcggcgccgccctggacgtcggcgtcggcgtcgtcggcctgtccagctgcctcggcggcgccatgggcacgtacgccaccggcctcaacctgaaccaccacgtgcaccaccccggcgccggcggcaccagcctactgcacgacgcgctgcaccaccaccaccacggcggcggcggcgacgccaggttcgtctcctacggcgacatggccgacctcggcggcggcggcggctacgacggcggcagcgtgtcgctgacgctgggcctgcagcactgcaacaacgccggccccgtcccggccgagcagcagggcctgctctacggcagcgccggcgacttcgactacatcaacggctccgacgaccggcagcggttcggcccggcgtcgcagctgctgcacgatttcgtcgcgtgatcaaagcacggcgcgcgatggatgcatcgtctgcggcggcggcggcggcggcggggaataacgcaagacggcgtcagaagcctgggccggccggccggcgccgtcggcgagggtatacaggtatacaagcaatatacacgtacactcgtgtgttgtgttgggggggtaagtaaagtgatcgaagtaggggtgatcaggggtgtaattgtaaaactgtatatgagaagggggtgtagcttgctgtaaagatagattggtatttttgctagcttgcagatttctctactgattgatgcatggatcattcatatatatatatgtggtgatgtgttgggtcagattggaccagatgttcaatggattactgtgaattgcagctacaaatgtttcatgttttgtaccagatgttataaagcaatgcagataggaggggggggggggggggtgtatgagttttgtaacacttttttttactgcaagttcatgatctgaacttctgaagatgcatgagacagattgaaccaagcacacaccatgaaaaatttcagaagaaactcagaagcaaatataagtgcaatagtcattttaatggtcatatatcaaactggcagtacttgaatacaagagaatctcattatgtccaggaacttataatgcgaaaggtcaatcaaaagcatcttaattcttacacttgataactagtatatgtagtgtgccccattttgcattagtattcaacttagcatgctgcataccatctgccaaacacttcaaaagatcacagaaaacttgctcaggttgtttttaattcctccccctagttcttcgtcacatgttggtcactggtcagcattcaatggtggtattcacctacaaaaaaaatgtgaaggacggagatcagattatgatctaatcagacttcagaatcatactaatcattgagatatacctttttaatagggctttgatatcttgtttcaatgcagagctttcaaggaacctgtcctcgctatctgaaacatccaccgttgcgagctcaaaatcatcactgctgcagagctcattccactcgaaccacagcttcgacactcgttctttcttgaaggcggtgtggtgatcatcctcctcaggcgaatcagcagcgacgaggcggtagcaatacaccattttagactgtcctggcctataggcacggccaatcgcctggcgcatcactgaagggttctcatggacatccaagatcactatacgagacgcgccaacgagggagatgccctcgccacatgccttgatggagccaaagaagactctagcatctggtgagttgttgaatctatggactgcttgctcacgctgatcctgagttgagccaccagtaaccctgaaaatatgtacctctgatttccatcctttcattctactgaccagcttttccaagaaaatcaaagagcgcacatactggctgaacacgagtaccttccctcccgtggcttctgaaagagacaacagattgtgtacaaacttggccttcaccccgtcgttgatatcaattccggatatgatggaaccgatcttcctattggtgacatttccatcatctgcatcagctttattggcattcttcaagcatggatgaagagaaacggcattgcatctcgagcgtttcgcaaatttatttattccatccaagcccttaataatatgttcctgtttgctactcatattgagaaaaactgtaaagtccacaattccaggtagctcatccaaaagcttgccttggtaatagtgaagcacatctgcagttagctcacgaagattttggataatcaccgctctcatcttgtcatttccatctttctgacggtgttcttgaaccaaatcaaagaagtccttatctga

SEQ ID NO: 7907 - DNA, 20092 bp, Oryza sativa
tgttgagggtggaggcatagagcatcagggaccacttcgagaatagctcctgaagttttgtcaattgcatctgcatcactagaatttctgtgttctgagggacgtgctctgtacgattgcttccgctgacacatgtaacagataatgagaaatatttttgaacaaaaagaaggaatgtagaaggaacataatgtagaaggaggctaggcaaggagctatttagtttaagagtagcaaaatgatttccatgtgcatttctataagagaatctgtttcatccctaggtaaacaggccactaagaatgtaagtatgtaacagcaatattcccgaaaaagtatgtaacaacaatcaggtgactacagcctacaggacagcaggcaaaatataactagtttatgttgtgatgataaatggagcatgtgtgctaccatgaagtaattttggaaatgtcataattttaattctttttcagtaattaattatagtaaaataatttggaccagaaatttcatacctttttccactggtactcaaaaatattttcaatacgttgctggatcagaccacaaacacgacagacaatgcccaaatcatctttcatcaggaaatcgtgctggcattcatcctctgcttgttcacaagaattctctgatgggacaatgttatgatcgcttccaacagtctggtgaagcaaactaagttagtgagccattcaacaagaagaaagtaattacaaaccatgaaataagcaaagattgaggagcattgttaaaaagaactcagttgtaaacaagaggcaagtggtgctaaaccatacagaaagcaaaggtagaaggagcatgttaaaaagaaggaactcagttccagggtgatggtaaagactaaagataaaacatttacaatttacatgttctgaatggcaaggaattgagaagtgagataaaacaaacagaactttttattgacggtcaagcaaaacagcagaatgatactaaataaaggcctgtgcattaacaattactcgtatgaatttcatacagttggcctgatcggctgccttgtttgcatttcagtcagccgctacagggagttgtatgcacttgcatggctgcggtagttgattaggccaagtgagaacaacttcctcagagtgagcatgaaaactgttataaaaccttccagaaataactatcagacaattaagggatctaggcagtgaggtaatttctctcatagaaactgtacgttatatcctgatctatcaaacaacaaacacagagacaatcggaatataaagagagtcaatagtcaatggtgtgcaaatcttatgcgtattcccaaaaaataaagaaaaagccaatggtatacctttgaacatgccattgcaaggtacatgtccatccaaagtccttccagctcatcaactgggctgctgttgtcatattgatcaaaatttccattggttggtgactgactgcgcataacttcacaagctagttcatcagaagcaacagagatgatctctttctttaagttcccttttatctggacattttcagcttgtgcttcctcttcccctatctcctcatgaccactctgttgaaatgcaagagtgacatcaaataaataattttcagccattcaatagtataaacttaaatgttgaaacaacacattttgtcatactagcataagtttagacaaacatcataattttaaggctggtatatgctatacgctggtcatggaaactaaggatgattagtttccacctctcttataagttactccctgtagttgaagatataagttattctgggtattgttacgatctccgatccacacacatttggccattactttttatagctctctgtttgcaaaatttatagaatatttctttttgaagaggagagagggatgccctctcccgttctgctaatagaaacgataacaagctcattacaagccaaaatgtcatcaggggaacggaaaacaaaaaaaatctactgggagcctgctaactggatgctccaaacttgaaggagacagccacacaaaactactagttttccttgcacagccattacaatcagcttaaggaacctggacagttttggagaacgaaaaaaaacagagatttgcttttgtgtttcttgtagatcgtctatagctttttgaaagtaattttagtgacataactactgataaaatttcatgcaacaactatttattctcaaaggtttcaaactttgattgcccacactccaggacgactaattttggatcagggttcagggggtagtatgagattccgtttacccgtaatatgcataaaactgcttaattcttgtatacacattagtagaataaaatttcaggaataattgagcacaccttgttgtaaataacatcgttgatgtccatactatcctttcctttcttaactgcttgtgcttcagaactgatgttttcattatccagcatggagatttcctgttgttgggcatgctgctcaggcagaacgctttcttcaatataattcgcattttgcttggaatcagatgatttttcatctacaaaggatgcaacactgtccccgtcatcagaatcaactaaaacaactgttgtgttagcaccaatattgtccacattagcaaaagtataatcttcatcattgtctgaatccaagtcaattatattacgacaactagagtttcttccatcttgcacaaggcgatttgtttctgatgacttgagtggactggcatatggcaactggataggtacttcttgcagcttttgtaggatgctgataagttcaagccgcttcatactgattgccttgtaatcattcgtggagctcccatacttcaagtcatcgcattgttcaagcaactgatgacacaaaattctgttacgactaaggatgcttgactgggactggacccgtgaagagctatcgtgaccgctttcatgcttccgccttttgcagctatcagaatccatcctagaacacaaaggaagacttgttagtgttttagaaggtgcattgtgcatttgtgcatggatgattgcaataataaaatgttagtacattgcaataacaaaaaagataatgtatcatcatgaacagaactatcactgatgcaaataaaacatgcggttgttctgaaaattgaagaaaaacaaagcaatacttcgatcatggatttactaccaacaaaaacccatctttctgtctgaatcaaatccatctattctaatctgagcttgctcgcaactcccagacagccgcttgcagtgaccaataccacagtccacaagggaccctaaaaaaaatcgacttcacgggaaaaaaaatttgcaatcagaactcggttattcgatgcttgtttcacaatccccatgtgtagagtctagacagttcaattggacccaacttgcaattagtttgccaggaccataaaccttggggaaaaaaccccaaaacccaagaaacgcacaaagctagggatagaaaggaaatgcccaatctgaccgcaaaaatgcctaaccagataactgaaacaacagacgtgcatgcaaatgggagagggcaaggaaaaacatgatgagagaaagaaagaacttctatttaggaattagggaaaacaagaactgaataacacagtgagaaatgcggaagaaactcacctagcttccttctgggttgagtgatcgatctctcctcctccccctcggagggacagaggaatctgaagaaccttgcgagaatcgctatgagggggaagaaatcaattcaccaaaacttcatgtgagcactggaagttggaacgcatgatgtgctgtgctcttcgttatgattcttgtgaaacacaccactgaacttccaaaatgtgaagtagtactccaggctccagtacatatacactgaactttcttagactgtgcagctgggacccacgtgagtgggccatgcatgtcatagaggaattgacatgggttttccctgacatttgggaggatccgaacggttcaccttccagggtgctttcgagaggatatggcgaccggctggtggtccaacttcgccgcctctctctccgactcctcgtcggcaggagacaccgccgatgccggccgcgccggcgagagagccaggcactctccggcggagtcgcgtgaaaagcttctcgagcgtctcgccggttcagatggcatagaagcaatatgcggcaagcaacgcggccttcaaaatcttcacatttctcatttttgtgtacggaaagctaaggtcatgtacagatgtgccctcaatcttctcacatctcaaatctcattcaataagccaatacatacttatatactcactctgtttcacaatgaaagtcattataacatttcacatatttatattgatattaatgaatctagataaatgtgataaatgctataatgacttacgttgtgaaacggagatactacatatgatccagttgtacaactcaaataaatatacaactataaatcaatttagagaacatgtataatgcactgcgactgtttataatcgtcgatcaaattcaattgtacgtgagtccaactgttgggacgtatgcataacaattttgttttcaacttcatgcgcgtgaaagtattgtgttcgtggtggtcaagttcctgcctcttgtgttctcggtcgtcttgggcctcggccaccttacgtttgttcgccatggcctcctgctgctgcagctcctgctgcgcggccacctgtttcgcctgcgcctcctccatggcctgctgccgtagccgctgctgcgcgtccacctgtttcgcatgcgcctcctccacctacctccggtaccacgcacgccacctcggcgtcacggccttgttcttgtgcatcgcgacgaacctctccaccagcatatccccgccgtcctcgagggcctcccgcccgatctctctcgcccgagcgatgaagaaatccaggatcacgtcgaagaatttcttgtaggagggggagttgtccatcaccccgtggtagattttgcgcaggaattcggagtacttctcgtcgtacttgtcgccgccggcgacgaggccgcagtgggagcccggcgacgaggtggccgcgcacagcctgaggaactccagctccacggcgtggaacgccgggcggaagttgtcgccggcgccgcggtggccgccgccgcggaacgcgaggtcgaggcggtcgtgcgccagcgccgccgcgtgctcgtccgggaaggcgcccacgaggcggtgcttggtcgggttggacgggtcgaccacgcatgccgcccatttgcccgtgcccttgtctcgctgcacgccgacgtagtatctctgtgtcgacggctgagcggtggcttgcgccggcggccgctgcagtggcgtcgcggcggcgggaggagtggaggtcgcggcctgagaggatggcggtggcatggtgcgtgctggtggtggtgctccttctcccccggtgttcggcagtggcgcgtgaggctccgtgggctggatgggggctccgattgcacgagagctcgtcggagcggggtacctcgccattgctgctctctgttgctgcgacacgtgaggattcccggtcggagtcgggatggtcggaacgcccggcgacattgccattgacggagctccctgagcgttcgacaatggcgcgtggggcctcacggtggacagtactgctgtatgagagctcctcggaaccatggcctgcgccattgcagctcgcgctccccgcatccgcttgtgttgcaacggtgcggccgggatgccggtcacagctatgtgggagctctgacctgccggcaccatcccagccggcgaagctccctgcattggtggcgccgcccagggagccctgatagcgcctctcatcgacggagcgttctgcacgggcagtgatggcgaaggacccctagcggtggtagcggcagcgccggaagctccaaagctcgccggccgcggcacgccggtcatcggtgtcgcgttctgcctctgcattgtcggagaaggcgagggagcccttgcggccgtaccacgagcaacgggagccccaaggttcaccggccgcggcccgccggtcatctgtggcgcgttctgcgtggaaggggaaggagatgaaaccctcgcggccgcggcgccaaagctcgccgggcgcggcacggcggtcatctgtggcgcgttctgcacgggcggggaaggcgtcgcggccgtagcagcgccaaggctcgccggccgcgccgcgccggtcatcggcggcgcgttgtgcgcttgggaggaaagcggtggaggcttcgcggccgttggagcaccggcgccgggagcagagagcgccgccatgttcgcctccgtgatcgtggtgaagtggaaggaaggatacgtgttgtgtcacgaaacgtcgaggccgtgttggcgacttaaaccgaagccatgtcgaaaccgagttgatctcgctatgctccgagtcggattccagcttggcacacggaagccgcgaacgaaagcgtattttgtgattacgtttagggtggctctattttgatttctacggaatacgtattccttgtttgaacacggctttagttagtaacactcaccaattgggacgaacacctcgactcctcgagtcaccaatggcgattccccgtcgcctcgccgccgccgcggccgccgaaaccaccaaacgctcggcggcaggtctcgccgccgccctcggtggaagcggagggaagcccgcaacagccgacctggccgctgccgcgacggccgcggcggccgccggtcgcgcctccgaatgccagtccctcctcctccgcatgtcgcgccgccgcggcgcctgccgtcgcgagatcgtctcctccctcctcggctcctcccccaccccgcagccgcgggtgtttgacctcctaatccgcacctacacccagtcccgcaagccccgcgaggccttcgaggcattccgcctcatcctcgaccaccgcgtccccatccccgccgccgcctccaacgccctgctcgccgccctctcccgcgccggatggccccatctcgccgcggacgcctaccgccttgtcttctcctccaactccgaggtaaacacgtacacgcttaacataatggtccacaactactgcaaagccctggagttcgacaaggttgacgctgtcatctccgagatggagaagagatgtgtctttcctgatgtggttacacataatgtgatggttgatgctagatttcgcgctggggacgcggaggcagcaatggcgttggttgactcaatggttagtaaagggctaaagcctgggattgtgacgtataattcggttctgaaagggttatgtaggagtgggatgtgggataaagcatgggaagtgttcaaagaaatggatgattttggtgttgcgcctgatgttcggagttttaccattttgattgggggattttgtagagttggggagattgaggaggcgttgaagatttacaaggagatgcggcaccgtggtattaaaccagatttggtgagctttagttgcttaattggattgtttgcaaggagggggaagatggaccatgcgatggcgtacttgagggagatgaggtgctttggattggtacccgatggtgtgatttacacaatggtaataggcggattttgtagggctgggttaatgtcagatgctctgagagttagggatgagatggttggctgtggatgtttgccagatgtggtaacttacaatactttgttgaatgggctctgtaaagagcgcaggttgttagatgcagaagggcttttgaatgagatgagggagagaggggttccaccagatttatgtaccttcacaactttgattcacgggtattgcatagagggtaaactagacaaggcgctgcaactgtttgacacaatgttgaaccagcgtttgaggccagacatagtaacatataatactttgatcgacggaatgtgcagacaaggtgatcttgacaaagccaatgatctatgggatgatatgcattctcgtgaaatcttccccaatcatgttacgtacagtatcctaatcgacagtcactgtgagaagggacaagtggaagatgcatttggttttttggatgaaatgataaataagggcattttgccaaacatcatgacatataattccatcattaagggctattgccggtctggaaatgtttcaaaggggcagaagttcttgcaaaagatgatggtcaacaaggtgtcacctgatttaattacttacaacaccctaatccatggttatatcaaagaagataagatgcacgatgcttttaagttgcttaacatgatggagaaggaaaaggttcaaccagatgttgtcacatataatatgctcataaatgggttttctgtacatggtaatgtgcaagaagctggttggatttttgagaaaatgtgtgctaaaggaattgaaccagatagatatacatacatgtctatgataaatggtcatgtcacagctggcaactcgaaggaggcattccagcttcatgatgagatgcttcaaagagggtttgctcctgacgataaattctgagggtcctcattttcttctttattggattccgtagagccattggataatttaggaaagagaaacgcagggctgcaggcactgtgcagtttgtgaatattcagaattctgctgaaagtctgaaacaaatgcctatggatttgaaggtgagaaattttaatattctgcagttggcactataacatcttctagtctcttcatgccactcttctacttattgacctagtggaaccaaccatgataaatgataccaagttactattttgagtatgacttggtaagatgtaatgctatccattttctgaccagcaagaagctaaacatctactgagtattatttttctcttgacaacagtggtgcttggttgagttacttttttccttttctttttttttgcattccatccctcaataattttgtttgagatttggtaccatcacactgaggctgtgtttagttccatgctaaaattggaagtttgaagaaattggagcgatgtgatggaaaagttggaagtttgtgtgtgtagaaaagttcgatgtgacggaaaagttggaagtttgaagaaaaaagttggaatctaaacagggcgtgactgtaatttccataggctgctggttaattttgtggaagtctctcccatcaggtaacatgttccatatacttcttcgccaagacccaggaatttgctatccggggttgtgcttttgttttcggggcactggagaaatcaagtacacctttaaattttcaggtactcttcaaaccaaactcgtctctctctctctctcacacacacacacacacaccaaaaaaaaaaaactgtgcttcctcccttctatgttttgtcaagacattgtgtagtggtagtacattgtgtagtcccacagtgatctgaaccaccgtttgagatcaggaaaaggattcaatttggcaatgactgtacagtttattctcacttgtattaattacttatcttcacttcagttgtttgttcctgttcagggaaccagaagtttggaagatcactggaaaatcctagttggtgagagatattagtacacaaagcatcgtgatgtctgagatatctacatataacatacagattccataatgatctgcgaggttatttgctattactggatcttccttacgtcaaagatgtttcttttagtcatgccatgatacagacagacgagtactgcttgctaaggagtcacaatcaacagaacgtgattgatcagaaggaaacggcaagtgagttcaggaaaaggtaacattcaaaacaattataaaaaagatgtcatattgaaaacaactctgcacaaatcagggcaatcaaaacttctgtacaaaaagaacaaatgaattggctgtggagggttaaaagggctccttaagaataacctctagaagaacaggaaaagaacagaaaagaaagaaaaaaaaaatgaatattgtacatgtacatgtttcaaagctctcatggtgtttggcatcttcttccaggattgttaggatcattggtgcatccagatgcacctggctttgctgaagttaagaacaccgtgcttccctgtcgtggctgcgatctcgctcccagcaatctggatgcatgactgatggtgattgtggtgctgaagatcagcatgaaaatgagagctagaggcagaacttgctgtcttctgatcggcatagttgagcagctgacctcctggtatgttctgaattcttgtggaaggcgagttacgaaggctgaaaaactggggtgaatataaagactgtgtcaacacgtatatgttcatatgttgtataaatttataatgctcttgagcgcgtttggttccttgtgtgtcaagcttcgatgtgcctacccgagggctcgacgcgttgtcgcggtcagctacgacttgcaaaaccattcatcacgtggttttcatgtaattgtaaaccttgaccttcgcataagagagcttgacctttggcataagagagtcttcgtgtagaattcatacgaaatccctttcacagtttcaacattccagagttttaagtgcatgatcattcaatactattccgtactctccaaggctcagtaaggaatgctaaatctctcgttttcttcatgttaaagaggatgcagcttgaatggtcgaattcacaattgacggctccaccccaaaaaagttcaggatgactcgaagtcgaatccgcgtaatacgctggcgaaaattgaatgggccaaatgtagcccatatccattttattcatgggtctttgaacaattgagctcgaaagcccagctctctctcgtgaaaagcttaaccgacctagctctcgagggcgcgctcagaaccaaaaatttcgaaaaggtaaggccgaaatcgccgcctcctccctccggtttctccccctcccagagcgtagcctgcgcctcctctcgcgatgcaccacggcggcggcggcggcgcgatccgcgtgctgaatgtggcggagaagccgtcggtggcgaagtccgtcgcggagatcctgtcgcggccgtcgggcgggatgcggtcgcgggaggggcggtcacggtacaaccgcgtcttcgagttcgattactccatcggcggccgcgcctgccacatgctcgtcacctccgtcacggggcacctcatggagctcgagttcgacgaccggttccgccgctggcactcgtgcgaccccgctgatctcttccacgcccccgttcgcaagtccgtaccccaggtacggctctctgtttcctgctacccatttctccgaacagttggtgcgcaacgcgcggtgtcctgtgaattgtgccctcaccagtcacgtgtcgttttttgcatggtgtggtctcttagtgtcttgcgtccatggagttggctgtgtttaactcacggtgaaatgtgcggcactgaaatttcgttgactagtttatgttcgtgcgtttggtggtgtactgtacctggattccagttcgtgggggcctgagggtctaataatgagtacctgatttgtactatcaatggatgcgtctgctgattttgtttagggtactgcacttaaggaactctattctagggttcttcaggagcttgatcgggggacatcgcatgattgctactcgtttttgaattgggaaccactagtgctgctggtcatttgcactgttgcgcagcagcaatctggttccagtcatatacgtctgtgtgttgtactatacatgtgatacattaagttattgttattgtgataggaagagggatacagtaatgcataaactgtcctatttggttattttgaaaaactgaaggctatacttgctattgctggtataagagggtagttgtatgccgggctggccgacctagtatgattatatgaacaccctggcagatactattctcaggcctcaggaagtcgggcttttgttctgaaattaaagtttatcctacaacatcatttatcttgcagaaaaattagtaaactagaggcagaagttaaacagatatacaagtttcctctcattcttccgttcttccagcatcaggagaacaagatgctactctttttgtcggttgcactgccacaaccatgctggagcttgcttgttgtatgtgatttggtgtagcagtatgttttctccatagtcatcattgatctgatagattgcctatgtatcttttccttttgtctttttagaatctcctatcttagatggatttattgggtaacatgcaggcatgccttaaattgctgagaatgaccatgctcatttgtctatttgcccaaacacgtgatctgtttttgtgttttgatgctagtggtatggtctgatggtaatgaagttataattactgctccagtttctttttttttcagctgaggtatattcatttttttaattaattgcaggataagcaagacataaaaagaacattggaagaggaagccaggaagtgtcagtggcttgtgctttggcttgattgtgatagagagggtgagaatatcgcatatgaagtgattgatatatgcgcaggtgccaacagccgcctcaacatttggagagctcgtttctcagctttgattgacaggtatttgttgctactgatgactttctcttcttgattgcaaagatggcatatccatctcctgcatcgcacgggtatccccattcacttcacatccggcccgattggtgttactttgagttagttgtatggagatgaactatggtgttcaagttgactggataaacccgacccacagtcccacactcatcccaaatctcctgttaatgtcttaaagaaatgaaactgcagggaaatccatgaagctgtgcaacatcttgacagacccaacaagctctttgctgatgctgttgatgcaagacaggtaattaaattatcattccaacctttgttgatgttgcattctcttgcatcacatctactgagaagtactacagcaactctagcaaactaaggtcctcgaagagcctctgccacatgttctgactataatattatagcttttgtactggtataggaatggaatgggacgacggtatattttctccttcttatattattcttctcaaatgaaaagcattttcttgcaccttcttagtgtcttgaagatctccgatgattattaagaattttgtacaggaaattgaccttcgcatcggtgcctccttcacaaggttccagacaatgctgctgaaagatgcatttgttcttgatgacactggtgatgataggaatataattctgagttatggtccttgccaggtacttcactatagagtatgaacagaagatactaaatgatgcctactttcatcttggtgtaacatgttctttgcattgcagtttccaaccctaggatttattgttgagcgtttctgggagattcaagctcatgaacctgaagagttctggacaataaattgttcccacacttcagatgaaggcactgcatcttttggttggatgtaagatgcactcgacatgttgtactgattctttcattacaaacgtcatctgagattatttcttgtttggcagacgtggtcatttgtttgattactcatctgctgttgtgatctatgaaatgtgtgttgaagaaccaatggcgacagtgagcccttgacatcttttatttcaacaccaatgttcacgaaataataacgataagtatctttgatgacagaacaaaagtaccagtttagttgtattttttccctgcaggtgcaaaatgtaaggaatcaagagaaactaaaataccccccatatccactaagtaccatagagcttcagaaacgtgcctctaggtacttcagaatgagttccgagcacacaatgaaggtgttaaaaataattctattttggtaaccttgtatacctagaacagttttgctagccaattatggccacatatcactgaactgattgttttgctgagtgctctcttgtcctgtctatatcaggtggctgaggaactttatcaagctggatttattagttatcccaggacagagactgataacttctctccaaacactgacctacatgtatgttttcaaatttactagttcctcttgtccattcttatttcatggtttgatgattcggattacatgttattgaatatttgcacctataactttcatttttacataatttacatgataaagaatatgttctcaaagtcaaatactccctctgttcctaaatataagcatttatagcaattcaaactttgtacacaaatataagcattatcttggacacagttttcaaagtaggggaatctaagcaatttcagccagtcagatgattgggagggaatccaagcaagggcatttgagtttcgcctaaacccttaatcttttctaaacaacctataaatacttatatctgggaacagagagagtaattggtttgttacttttttttttggtaattggttccccttttcattttgtgtggatatgctaacacatgatgatccccgtcacgtttaaatatttgatttataaaattctaatcatatgtcattcatgaaatgccactagaaaatattaaaagcgttttctacactctgataaatacctgcgatggttataccattttaaccttcccttgtttgtttgttttttcaaaaagaatatatctattttttccgacatgtttgggtacttttgatgtagtccatcgtacatgaacaagtggctcatccaaattggggaacatatgctcagcgtcttttggatcctgaagcaagactttggagaaaccccagcaatggtggtcacgatgacaaggcacatcctcctattcatccaacaaaattttcagctggggaaacaaattggactgataatcacaaagtatgtgtctttcctatatagcagatactatagcatttttaatattttttaaaggcagtatttcttatgttctacaagtgtgtaataaaactcttcatatttgtcttcttgtgtccagaaattgtatgagcttgttgttcgccatttccttgcttgttgctcccaacctgcagttggagctgaaacaactgtggaaattgacattgctggtgaacagttcaatgcatcagggcgcgttgttcttgctgtgagcatcctcaaaccttgctggaatcgtctattgtttcataggtgttgcaaacgtgtaaataggcagtatccatacaggacatgtaaatatgttacatatcctatacctctaattctgcttgttctttagttctttaaacactttgctccactaataaatctggtaaacaagagtaggagaaagtgtatttcaatcagtaatagaaacaacttgatcttatgtacagaggtgacatagtcttaacttttaagctctgagaagcgtcttctttgtgttgaagcttcaatgtgagtcttgggttgccattcctcctttagtttacattaattggttctttaatagcattgttctgaaaaaaaaatcataaaacaattaactgtgccagttgtggtgcactgcaattaatatttattgggaagggaaacataaaggatgataaaatgtttagtcagtaaacaagaatgaaatgctaggagaactcatgaaaaatttaactttgccaattttgatgtactttaactgctttgatatttattggaagggaaagaaaggaggagcatttaaatagaaagtgaattacacagccaatatgcttaactgtttacattgccaggtatttaggtagcatatttaggaaatggaccttctgctggtacaggtggaaatgctgtgcccaggagttcaggaatgcagtgtctttaatttaatactccagaatacattttcctttctaacgttagttctagtgcaataggattatttcatttctgggttacttatggcaaaattccttttctgcatgtcctataaaatatgttatatactctcttctagaaaaattatttggacgtatatcggtttgactcatggggcggtacattacttccgacatacatcattggacaacaggtttgcttcatttgtaccaacactttctcattcattttatagtgtcttctgtgctatgtgggtaaaaatacctgtgtggaatgttcttataaaagcctgcaatttaaggatgactgtaaatttatattcccaattaaaaaattgatccttctgatatgttgtaacagttggtgatttatagggaaactgtgcaattctgtatagcagtgtattagtcgctacaatttgtatgcattgcttgctcaatatttagtaactgcagtatatatgaatcagttgttcattttttttgaaagaatattctggttgctttttagttgtttaccatgaggagttgatgaccttgcagtttgttccaacaactttaacgcttgattctggaatgactcgcccacctcctctgcttgctgaagctgacctccttggttgtatggataaagtacacttcttgtcaatctgcaacataatattttcttgtggcaatatcatatgtatattgagttgtgccactaaaatatttgactgattgactcctttcgcttccaggcaggaattggcactgatgcaacgatgcatgatcacataaaaaagttacttgaccgttgttatgcaaccaaagatgcaaatacacggttctccccaacaaatctagtatgtttcatcacaactaagttttcattagatcattgcatgtagcacaatattcattgtttgcaattatttacatgttagtgttattatgacatggcatctaacagaacttcagctatctaatctcatcttatgataatacaatttgtttgattacctggctagaatattctgaatataagtttttgcccgcattgagagaattatattaaggccctctttgtttaggcttaggcttattggcttagacttttaagtcagcttattggcttatacgatttataagccggtgaatttaatgtcttaaatttaatggtggagtcatacatctacctcatataagccaaaaaagcttctccaacctagcttttggcttaatagtgttagagtggcttatggcttcaaaaaagccaaacgaaaaagctgcatctttgtttaggtttagacttttcggcttataagttggcttataagcctaaacaaagagggcctaagcctgtgtgcagattgtcataccttaagtcataacataagataaataaacagaattcccatttcaaatataatactctgtagtagcatgttgcccagatgatttttttaccacaacaactccattgcttttctgaagaaatctcttattatcatgtgggcactgctgtttggtatgaaagtaaggattctattgagaaccagggctaccaaccagggcttgaaccttggttctcacagaaaaaaaatgccccttgttgttgtgttcccctaaagtacaggttaagacacgggctgtgtcaacgagttcccgtacgagtaagacctggcttttggggcattttctcgaccttaaatgcaatgcgtttgggacgtctcttcccttgtgttgagcttttcttttgaatgtcagattcatcaacatttttcatgcttatagtcatacgtaatgcatccacacttttggacaaaatagctgaaagtattacttctaatgacatattctatttatttccgttacatataccttctgtgatttctattggactagtcctgataagacagtttaggggtttgtgctgacccggcaaaagtttagtgggttttttagccaggccggcctaagataggctgaccaaatttacttaagaaaaggagtatttacacacatacaagtttcagacttcgacaagaagctgtcgaagtgaaaggatgttgccacagcggcaacttcctaaaaagaaaaaatacaagttacagaaggttgttactctcctaaaacattgaaaaccccagcttctttccagatcgctgcttcgtctttaattgcgccaaaaaggaaccccgctgttcggctctgattctggaatactcgcgtgtttctctccttccaaatcatccaacagaccagcagcaccaaagtgtcaaatgcgctaaaagtttagtgggttgtaaaatatatttatctggttcacaggaaatactgttctctgtaatatattttttctccagtgcagatagtacttgtccatgagatactttttctccattgtactgaaaatgaagctcatctgctaatttcacacgtgtcttttgtttcttttttctctaaatgcagggcgaggcattggtgatgggttacgatgaaatggggtaagttgattcttaaacctcacttactgaacccatgtaatatgtttggtttcttgaaataatttaagtcattttaggtatgagctttggaaaccttatttaagatcaatgatggaagctgatatgaaatcagttagcattggtacaaagagtaaatcagaagtacttgagaattgtttgcagcaaatgaaggcttgttttcttgatgtaagttcttttttatgtatgtataaaagtaacaatatggcgcaggaagtgaagcatagaaactgttcatcatctattgaattgctctgacctctgagtttatatctagtagttaaccacttatcattggtataatgcaggcaagggcaaacaaggtgaaactctttgatgcaatgggaacattctttgcaaggtttgattggatccatttggctttcttctttcattgctacaaatttctagcttcactttgacttttgatctaggtcaagtagaccggtcaatgagacacagaactccatagaaactgtgagaccatgtgctgcatgcaatgaatctgaaatgtttctgaagcaaaggccggtaaaattatcttcccatacatcttttctttcttgaaatggttctgaagcttaggcatattggaagtgtcgcactatgtccatgcttgagctttgcttttctttcctcagactggcgaatttatggttgggtgtcggggcttccctcaagtgagtaacatgtgtgctttgcttagttaccagacctcttgttagtaaaaaaggaaataagaaacaattcattaatcttgccagaaaagagcatatggaactaataatgcagccaaaataattgaactccgacgaaaattttgatattaatagtcttcctgaactttcagtgtagaaatgtagtttggctcccacgatctctttcaggggctgctgtgactgatcaagtttgtcctacctgtgctccaggtgaataatttagttccccaattattgaaattgtaccactagtatgatcaatgattttcactgatggactgttcctttgctgattctcctttgaatattgataatctgttaaatttacaggtccggtttataagattcaatttaagtttcggcgaagggatattccaccaaattttgatgtcgatcacctcggtatactctcctatttcaattgaagttccatactcactttagtttttcagttaaaacttatatgaccaaaaaacaaatccttctttcctctcaacacgtacacatcttttgtttggttacatactaaggtgattcggacatatttcatgctgttataggttgtattggtggatgtgatgacatactcaaagagctcatggaattaagtagatttggaagtcatagccagactgcaacaccaggtatccgcaaaatgttgagttcatctttttaaccgctacaagtcaagttgtagagaattagattcattaggggtaatcgcaatcttatgcttattgcaactcaaaatatatagaatctaaaacaggcttgttttgtggattcaccttattttgtctcccatgttttgcttactacttcctccgtcttttaatagatgacgc

SEQ ID NO: 7908 - DNA, 69194 bp, Oryza sativa
aaaaaatcaacggcgtcatctattaaaaaagggaggtagtatatcgaaagtaggccttgttgtcatttgttaaaaaacatgtatattttatgatcatatttgttgtttcacagcaagaaatcagagccagactgcaagtggtgtaaggcaggggtcttcaaggcaagatttacatactagctttcatccagccgtgcaatttactaacggacaaacacctgttgtgaatcctcaaggttttcgttcaacccatacccaaagctcaggaaatgcatcaggtgactgtactactcagtaatgtctacaaattgttatgcaagccaatcttcagctggcctggcaacgaaaaagaagaggtaatgcaagctcatgaattgatcttgagctattttcacacgcaggtcaagtacagtgcacatcatgtcgagaaccctgcgtattgcgaactgctaatacagaggctaacagggggaggaagttctataaatgccagaatcttgcatgcggctttttcgcgtatgtgaatccttttagtaacagtgttattttatcacacgatattgatctgcagggtgcatttgcatctgatctatccacttgaaactatctaagcatgcagagtatcactagttatgcagctatctcagttatgtttttcataaatcttatgtgcacatactcctattccgaactaggcaataaacagatttatcttagctttccccctggtgtgatattttgctctaatctctatcaagttaaatagctaaaaacataataaggaatatgatgcgaaaagagaagctgtcaattataggggtttgttttagctatctatgcattgcgttgcctgatgtctctgtgtgcaacgcagatgggaagacgatgtggagaactctgcgccgaggggccgtggcgggcgtgggcggggcgggcgcagtagcagcaggcaatcatctgcatctgcatctgcagggcggagaggcggcacccaagggcgaggcaggaggggcagaggacggaatgctgatggcatgatgttcgttgcggcgacgggcgagcccgtttacggcagctgcttcatctgcggcgaccctacccacttcgctaatgtctgccccaacctcgggagatagatctcaggccaattggtccgcgatgcccgtacagattggcagcgtaacggcgttggcacggtaagttgaccccccccccctcttatgcattagtaataatcatgatgactagtttatggtaaacttgttaatggttttctggaaattgggaaaaaaaattgagtatttatactgccgccgattcagaacatatgtgaaggtactgctcggaactgtcatgtggctatacagggcacatagccacaatggcagaaggcaatgtcaaccaggacctgtacctagacttgcaaacacgtgatgcgagagggaaaggcacttgcccacgcttcaaagttgaaaaatgctgcaaaccaaaagctgtatgagatgatcaaatgatggtatcttcgaaatgtacccacggtgggctgcgatgcacgtacgcagccttgtaaagtctttccaagcagtacccaatcccctcattgctcctgagaaatttcgtcactcaccaaaactttttagtcaaaagttcagcggaaaaaatggatcatgccgtcactcttttccttgccctattaccatcaacccgctgtttgtttcgtcttgtcactttcttgatatatgacgagttgtttctctaaatgatatgtttatcaactctttgttactgtaggtcacatcgttgtcataacacggccctcttttttctcagatcacacgtacaagcatgaagcatcactcgcaggaataaagccaatgctaaaaaaagcactgggttgatgagatcgttcagatgctggttgaacggttagatcaaggtaattgattagcatatcttttttcttttgtgttgaatctttctggtgtgaccaatctcagtttgaactccttgaataatcaactaagcctcctttttttcaacctttgctcttaaaactaagtattttctttagctagctaattagagagaagagagcataaaagaggaatgattgcatacgtgaggggctttgcatgctttggtgcttcggctccacctaacggtgtcggcaacggcatggctttgcagagatgcttcagttgtcacacatgcatgtagtctagttactctagtagtctactgaaaatcttggaagcgatctttccatgatcggaaagattcgtaacgaggacgacacgaaccgatcaagccctttgtttaccatcattgcccacacgcccacctagcagctgatagcatatatgctgctgcactggccgtaactttgtttgctactactatcagctgctatgattataggtgccaaaaggggctttaagttgcttatcatgtcctagttaatctctcttccctctccagcctctcttccctctatccacatagaggcttaattagcaaataatgagggatcggatagactatctagtgaagcttcattaattccttaacgggtgaacaacttcccaattaatgtatatacactgggaacaccaatacgctgagtttctgaacctttttcaaactccaagcaaccaagaacttaaccaccagaaattagtctaccaagacgaagatgacggaaggccatgagacaattcactggtactcaaacacaaccatggaacaacatcaactggcactacacataagttgatcgcttggtctcggtgcatatgtacacatccaaccgagtctgggatagagttataggaaatggagagcacttaccagtgagcgagatggaagatatatatcgatgcatggtgatggtggatggagcacggacggctggctgcacggccaaacatcgtcctacctgcagaagcttcacgctggcagtgtcgcccgccgatttgtgccgaagccgaagaactaaacagttgagttggggggaatgaagcctggtccgaaaccccccacctagcttgcttagctgcagctgaatccgccattccgcccggtgttaggtctcggaccagacaacattcccctcaactgccataaaaatgaatgaatgagagggagacagagagatatatatagagagattttcatgtataagctaggagcttgtatatatatggaggggcagcttgttagctcacggcagatgactctgctttgagcagctttatgtcatacaagtccacatgcttcttttggcaccttgttgctttcacatttacagcttggatgaacaacggttcatccaacctaaactgtactggctacttagtcttaaccactggctagtgcactcagtctgacaatgctatgtaatccaagtcaaacttgcaagacgtgacatagccatctattccaacatgaacacgtcagcaaatcatgagctcatgaccacttgctagcagctaagggcagccactgaattagtcatctagattcacaggatcatctcagacaagagatcagcattcagcaagctatatgagtattatgattaaccaagtggatgcaatgcatacatgaatatataagctaagctgttgaaattaattcacaacgcacagctgttgctgtgacatttgcatgcgtagtacatgattttattcgcaagcaaaggatttcttttgctttgcatgtaccgtgttgcatagccaagttgttttgattccaatcttagcacttaagaaactgtccaccccgggcaacctgcagctctgcaacaacaaagagaactttttatgtggggatgtgaaagagatctagcttgagcaaatggatttgatggggagattgtgaaaaaagacccaggtgactgaatccaatagttaattgggattgtgcaggtgtaacccgtactgaactactaatccttttttctcttagctcatcatgaaggtcaaagatggccgtgtgaatcatggaatagtaatgccaggttctggcagtttggctggctctttttatgacagaggctcatgggagagtttcttgattgatgtagggtaggaatttctattggaagattgtagagaggaacatgttacatatgctatattccttatgggcacggtgatctgtcgcatacctatgtctgcgaagaataagctgattggtttgcaactaaccggaccacacaaggtggaggtcctggaacactggtctccatgcctgattactagttctattatttaaggattttcttttctaaaataatagcacctgtagctcttacattttcagaattgcagaatctgattatcaaactttagtgtctttggttcattgcctcaaattttcagggaattatttgaaaataaaatgaaccagtcattatttcttcagtagttcagttcttctggctccttatcagctttgatggttttctttaccataacgtgaggctatgcttaaatctctcagcctcacatcacatgcaaaggattgtgttttgggaagagatggaggacatctgttcccctcttctctctcctctccaatcgtacagtgtgaggggagaatcgttttgcctcctgtgcaaccaagaaccattttttttccaaatttcatttggggatttttttttttcatttctgggccttttggttgatctttactacacggatttgttctgttcctctccaatatgctccagatttggtgattatgggaatcgcagcttcttggttgaagatctgctgcattggtacgttccagatatactcttttattctgaacaattttgtttgtacatgacaccctgcatgttcatctgtgcaattatttgcagggaagattggatccttgctccaattggtaaaaagattaggttattgcgatctatccgtatgatcattggcatatgaagaaaaaatgtcccgttcttggcttagcgcagctgaaggtactgctgcattgtagcattgtgaacttttctaggtgaaaggcctcatcttctggaaccacacgttggtatgggtgaccatgattttacaagcgcttcctcctcaacaatgtggtttgatctgattatctttgtgccacattaataggaattttgtggaaaggatttgatttttaatcaacctacatgcaaatcagcggtgcattgatcttcgatggcagcgaaggctcgtgcaaggtcgccggactttgcacggcaattctggcctgtgctgtgccatgccttcagcgaatgcagcctgatcataatgctctttgtgaccgccgtggtgtcattcacggccacaaggtttgcacgcatctggagcctacgaccaccgtgcatcctgtgctcaaggttggatcgcctcctgcatggaaacacctggttctctgaagatctgatctgtgctgcacacaagttggaaatctcgcaattggagtattgccagagtcacaacaagctcgcacactctgatgatctgtgtgaaaggtgcctactttcatgtgctggtttggatggtaagcccaataaactgaagagcatgagaaataaggacaaggtgaattctcaaccgaggtccaggcatacacatttatgctcttgttgttcagagacgtttaagaagacacggcatacacacaagctacctgagcttgcaaatggcatagttccagatgatgtgagcacagtgaaggagagaagcatagacatgactagtgtagggcattcttcagatgaaggttctgaggacttgtcttatggaggctacagtaagctgaatgtccgccatgattcagagtctgagaaccgcatctcggatgatgatgaagatgaagatggtaattcaatgattcacaaagctacgcagagaagcagagacttcttatttcatgattcgcaactacaacctatgatcagtgacaccaacagcttgtccatgcatccttctgagaatgttgttcttgcagagccgatgaataccgctcctgtgccagtgagtactgcagcaaaaactgacaatgtggccactggcaccaaccttgttagtgcagcgaaatcttcagagcatattgcgcaaggttcaagggaaattagcttgagcaatgtcaatgtaagtggaaacaatcatgacgtgcaaccgaagattgtgcctgaacaagtttgcgcagagcttccgaaagagaaaagtatgtatctttatccaaaatgctgcaatccttatataatttgaatttatctgagtatgtcaaatttgttctgtagcttttctggttggtattgaggaagttgacgattcagcgggtatttcaggaagccctgacgaggaagttgctaagggttttgttgcttctgcaaatgcaggaatgagttcagttttagatgcctgtatcaaccgcaaaaacagtatgaagagtgcttctcgtcgtagaagcaaccttcaatctcctcgatggtctgaaataatctctgctaaggataacagttcaagaactaaccaagaagtcaagacattcctgtcccagatgtcttctgcgcgaggctttgatggtccttggagtgaggtggccgctagtcctagaatcacacagattgatgataaacaatatgatgccactgggagcagacaatttcttgagactaactactcaaatatggaaccatttgatgtccatgctactagtgaagatgaaggtgatacctcactcgaaggcctgaagcagaaggttgagcttggcaagaaaaaaatgagtatcctttataaggagtttgaggcagagcggagtgcttcagcggtggctgcgagtgaagcaatggctatgatcaatagattgcaggaagaaaaggcttcaatgcacatggaggcacttcagtacctcaggatgatggaagagcaggctgatcatgaccaagaagcaattgaaaggctaaatgacttgcttacagaaagggagaaagaaatgcttgacctggaagctgaacttgacaattatcggaggcttcatgaaccatttggttgcaagtttgattttactgatggagatatggcatctggagtcttggatagctcagatttcatgagggataccatgtttgattttgaggatgaaaaggcaaatattttgaaatccttgagcaaattggaggaaacactgggcatgtcttccacagataggcataattttggtggcacatatgatagtctacagaacatgtcagtattgcatccggaacactggagcggtgagccggtttcttctcaacaaattgatgaaaatcaaagtgttgattccggctcatgttctcacctagatgatggcagaatcagttctatgacgagcgttaaacatgagatttcacttctaaatactagattcacggcacttgaaacagatcaaaagtttctcaaacagatattaagctctctaaaatgtagtgatgatggcgtacaatgtgttcaagagataactgcacatttgagagagttgcgaagaatcatgactgagcaaagagagagggcagttttatgatctcataattaatctctgaaggtaacaatagaccatagtagtagttaatatgaacattgcttccatgatgtacatgcaataggttactcttatactccctccgtcccacaaaaagctaacctattattgaataggtttttcctggtacaaactcctgtctagattcgttaggaaacatttcattgaatactaggttggttttttatgggatggagggagtatattgcaaatatctgctttgaactgtgccatcagagtttttattgacgatcctctactttcgtcaaaattccttagaatgcatggttaactaaaaggacactaaagtgtcttttgaatctgcattttcagcgctagctactctatcaacttcattgacttagtattatttaatcttcatatttccccttcttttagagaaatacttttccttgtatgcatagaatcacgctagttatgaaatgttaggccttgttctttgttcacttatatcaccttttgtaatcaagagatcctgattcggtctcttttgcagatctgaagttgctgccactgattgttacagcaccatgatgccttcatggtggcatctcgctcggagatttgacagggtcatttgtgacctgatctccctgaacataacatgggagaacacagattatatacacaccgatcttgttggatgagatctttcttgtacaaattgaaacggttgttattaggatttaggagtaaagctcttcgctgtaattatagtttccggcttctgccgagatgaggaaggaattcacttagtaagccagctactgttcatgtcagataagttcataccgtcttgaatttatccaaccacttctggagacaatctataggctatagcctagatgaacttgaaaatttttaaagtctagcggttgcaggagtgctggtcacaggttacctctgatgctcggagactcggacgtgtacagacacttgccattgatcagcacaattttgcagtaacgagcaagggttcaaaactacacacgaaagtaaaccttgcaaagtgttgtcttggctacagtcaacatcggcaaaattttccgttatcataataaactcgttgatacttcagaacaaaaacaagtttggttcaagaaccagaacagatggctccagaaaggggcaaaatatcattggcgcaaacagatgatcagtcgaagataacttggttagttaaagggacaccatgttccaacaaatagtgcaaaagttagggtaaaatacgatgtttctaggcgagaccactactgcacatttactaatagcttccaaaacatctttccaacaaatagctttccctggtggccagcctccaactatcactcgtcacatgaaatcagtgtgacggtctggcaaaagaagaatctatatgaatgatttaatggcaaaaaagggcccccatataccattcaagatgggattaagcctgaactgtgcttcgctccgacactgcctcaagcatagaaaggaggttggaaaccacattgcaagtaggaacatgcacaaggcggtcactgaaactattaactgctgtcttagacagcactgaaacttcagaacagaatgaacttgcttcaatcaactcgctccacggcgtatcgtcctcattgatattggattctctcaagagttgtaatactttatccaggtgagcaacattccgacctgccccacagccagtggcagttgcagcacccactgcatttgctagtgtcagtgtgctaactgctggcaagttgtggaggaacccaaaagctatagcagcagtaaagctatctccacatccaacggtgtccacaacgtcaatctaatgaaagtacagcacagtgaatattgacaaatgcagtaattacacaaagatcctttatcagcagaataaacataccttaaatgaaggtgcactggagacagcactcttcgtaaccatgattgatccctttgagcccatttttatgacaacccactttgtgcgaatccccctcttcagcaactcttgccctgcctggattgggtttctgatgttcgtcagggactcagcctgtcaaaccaataaacagatttatgagtgaaatgaagcaagaatacaacactaaatacaccacattgggttcactgttctctaaacaggccagattcagcaaacaggttttttttacaaaagcatattagtgttaggctgtaccctttaatcttattttggcataaatggtttatggttgaattgttaagtttggagaaaaggcaaagctgcagatgtgaagtcaagatcagccagctcaaatatcattataaaaaaacatgccatttatggttcgcttggcttttactaattacaattgaagctcacaaagcaaaaataaaactgtaaggcatctaacctcgtctgatgttaaaagcagaacatcactgagcctcagagaatgctcaagtgccctctgttcatcaagggtaccatgtaagagagattttcctcgaggaccaggatcaaaaaatactgctgttcccgcatcaattgcgcaatcaatagcggacgagatcacatcagggaaaagttcatcaaaagcatagccattacagaacaatattttggagtgatgaatagctgtcttggtttcagctgggagtttacgtatccaactgaaagctggctcatcactaaagtctgctcggctggcgtagatgaaaattgcaatgcaaagcacaacaagaatattagctcatgagaatttgaagctgaagttgacaatattcatgatgaaaataataagagcagtaaggcatgcatgagaacatgaagttctaacctgcaaaatccatgtctctgaaatgggtctacaagaacccagcaaagaagggtctcataggcatttcggcatgcaccagaatcagagttatcaagcatcccaacaacactaatgccctcctcctcaagcacatcaagaagaaacttcccataaatttcctctcctacatgccccagtgtggaacagcgaagcccaagcctagctgcagcaaaggccaagttgcagtttccaccagcctcccaaaatttctgttccaagtgacgaaagataaaatgttcagaatagctaataaccactgattgattgatcataatgttgttcaatttataactgggtttcttttctgggttctccatcttcccaagcagataaagtgcagcagaataagtaatactaaataactaaattgtcataaaaacattctcattttcaacacaaacagaacaaatgcaaacattcatgagatgtgtacatctaaaaccttccgttactcatcgaaagcctccacatttcttccaatccccaaatttatcagtagatacaattacgatacgctcgcttgaatccttcctatcacaacacaagcattttgaaccaaaccaaagtgactagagctataaatctcccaaaataaatccggctttgcggcatctaatgctgaattcacctgatgaataaccgagcccctagatttccaatcccaacaggcgaaagctctcggccccttacctggtcaggcggcgacgcggcgaggcgctccatgtaagcctcccgctcctcgcgcggcgccggcgggagctggggcacgctgagcacgacgtcgacgcagaggttcccgagcgtggcgaggtccgtctccttcccctcctcccctcccccctccgccggcggccaccgcctcctcgcctcgttgacagccaccgccacggcccgcggccgcgccgccccctcgagcctccgtcgcggaggcggcgggcggtggagcacgcggggccgcggcgcgcgccgccgaggcagcggcagcggcagcacgtgccgcgggtttagggtttggagcgccatgggagagcgagcgagagagaatggatggatcgcgaattcgagatgggtttgcataataatataattttatcattatttctcggaatagattcgattagagaagaaaaaggagggtttattattattttattccacgagatttggaatatgttgggaactttttgaagtttgtggttaggatttggaagtattttgctacaagtcgtcaaaagtaaaactgtgctcttgctaaaagcagtgaccgaaagaagggaggaatcgcactcaaactcaaggtctcaatgacaggttcaaatcctcctttttgtgagagaatggatggcatctgatctgactccacggtgcaaatcagacgatttggtggtggggaagcatcaaagaaggcccatgggccatcatggccttccacaacaaggaaaaagtacaccgaaggtccctcaacttgtcatcgagatacaaaatcatccttgaaccacgaaaacggatacaacgcatcctccaacttacaaaaccagtgcaaactaggtccctcgacggttttgaccgacgtggcagctgactcggcgtgggacccacgtgggccccacacgtcaatctgtccacgtcatcacccatctcttttccttcttctcttcgttccttctctcttctctccctgcgacgatgcggggcgcggccttgcggcggcgttgctctgcggtggccggcgggggataggtggcgccatcgacgctgtctttccccgttcccctttttttctcttttatttttggcttgtttctctccccgatgccgccgctttccatggtagctggcatggaggttcgcgctggcgcggccgagctcatggcgcggcggctggatgtggccgaatgcgaccggaggctaggacgacaccgctcgcagccgtcaagcccccacaccgtcaagcggctcgttggggatgtccctcgcggatgagcaagggcaagaaggacaacggcggctggggcggcggcgacagtgcgttggccgaccaactccctcctcgctgcctcgtcgactggggggacttcgacagtgcacgccgcgtcgtggacgccgtgctcgccgctgtagaccctttgggtgagcagacaaggaagtccatggcggcgcccgaccgcgatgtgctcctctacatgagtcgcgggggagcccggtgcggcatggcgccatccacggtggagacgtccgcgacgcgaagacggcctcggacgcaacgaccgctgacgtcgcacgcctcttcgccctctacccgccggcgcttacctatggcatccacaccaacctcctcctccgcctccccttctcccgcgtcgccgccgccgacctcatcctctcccgcctcgcgcccaccagctagctgcccagactggacagagaggacgaagggagagaaatgggaaggagagatgatgtggacaaactgacatgtggggcccacgtgggtcccacgctgagtcagctgccacgtagaccaaaaccggagtcaaaaccgccaaaggatttcaggtgaccggttttgtatagttaagggacctcgcatatctagttttgtggttcgaggatgtttttgtatccgatgacaagttgagagaccttcggtgtactttttccccacaacaacggggaagcctccgggacacgcggcccagccaccgaaaggcatcagcacacaagcccaattacctcctgggctttgcccagcaacgccggagtcacacgcagaattcgatcaaatcgaccagtccacgcgaccaaatcgatgggcagaacgagaccgaccaaattcgcaaacaccagcgtcacgtcatgcgctcgtgtgagaacagatacgactcattgttattgcacaagtatacacgataacggtttcagagtactagtaaattggtcgaactgtcgaagtagtcgcagccgttacgatcgaggaatgaattcatgtggtcgatttgatcgaaacgaacgaacgaacgtataggtacgtatatcaattcaagatttcaaggccgcacggtcggagtcaagatcgagttgctacatggactaatcagagtttcacacacacgatggacgcagtcagtaagctcatatagtgatatataggccgcatgactggcaatgtctgtacttacactgctactgcacctaactaattaattataatcattcaaccttaattaggatgcatggatcgaccgagctgaaaaccgcgtagtactagtacgtaggagtacgtacttaacgctgaaccggaaaaaaaaaaccccacgaattagttaatcgtagtaaacactaacgaatagacaatagacccggtccttaataatttgcttttctgatttctactccatacatacgcagttgaacgtacgtgttggccaacgtgagtatatacaacgagttggtataaaaggaagcccttcatgtcccatcacccccaacacaaaccaatatccttcctttaattaagatcattccacgtacttaattaattgtctgctgcattcagctcacgtacgtactcatcgatcgagcttaaattagctagctagctagctaaagttgaagagctagagatctctcacatacatggcgtcggcgaagttggtcatggcgttggtggcggcggccgtgctgatgcagtgctgcggcgtgctcctcgcggcgaggccgttggaaggggacgtcgccggaggcggcgggtggcggccaatgcagaccgccggcggcggcggcggaaagatgccggtcatgcagatcctacaagctgtcccaatacagccggggaacgggtgcaagcaagcccccagccctcccggcgcaccatgcttcggcagccgccggtagcttaattaattaactaattactgcttatataatattccatccgtttcaaaatatttgacaccgttgactttttagcacatgtttgaccgttcatcttatcaaaaaaaattttctgaaatatctaaaactacatgtgtacatgaaagtatatttaacaatgaatcaaatgatatgaaaagagtaaataattatttaaattttttaaataagacgaatggttaaacacgtactaaaaagtcaatggtgtcaaatattttgaaacggagggagtagtattaatcaatctcctttctcgcgaacacggtcgtccttgatcaagctgggttccgatcgagaccggttttacttaattgcgtagatgttggcatgcgtgtgtgtctggagattgtacttcgatttattcgttattattttggtttggtcgttttcatgatctgcagttaggatgatcgagcttctaatattaattccgtgcaaaattggagtgccggaagatgaatgtatagctgatcaaagttagctagaagtagtctataatcagtgcatgtcgtaatgcatggggtattgtaagttgtaatgttgtaagcaagtgaaaattgtttaattaattagctactaggctgttctggcctgtgcaatatggtcccaaaaatatggtttatccctgtcgcagtgccgctgcaggtaaaataaagagaaaaatccaagaaatatcattacaagtacctaaattcaagaaataccattggcgaatgcaagttttctaaaataccatcatacaaacgattttgttcaaaaaatgtcatcacagttatggtccgttcatcctacgccgttaaatacaccgttcatgcatcctatagaacttaacggaaggttgctaacgtaaccctaatggcgattgcgtttctgggacagccgttaaatacaccgttcatgcatcctatagaacttaacggaaggttgctaacgtaaccctaatggcgatggcgtttctgggacaaaatcacttgtacgataacatttcatgtaacttgtattcgtcgatggcattttttggatttgagtgtttgtcaatgtcatttcttgaattttctctaaaataattgacataagttccatttgactaaaatttaaaaatcgtattgcggtttctgtgttgctgtatgcctttatccattgtttgtgtcatatatataaaaacaaaaacgcgcgcgtctatgttctcattttttttaaaaaaaaatctacttcctgataatatgcaatctatacaccaaacatctttcacaccattttgtttgtactggcctatatttgttatacaacagtgcgtaggctaatcatagttaggttctttgtgtgatacatatccacccgaattcaggtccccgacgatgtgctcgttgacagtgagacatctcaagatatgttgactagtctttagaagatgtttataggagatgcatgagcgtgcacgcgcgggtatatgagaatctactacatttagtctgtgttcgttagctaaggttgtgaatctttcctcctaatacgtgaaacggagaggcacatgattaattaagtattagtcttaaaaattgaaatgaattaatataatttttcaaaataactttttatagattttttttaaaaaagacacaccgtttaacaatttaggaagcgtacgagtagaaaatgagtgaatgaaacttgggaaagtgttaaaaaaacacagccttaagaaaaaaaaatgttactgtgcaaaactggagctcaaaaaagaataagaaaacatcgagggccccttacgctgaaaatggaaagatcgaggttttcagcggtgagctaaacatattattgcacaagtgtgccttgccagtttcagagggaactactagtaaattggtcaagtcccagccgtttgcgaatcgaggaattcatcggccgatcgatcgaaacgaatgtgtcaattcaagatttcaaggctagctagctgcacggtcgactgtcggagtcaagatcgagttgcacatacatggactaatcagatagtcatacgcacgcagtcagtaaagcttggtcattattattgttgacacatatgagtatgaacatatatacgaggtttaatttctacatggcacatgtatatatgcggctttcatatatacatccatctgtacaatgaggatatgcatggaccgcgctgaaaatcgcatactaattagctattagtcatgagctcttttctcatctttaataaggtactatgaggtgtaatgaggtaccaggtactataaggtaacaatcaaatctagccattgattttgcaggggtacgatcggaaagaaattggtaagagactaattgggccttccggtcggcgccgcccaagcagccaatagcgaggcaatctgacaagggcgactcatccgcaaaattcgatttctctccgccagttccgccgccgtcgcccatgcgtggtgggaagtaattcctgcgccctcccccgccggcagagcagcggtggaggccgccgctggtagagctacggtggaggccgccgccgaccacacccgcccaatagccgccggcagagcagcgcaggaggccgcctgcttccatagccgcccaccgccgcaggcagagcagcgcaggaggccgccgccgagcaccggcgaccaccgcagacgaccgccgcccaccgccccaggcagagaagcgcaatcccctaccgctgcccaccgccgtccaccaccgcctttcttcgatccgtcgccacgccctcgcctgtgtcgccgtaagtccctgacccgactcgcattatagcatttagcccgcaccagtcgtatatcgatgagaagatttttttagttttgttttagcaattaggccgatacagtatgaacgtgcataattatttttattcttgatatgtgtttgacaggttgttcttgatataaaaaatgattggtgatggttcaagatttgaggatcaggatgagtattgtaagtttatggctatgaaattcagtagtgaggatgaaggttttgctttctataaccagtatgcgaaagagaaaggttttagtgtaaggaaggattatagtaggcgtgatcgttttagtggattgatatttcataagcgcttcacatgctcaagggaaggatttaggaaggaggtgtatatggattattctggcagaactagggaacccagagcactaactcattgtggatgcaatgctcattttgagattaaactcgatgagataaaaggccattggtatgtaacaaggtttgtggcagatcataatcatcctttgtgtaaagctgatgaagtggcatttctccgttcacatcgtagaattactccagcacaacaggcaaaattggtggaattgagagatttaggtttacatcagcaccaagtgatggatgtaatagagagagaccatggtggttttgaaggtgcaggatttgttacaagggatttgtacaatttttttgtgaaaatgaagaagaaacggattgatggtggagatgctgaccgtgttattaagtacatgcaagctcgtcagaaagatgatatggatttctattatgagtatgagaccgacgaagcaggatgcttgaagaggttattttgggcagatccacaatcaagaatagattatgatgcatttggtgatgttgtcgtgtttgacagcacctatcgagtgaacaaatacaatctccctttcattccttttgttggggtgaaccaccatgggtcgactgtgatttttggttgtgctgtagtttccgatgagagggttggtacttatgaatgggtacttaagcagtttttaagttgcatgtgtcagaaacatcccaagtctgttatcacagatggagacaatgcaatgcgtagagctatcttacttgtgtttccaaattctgaccatcggttgtgcacatggcatattgagcagaatatggcacgtaaccttagtccaactatgctttcagattttagggtccttgtgcatgctccacttgaagaagatgagtttgagagaaaatgggttgagttcaaggttaagcataaagtatcagatgagaacaggtggttgaataggatgtataatctaaggaaaaagtgggcagcagcatacactaaagggagggtttttcttggcatgaagagcaatcaaagaagtgaaagtcttaactcaaaactgcataggttgttggacagaaaaatgagccttgtcattttgattgagcactatgaacattgcttgtcacgtatgcgtcatcaagaggcagagttggatgcaaaagcatctcagtcagtaccatttacaagcaatgactctactctaatagagaaggatgcagctcgtgtttttacacctaaaattttcaagaaggttaaggtggagttatacatgggcatgaattgggaggtaatagatactatagaggaggacaattgtgtcaggtatgtattgcaaatgattggcaaggatggtgttgtcattttgaccggcatgtttgaggaagcattgttggttagcatctgctgcccttgtagaaaaatggagtgcgaatacattccatgcaatcatttatttgcagttctgaaattatttaaagttagacaccattccgaccttctgcatagcacgtagatggactatgaaagcaaagaatgcatttccttctgataggtatggttcaatttacacttggtcagaccaaatggaacgctatcggctgttgcgttgtttgggtagtgaagcttttttcaaatcatccatgacagaagagagcacggtgaaagtaatgaagatgttagagaatctaatgcttgaagaggatagtagtgaaaattatgaaaattttgacattgagtttggttatgtggttgggcaaagtagccggaatgatattgaaagtggtgacatggtgcttgatccgacacaaattgtccctaaaggagctccgacaaagagaatgaggggtttcttggagaaacgtaagaaaagatgtggtttttgccgcatcccagggcacagtattcgatcgtgccctatatacctaaggcaagttttaccaagtaatctttttttttttgttctgtggtgtactttacaaatatatatgaggttttttttattttttttacaggaaagtgaacgaagatgtgtgattttgctgtcccagagggtggagtacaggatggctgtggtgaacatggatgtttgtatggtccaacatgaagtatattgatgttgtgtgcgtacagtttatattgtttgaacatgttccaaaattgtaatggacctgaagtacttttttatatttgggttggatgattagcatcttaatatgttttgcaattgagtcaaactgctgatgatgttactcagtacttggaaaggttgcatgttggcttcaagtcgagtggatgctgatattgatagcatcatgtctccaggtttagtggatgtgctactgttactcagtactttggataattgtagtgcataccgaagaagtgtcgcaattgagtaatctgaagaataacatcgaagcatccagtgactgacacaacaacacatagatagttcctccatcttgacaagcatccattaacagatagttgacccacataatcaagtcttaactagcacataataagattgtactggaaaggtcaaccacataataaggtcttaactagctttacatcatacgaatttggatggcattacatattgccagacaaaatggtgattttcatccaccacactacttgagaacatgaaccttcagaacaagaacgtcgtcaacctccttgaaatggaaaagacaaacatcaccctcatcgaatgcttttgcatcaatcagttggttccatccagtggtcagcattgccctactgtccttggacctcttcagcctcatttgatatgactgtgttgttccagccatagacaccatcagatcatcaattggactcccaatgtacttgtttatgtaccgctcgctaaactggactgcaaaggtctgcaagaaaagttgattagccatagtacaaactacatgaagcaacaaagtcattttacataccattttcgcattggtcataagggttctcttgacagcggcaaatttactgcggcaacgtgagcaatttgaagatgcatactttttgttaatgtgacatcatttccataccagcagtacttgtcgaatccagagaaagtacgaggtccatattgtcctgttttttagagttcacatacacaagttcatatgacttttgtaatcattgaaagctaaaactgaaattaatgagaattaataaacacctgttgtaatagttgaacggcgcacgctttgataaatcttgtttatctcaatttgtacttgttctgctcgtgtttaatccaaacttgttagtaggtgtaatgctacgaaaaaaggataaaatcggaagataggcatcaccatcgtcactatctgatgaaatgtcaatgacctcatttccgtcccccattgctacttgtgtttcactctaagtgacaagataggcatcacgatacgcatcaaaaatggaatataatgggaggaagcagaacctgatatatggtgtcgtctccgaaatcggctcttaccacagctcacctcggcgactctagtcggcacactgcactgctcggagctggccgtcccaccgcgagctcgcctgcagccgtgcaaccggccgcagcgcctgcagtgccgaggacagcctggccgcctccagtgccaaaggaagaagaaagagcagaagaagaagaagaaagaggaagcagtaggaggagaatggttgaagaaataaggggacgaactgagttggctgctcaccttccatggttaatgcacaggggagtgggtggatggataagtattagtaattgtttggtggacagtgtaagtgcgtattggtaaccgtgtgcgcatgcaggaattaagtactgctgtctcaatttagtaacgtgacacaaatcttgtacatctgggcatgttatacacacttttgtacatctcgacacgtatagtaacgcgtaactttcgtgtaccagtactgaacagttgattttatagtccgatgacaagtaatagacttaggaaaacacctgcagagtctctatgtgttgcgcataggacacccggcatggtccgaaccaccgctcctagtctcgacgtctctagttaattataatttcattttatatgatttttttgtcaattccgttaattataatttcatttttttataatgccaggtcggatagtagtaaattcttgtattgatggttggactagcgaaccaaccaactacctcatttagtactcgtccatatatgctgcttcggttgtagctagttgctggtcacactagtgcatccatcaacctcatcctcactccacagataacagccatggtaacaagcaagaaggtacagaacaacgaagctgcaatggcggacggcgctgttaaggtaaatgaaaatacaagtacctttcaacgatttttcaatttttttttcttcaccgatctcgtgtttgtaggaatatcgccatggtctgtgcatggatgtcccgatgtacattgaagattcggagtattgtggagaggagcttggcaccagactaacttgcaggcatggcctcacgccgaaacggaggacagcttgggaaggacctgacacaggaagaaggttcttaggttgtccgctggaggtgagctcaaaagtccttgaaaacaaaagaaaattcattcggttggtttttacgaactgttattcgtttcaggaagaggatcagtgcgataaatttttttgggtcgacgaaccatggcacccaagagttcagaagacacttgagcagatgtggcatgcagtggaacgtgctaccaagctaaccggttcgaaacaatatgactggtgttgtttcgttcggaatacaaaggccgaggaagaaaaaatgaagttagagttagatacggctgaccatatctctgaactagaattggcgtataaaaaaaattaatgaaaaagaaaaaagagctcgacgatactcgtgcgtggttaatgggatcgtttgtagtaattgtcattatgttagtgaaaattagtgatctcatgtacaacaagtgattacattggatgtaatattttctttaaacttccaacttttccatcaaaattatcctacacaccctaatgttaatttttcgacggaactgcattcatacttaaaccgtgtaaatgcatagttttgttgactgctttcatacttgactgcagtgccgttcttgactgctttattataccgagtggaatgcacgcatgtatatcagttttatgtgtggtgtaccgaggaggccatgcaacaaaagcagcccatattcgctttggaaacagaatagactataatggcattgattgctacacggctgcatgcacctgacacagtggattgacgtataatatatgccgatgcacagtgagatgtgtacatttaaaaatcaaacgacacaaaacctgtacttaagttcaatacaagattattccggtgtcattaactcgtttttttgctacacacatataagtagagagtttcagttcaaatttcctacgcacatatctgttctaaacatttctatggcagacaacaacacttccactgctcgtcgccgcaaccctggcaaaagagggcgtcatggtaggaaactacctattctctccgtggtatgtatgttattttaaaatttatttgcttcttctcaacatactttttgctcttcacttcttgtacggtgatttacttgcatgcacttttctcattcttagaaaccaagggaactgaccattgctagctccccacataaatttgtaacaatggtgagaagtttgaatccactccagacagcggccatggaaaaaattggatttggaggcttgttagcaatgccagagattaacatcaaccgggtaatttgtatttggttagctgatcggtacgacgtcaaaagccaaacaatattgatccaagacaagagtttaccgatcacactttgggatgtccagtgtatattggatattccagccgaaggaccggtgatttccaaactgccgccattgatcacggaggattacaagatttattctaggcacaaggatggcgagagcaagaatatttcactcatatcattgcaagaagcaattttagaagaatcgaaacaatctgaaatcaacgaggaagatttcattagaaggatgatgtttttcaccattgggtacatcctttgtcctactacaaaggcccatgtcagctccagctatctacctttactgagagatgtaacaaaaattcacactatcaattgggcaagcttaacaagggaacatctctgcgattgcttgaaggaattcaagggaggactaaaaaatattgaaggcaatcttccattactgcaggtactatacaaacctatcacatgctgaatttattttcttattgtactcaaaatgcttattttttacattgcattcagtgttggtattgggaacatgtgaaggcagtaaactctgagttctgcaacatcaattacaatggacgtcagattcccctgatttcattctggaatgcagccaatgtcaggttgagaaacaaatatgactgcagaacagctgaaggggggggattggtaagttactgcacatacagaaatactagttgcagtagtagatcatatgctaattgctgccatatgttatacagattattgaacagatagaacatccagactttttgaatgatgaacagaggtatgagcatgacacgcatggctttgaagacagagaaaatgacttttatatcaatgaacagagaattgaggaagacactgcctttgaggaactagaaaatgactatcccatactttctgacaacgaagaaatagatgcacaacaatcttttgcatatgctaatgatcacatgccgtacggtactgacaatgagaaggaaaaagatgatgacagagagctaaatcagtgtgaggatgaccatgaaacgaaaatcaaatctccagcaaaaattgcagccgtagaggtaatacattcttagctcagtttttttgagtgcacattatcaacaaaaaattacttcctacacataatgtcataaccaactgcttctttcttgtagcattcaggtcacatcaaagtacttgttgacatgctccaacagttagaaaggtccattcagttcatggagaacaaattgacaaacaagttactttccgtggaacaaatatgccggaaaaacacactagccatcgaggtaagcataaagcagcactggctaaatgaactgcataatatatagcttttgttcataatatatagctaaatgaactgcaactcttacaggacatcaaaaacaccctgtccaaaaaaaggaagtcagtccctatacaagccgatgcatttagacccaaacaagaagctgatgtcaacaaagtcgaggataatcgaacattcgatttaggcaatgaaaggatgcctaccatactgaagagatgcatgaagataatacggtgagttgtactgaactaatttacaaaactattgttcgagcattcaattttttatgtcttcttctctaggatgagacaaatttagccaaagagattgatggtaatggaacagaggaagctccgttcataatcactggggatgaagcaactgagacagatgacaataacaaaaccattgcagaaagactaagaggtcagttcggaaggacagtcaagccatcatatcaaactcaaagtgatttcatattctacaaacataacaaaaaaacattcgagcccaaaattcaaatatccaattcaggatcagcgaaccttggtttgacattgaaagataaaataacaatcaattacatcctccagtcagaaaaaactaaggttcttgccagtatacaagacatagagctatcacgtgcacatctactgccacttgtaacgccgcttgatagttcatcaaaatcaaaatggttgaacacctcgttaagattatttttatctgttataataatttctacctttcccatacatttctatatttttttttattttgcaacaggtcattgaagcttacacagaactcataaacgacaatcaacaaggccacaccaggcagtacggttctgctctaattgagaaagaaacgcaagtccaggtttggtgtgccgttggtaagacaagaggaaagccaagtaaaagatacattgaatccagatcaacgtttgcccaaagatacatggtccatgatatggtactaaatcaggtcatcatttatttttatgcctttccaaaaactactttaacttatgctatttcctgaaggtcttcctaccaataaatagggacaaatcgcattggtacgtaattgttattaatgcaagatgccaagaaattcaaattcttgactcaatgcagatgcagccacaatggtacaatgcaagcgaagatattaaaaacctagtaagctccatcgcaataacagttcctatatgctataataacatatgttctaagtaattttaacacataacagatcaatggcgtggccaagtatattgattacacggtgaaagaacgtcctgttccaacatcctggactgacacaaatgttgcaaaatggccactgtgcccaaagagtgtacctcaacagaaagacaggtgaaatatcatcaatacgcttttaactaacaattattgctaactgacattctcaatttctatggttagttggtcatgtgggttaaatgctttgaagttcatggagacctgggatggaaaggaattaacgagcgacttcttaaatatggtactgctccgaaaagtactaagctactatgactcacattttattagtgttacacatctcttacacatatttttcactccctcttgacttcaggaaccgaatgaagttttcagactaaaggtcgccgccaacctaatcaacactactctaaatatagtgcttgctgtccacgacgacatcagacgtctacattcagaaaattcgtccacatctgaagttacaatgaagctttgaagccaattagtggcatctttgaaacactgtatttccatctaagtgtatctatctaaacttttatattatgcaacactgtttttccatctaggttatttccaatcaattatcagccatgtattcaaaactactatctctattttccaagctccagtcaattgcaacatttctttcaaactgaaaggaagaacaagtgcttgatgttaccttacccggcttagctttttccatctgcgcgaaaggaaatacgcccgcaacacctctaccttcgcagggactcaactcttcgcagtgtagcacattgatcttccggttcttctccgttttcctacgccacgacacccgcagcaccttatgcagccgcatctccccgccggtgcttggttctgaacaccacacccatccttccctccgcctaccacctccattgctccaaggggatcattgcgccggcggaaacaacggcacgcgccgatcgaccggacgagcggatggaggcgcgctcgttccagatctgagcgccatccccccatcccctgcgccggcggcagcaaaggcacgacgcatgcgccgatcgaccggacccatctttccttcccctgcgctggttctagagggggaaatccctatgcgtgggccaagaaatcgtcgagaatcagaacaaaacagggagaaaaggaaagagatggcgctcagagagaaagggaagagaagccccggtctgatcccggcaggaaatcacggacccctacctcgttacgcgaaaatacggttttaccccagcggtaccgccccaatctgcgcgtgcggtaccacgcggtaccatccaatctcagccgtccgatgaagctagatcgacggttcagatttggtaccgccccctttcaaggacagtaaaaactctcattagtcatagtaaatacttacgaatagacaatagacccggtcctttgtttgtttttctgatttttctgcatactccatatgcagttgaacgtgtggccaacgtacgtatacctgtacgatcgagttatctataaaaggaaacccatcctgtcccatgtcgttcaattaagacagtacgtccacgtacttaattaattggctgctacattcagatcatcacttactcatcgatcgatcggcactagtactctattaggaatactctagctgattacattgtataggcctgagattaattgtggatctctatattcctaatagtttcataacaatcagcttgatcgatcttacagcttaatatagctagctagctaaagttcaagatcagagatctcacaaacatggcatcgtcggcgtcggcgaagttggtgagggcgttggtggtggcggccgtgctgatgcagtgctgcggcgtgctcctcgcggcgaggccgttggccgcagccggcggcggcggcggggaggagatgttcgtcgtcacgccggagatcctgaagaccaccggcggtggcgccacaacgacgcctacgggcaatacgtgcaaggaaggcccgacccctcccagcagccccagcccaccatgcatcggcagtactcccggccgccggtagctagctagcttagcttgttacttagttttaattaattttctttgtcgcgaacacgacgacctcgatcgatcaagctgattccggccggtttttaattgttttccgtacgtagattttttttttcagttaatacaataaaatttctgtctttgctgcttagtattaatcagtagtgcatgtaattaacgatattggtaatggatatgacatattctattatcacaaatatgaatagatgttagttttttatgggacggagtgagtatgtattggtatatattgtcttgaaataaaaaaaaaacactgagactatcactctagagagaataagaatgcatttttcaaatacaatttgttaatcaccatgttacggagtactcctatgtagcaagggcttacggctcattgatttaaatgtttaccatcgttggtaggccgaaatgttttaaccatatccaacagtccagcttacacgtgagacgtgacttgccttgcggaggttcacagccagcccattaactttcggagtgggctaaataacctaataaatcgttcaaggacatggaccgtgtacttacacggctggaccgggggaaaaaaacaaattatttactagtagtgcctgcttacgaatggaatagaaaatagacttgttccttaattttttttagtttccaatgcatgcagttgaacgtggctaatatacgagttcgagcgtttttaacagtcttttcaattgattttgtaaaccaaattttaataattttagaaaaaaaaaatcctcctctaacacctctccatccagatgaccaagataatccacctgccaaagttctcccctcattggccaaattggctaatcatgggccccacgtcatagatgctcatttcccttctctctatccccgccctctctacatccaagggagggagggcgccattgctagggcggctcgacggcgagagaggagtgagggaggaaggctcgatggcttgtcagtcgagcctgccttgtgcacacggttgttgaggacgatgaggccaataggaggggacccgccattcgccttgccctcacggatccattgtcgcgtgcatgagtccgcctcgcacatccggatatgttgtcgctgttgtctcctgctgtcaccgtctcccttgcaaagcgacactgtgcgggaacgccgtcccctagcagagggagaaagcgaggagaaaaggatgagggggagaaagctaacacattctttatcattttggagatgtttcataaccgtattggattgatcaactagtttgactacctaaatcaattaaagagctaggtatacacatatttaaaaagtctagattttaggcaggtacctatgaaaagaaaccagtcatgtgttcagtggcggatccagaaagaaatagcactagagtctgagcaaactagatagagttaccgttccccctcccatttacatatggtaaaaaattttagtaaagtcttcgtgggggcgttttcacctaatagtggaggctcgaaaccctgtcgccttcgtgctggatctgcccctcatgcccccatctcctcgtccttaaaaaaaaagggtaatttaaattataatgagatggtttcaattttcccttaaaaaaatcccccagccgcggccccaaattctcagcccagttccctatccgcactggacgaccggcctggccgagcagacgcagagccttgtgccacggcctgctctaacgcatgcgcagcatcagtctgatccctgcaccacgcgcgcgcgcgcgcacgcacgcagaattcggcgaaaactgcagcatttacacatgaattcaaccagtcgtccacgcgccgcgactagctagcggcaggcatcaacttaattaaaccgctgaattagtaatccctcatactcgtaaagaaagacgtttagaatagcgacacggtcttcaaaacataaatttgacttcttttttctataaaaatatttattaaaaagtgatatatgtattatttttcaagacaaatctattcatataatttttatattttcaaactcaacaacttgagagttattcatgatttatattcctaaggtttgacttaaacgttgtcctaaacgatttttttatgtgtacgaaggtagtacgtagctgaacagagccgaccaaatcgcgttcgatcgatcgatgggcgataccgagccgtgcgtatgtacacaactcgtatatcattcttttcttgaaacccacgcaatcgtatcatgaaaacgtctacacaactcgtcgtatactcgtatgtgtgtaagtaacggtccggtctttcggcgaggcgtatagtacgtgcgtgtgcgtgtgtatgtacgagcttactagtagtagctactgatcgatcgagttaagttgcttgtttcagagggaactaattaattaactggtcgaacccggccgttacgatcgaggaagattcactggtcggtcggtccaaacgaatgtgtcaattcaagggcatggacgctcgatcgatcggggtcaaggtcgagttacacacggattaatcagaacgtccgtacggtcctacataggcacatgactagtacttcgtatgttttaactttgatcaaaattaaactgctttaactctgatcaagtttgtagagaaaagtagtagtaacatttttaacttaagacaaatttattatgaaatatattcaattattgattcgatgcaactaatttagtattataaatattactatatttatctagaaactcagttaaacttaaaataatttgactttgaccaaagtcaaaatatcttataacttgaaacggaaggagtatcatacacacactacctctatctcaaaataaatgcaaccgtggagattcatgtccaacggttgactatctgtcttatttaaaaaatttagtcacacataaagtaatattcatattttatcacctaataaaaataaaagtactaatcataaactttttttttcagataagacgaacagtcaaacgttgaatataaataatgtaaaactacattaattttgggacggaggggctactaggtctttgtaggagtgtaactgtatatacatgactgattaactttgccttaggagctgtttggttcgttgccatattttgtcacgccacactttagtcataccatagttttttaggcatgtgtttggttcgctgccgcaattatgttatgccacactttgggacccacgtgtcatgctctcaaatttagagctaagcatgccacacttgtggccaactatttctaagccatatttgtgccactatgccacaactagcctaaacttagttatggcaaagttaggcatcaaccaaacatccccttagcttccatagtaatactcacgcgtagcagcactacaactgctgctgcacgtcttcttgaacctaactagctattcgtgttcaaccttggacatggactgcgctgaaaaccgcgtacagtggcatgttatgttgttaattaattagtagtactactggtaaactcgtacgattagacccgttcatctgttaagatttttactagtacatgcagttcaacgtgtggtcaagtcacgaacatatatgaactgtactactataaaaggaagcccaggttgtctgatttcctccaacaaattaaacaagctattactcttttctttaatcaagctagctacccattcgacgtacagcaaacgcactttctgtctgctatattcaattcactcgtcgtctcactgagctttacaccattgccgagcacctagctagctagcttaattaagaattcatcaagaaatcatataattaatggcgtcagcgtcggcgaagacgatggtgagggcggtgatggtggcggccgtgttgctgcagtgctgcggcgtgctcctcgcggcgaggccgttgaagggcgacgtcgtcgccgccgccggcggtggcggaggcggtggcggcgagatgttcgtcatgcagatactgaagaccagcaccccaaccacgccggtaggcaatgggtgcaaacaaggcgagaccggcggcaacggcgcaccatgccacggcagcggctagctagcttaattatactactcgatcgccatctgctgcatgcggcgatctgacaccggctgcttctctgtttagttgtatgtagatgtcgacatgtatgcatgtaaatatatactagatgatctgtagagattgtttcattcattatttggtttttaatgatatatgcagtaattaggagcttccatatatgtaaagatggagtgtacgttggaagaagtcgaatgatgtatatatagttcatattattcataatcagtgtagtagtcaataattagagcatatcatgcatgcaagtagtatctctgtttttaaatataagactccattggcttcttgatatacacttaactattcatcttatttaataattttgtacaaatataaagaacatcggatgataaatcaaatcacgataaaataaataataattacataattttttaataaaacaaatgatcaatctatcttaaaaaattaacggatcatatattaaaaaacggagggagtatataggagagaaaatagtcagacaattgtaattaaattgtgtaaagtagttttcgccagatgataaagatatatagttttatttggattaattcaattaattttggtatttgatgatgatctatatatgcatttatattagttgaccgtttcaactttgaacactaataattattaaattgttagactacaatgaatgaaagtacatatatgtattgtgtaggacgtaatatatatatatatatatatatatatactttgatacgtatttatatatttatttaaaaaacaatttacaaagtgattgcaaacagaatgtaacagcaaggagaagaacaaaaggatatggattttcatctctcaagaggatatcctcttacatgtcatctaaatagttataaaaaaataaaaaaaaagttaacaacatagattaaatataatatacatcactctacaaacatgcgaaaccaaattcaacttttacaagttgcaaaaaaaaaactgaaagttatcattcattcacggttatatttgttatctttattaaacttgtagtagtttgaattttaacttttatgtttgtgaagtgatatattttatattaacctattttattaatttttataattttttataactatttaagtgacatacataaaacgaggggatggtgagatctatataatatatcctcttatgagatgaaaacaatacaacatgaggttgtctggcatgtaacgtgcatgcatatataatatatattaattgttcttacatatagcaaaacatgcctgctacatcttacacaatttgacttaactatagttagacttggtcaacattgaaatatataaaggtcaacatatatatgtactcaagacatagcatttgaccgtcaggacatgtgagacgagatcgagctaggtagtaactaaacaagcaactatagcatgcgtcaaatgggaaaaattttctaaactctcaagggacgtccccatgttatttacatatcacttaaatagttaatttttttaataaaatagattaatatatgatagatcactttgcaacctgcacagtaacttcaacatgttgcaatgaaaaaaatatatttgacttaaccagatatagtttaatttatctttttataacttgcaaaagttaaattttaacttgtatgttgtagagtgataacatgttaacacttcttctatttttctactatttttttataactatttgagtacaataaaacaacgaaaggacatcttccagagagtttaaaatccactctctctgcgttagattaagatctcgatatgtgcaacgtagagagtttaaaatccactctctctgcgtttgattaagatctcgatatgtgcaacgtagcaggctagctaattcagtttttttagatcgatcgatcaattgagtcggtggtgaattggtgatgagtctgcagcaggtgactcatcgatcgatcgatgcgcgtaaaataaacctgcccatgaaaccaaaccaatactaatataatcaaaatcaccgccactttctcggaagtcataaggactaatttagagcagatacaatagcaggctctaagctatttataaacatattttaaaaagataaaggaagagagaagagaagtgggctacagatctatagctagctgcagcatggactccaaaacgtaatatgtatatgacaggtgggaccaagtattaatagtatagtaagcaactattgtataaattggctattacattggctatagatgatttggagcgagcagtagactatattattaaacttgctcggcaaggcagccagcaagtctgatagagcaacatggactgacgacagcggccgggctagcttgcttcaccattcatatagtcatgcatatgcatgcaccaagtaagttcgctcgtaactgcgtacatagctagtaattaatactgtagattatgtaaagtactacgtagtaatcagtcagtcagttatttggtcatattatatcgcgatatccacggtagactagctcgtcgaatacgactagtagctaactagttcatctcttcatcgatcgatcgtacgtgtcgtctcggcaaaattgtgtgtagttacgagatcgacgtaagttatatgcaagccgggaagtatacggccggggtcgatcggtggattggtccaacaacgagagctatagctcgcgcaggcaaagttactattttattaaactcattaaattacatctagatgatatatttgttctacatataactgagatgcacacaattaaaaaaaaagattactaacgagtacgtacgtatacatgcgtacgaacatggacacacatggttttattttgatcgtacgtatgaatattatcttgaatgaatggtatttgtacttgtcaatgtcaaacatacgacgattgaattaaacgtgaccgcggctcgctcgctagctcaaaaaaaccgcgtttttccgcgaggcgaggatgacaataaaaaaaggcttaaaagtagcgccttttacatagcgccgacgaatagacccggtcccttttgtacgttacgttgcacaccaaactctcttccctcgctctctatatatagccagcccatcctgtctctcttccaacaaaccgcactatacactagctactaccttctccaattcatccattttcacgtagtaatatatacgcagcaaaattaagaggatttaattcttgtctgccatatctctgaaacaaattaaatctagtagttagtacacagtagtaattaactgcagctgaattcgatcatggcgtcgtcgtcggcgatggtggtgagggtggtggtggtgggcgtgctgctgatgcaatgctgcaacgcgatcatggcggcgaggctgctggaaggcgacttgtttggcagcagctggctgcagggcgaggacggcgtcgccgccggcgagctcatcttgcaggtgctcaaggtagtgccatcgggaccaccaggcaatgattgccaccaaggtggcgccggctccggaggccagtgctaccagccgcctaagtagccgcgccggccaccggcgcaccggccggcgccgccatggacgatatggatcgtggcccggttttgctcgtagagtagatcgatcgatcaactgttcatttgatacgatttatttgttctatatatacgcctgcacacgtagagctagttagcttccatgcatatgcagaaaatggagctttgcaaagctgttcatagttgtagttaggttagtcaatttaggcgtattgatttgtgtaatagcgtactagtccgtgacatatagctagctaggttgatcctcaatgtatatatgaatcatacacacttgtcaatacaagaagagatttacacagtgatcgtttcacacatgctgattaatttataaataaactatataagctgcaaattactcatcaacaacccaaaaaacaatttgtcaataaaaacttttgtatatgtgttcttaagcaatttagaagcaaaggctaaaaaataaactataataaaagaaccctttaatcaactccaaaattaagttttcaaattcaaatttgtgttgctgcttataagctggaatgtaccttactttccttttggttttcccttttaacacaatatatatatatatatatatattgtggtattgttggaagaaatgctatcttgacatggtactaagggaaggtatatatggaaactttgtggtattatttgatacctgtgaattttttataatatcaccgaagtttaatcttaaatgaggatggattgagaaaaggcgtaagattagttgaaaaataaatgagaggtgattgtatagtagcattgctaccgttgttccaaatagtttataaggcaacaaggtggcaaagagttccctccctacaagagagaaccgaagcttgaagacataggagaggagatgagttgggtgggacaggaaaagagggcaagttgagtcggctgactcgtgatagaaaatgagagggcaaggaaagacaggcgagcacggcctggtggatgttgaactcaattcctagatctagcatggcaaaacctatgcaccaaagaacgtggcgctaacatgttggacccaaggtttacaaaaccgtatggttaccacacgattatcacgtgcagtaatcttctcagtttttgaaaccacggtacatcttacggtaaccgcacgtttaccgtggccagtaacggccaaaccgtggggtggcggtaaccacggccaaaccgtggggtggcggtaaccaccgcaaaaacggtttgggggaaccctggttggacctgcgccatactcgatgaaaccaatgtcgcgtgtttttggttgaagatatattttggcatgatctattcttgttataataagtttttgcaactagctaaatggtcaaaaatgctataattacacgtagttatatgcaaaccgtgaagacgccggtcggtagtccagtaacgggagctatcgcaggcaaggaccggagtccggaggtcatatatttggttgatgggaatgtagctgggcacggtacgtagctaacaagcaacaacgtatgtgcgtacgagcctggctttggttgatcgtatcaatgatcttgaatacttactagacttgtcaatgtcaaacgtaggaaattgaattaattaagcgtacgtgaccgcggcccgctcgctcaaacaaaccgcgtttttccgcgcgcgagctgagacaaatatcaatcaaattaaagcctaaaagtagcactagttcgttgttttacatggcgctgaagaatagaccgacctggacagtcacttctgttgcacgtatatacacagccaccaaaactctatatataaccagccaatcgatcctgcctccccacaaccacacaaacaactatagtttcagttcttcagccattttctcgtacgtacgtacgcagccagcttggattcttgtctgccactccgaattaattaatttaaacaatctagccgattgatcgaatcaacagccgaattaatcaagctctagttaggttgctactactagtacagtagtacgtacgtactgcagctgaatatatatacatggcgtggtcgtcgtcgtcgtcggcgacggtgagggtggtggtggtggccgtgctgctgatgcagtgctgcaacgcgatcatggcggcgaggctgctggaaggtgacttatttggtagcagcagctggctgcagggccaggtcggcgccgccggcgagctcatcttgcaggtccttgacaatggagggtcgccgccgggaggcaatgattgccaccaaggtcccaatccaggcggctccggatccggaaaatgctggacgccgtaactagcctcgccgcgccggcggccggccggcgagcggcagcttatgtgcgcgccggtcggccgccatggatggattcccggaccggttttgctcgttcgctgcaggcgcgcgggacgttaattaacatgtacatgaagatctaattaagttcgacatatatatatactcagctcctgcatacgtagagattgttcatctgattcagttcttgcattctttttttccctgtaactgtaagagcttccatgtaaaagtggagctttgcaaagctgttcatagttgtagacagtagacttgtagtttagtctagtcaatttaggcgtactgatttggaacaaggtaagtcagggacatatatagctagctgggtcctgaaagtgtgtaatctgaggatcatgtgcatggatactgtccgacacattagaagaaatttactttccttttggttttccctttaatacaatagcgtgattcgcttttatatttgtgaagtttgcggtattgttggaagaaattaatgctgtcatgatgttgtagtgaagggtaaattttatggtattatatatggctgcaccgcaggcatattgttggaagttacgttagtcggaaatggttagtatgatatcattattttattatttttcggaaactggcaaaaatgattggaaaatttttatatttatgaattgaactatttagtgtcaacttcaatgccacgcttatagaaattgggaaaaataaaatttgaaaatggtaaccgtcgataaaaatattattagtttttcggaatatggtatcggtactgtcggaaaacttccataccacacatataaaacacacacacacacacacactacccttactattgactttatttgtcttaaaatacaaaagatttaggagctaataagcactactatggcatgtgtcatattaaaagtctgtgcaatgaacaatagctttgggcatgtttagattcccgggtaaaaatttttagcatgtcacattgaatgtttagacacatgcatgaagtattaaacataggaaaaaaactaattacacagatcacgtgtaaattgcgagacaaatattttaatcctaattgctccatgatctgacaatgtggtgctacaataaatatttgctaatgacggattaattaggcttaataagttcgtctcacagtttatcggcggaatctgtaatttgttttgttattagtctatatttaatacttcaaatatgtatccatatatccgatgtgacacgctaaaacttttcacccctaaatctaaacacagcctttatcggttggctaagaaccaattatatatcaaagcgacttatcaaggaaaagattatggctaaagcttttatatgttgttaacaacttaaaagacgatcttaaaaaatatatcctaaaatgaactctataattaaagtttaaagtttaaaatttagcatcagttgaagcgtacgatgaggccctaattcaatttgagatcgatgggtgagtctggtggtgaattggtgatgtggattgaagtcagcaggtgactgatgcatgcgcgtaaactaattaaacctgccggtactatacgcacgcactgcacgtccggccgtagacggtgtgatcgatttgatcgaatgaacatatgaatttcacagacgatatcgatcgatcaaagtcgccgtcactttctcggaaagttattataaacgacctaggtttcaggtaggttggccaatgcagcggccgggccggcaacggcagtcagagagcaacacctgaagtttgctaagagcaagggtaataatatagccagctgcttacttatagcctatctatcagctcactcatatagtggttaactcttcactgtaaacatatggtccacctgtctgtctcacagattttcttggttcctgtgcctaagccggctgtaaacttatagtccgcttctcatctctctcctctcctctctcatccacctcagtattcagccttcttatagctctctattatacttgctctaactctagctcacaattcatgcatatacaacaactagatcagaggcggatcaagagcatgagtacaatggggactcgagcattcactactcacaataacaccatggaattcttcatgaagttttcactacaaattttgtatatacatatgaaagaaagctatagatttatcttagtttattcagacctttactgttttttttttggagccagtccagtcggtccgatcgatcatatcgattggcggctgactaagtgactagctagctcgttgaatacgacgccctcttgctcatctgtcgattgaaaccgtctcgatcagccaaaacgtgtagttgattacatgcaagccgtgaagtacgccggtcggttggtccgacaacgtacatgagctgacgcagaaaaggaggtcaaacaacgatcgagttgattatcgtgaattcgtgatgatatttgaactactccttcatgggaatgtagtaggcaagtgaacaacgtactgtatctcaaaatcccttgaaatggcacgagctactactacagttcttgtcaatgtcaaacgtaggaaattgaattaaacgagaccgcggcccgctcgcacgctagctcaaaaaattgaaaccgcgtttttctttttgttccgcgaggcgatcgagactgacaaatcaaaagcttaatagtagtattataattagttggttgttttacatggcgccgaagaatagatccggtcacttttgttgcacatacctttttactttcaacgtacgtatgtatacacagccaccaaactctatatatataaccaacccaatcctgtctctcttccaacaaccttactactagcttcaattcttcagccattttaattcacgtaggcagcagccagcttgaattcttgtctgccatctctgaaacaaatctagttagtacagtattgtagtaactgcatctgaattatattcatggcgtcgtcgtcggcaatggtgagggtggtgttggtgtccgtgctgctgatgcagtgctgcaacgcgatcatggcggcgaggctgctggaaggtgatctgggcagctggctgcagggtcagggcggcgtcgccggcgagctcatcttgcaggtgctcaagggagggtcgccgccgggaggcaatggttgtcaccaaggtcccggaggcggctccggaggcaactgctaccaaccgtaactagcctcgccggccggccaacgcgcatctgtcgcatccatgggtggatcgcggccggttttgctcgatcgctagctgcagctggcgtgcgagccgttaacatgtagtagtgatgaagattggagatctgcgtagagattgatcaactgttcatttggttgaattcctttaattctttttttttcttctatgagagcttcatccatgcaaaaatgctggaaagcctcgcaaagctagctgctgttcatccatgtagaaatgagtagtttaattagtcaatttaggattgatttggaataattaaggtgatcctgacatctaggtcctgaaagtatgtaattagtcatgtttaatgcttgatacttgtataggtcatgaagtcacaatgaaacaagagatgctatactttgagaaacgtccacggccgggttttccagctagcttcacaagatggtgggctagctaacctggatttaaagcctcatctcttttatttatctgatattagattattctctaatattcgtgtttttttaaacaagagatgctactcctttgtattttatctttcctgttggtctccaacacactactactccacatgcatacacccaggcagatttactgccactatcaatataattaccaatgtatgcatttatgccatattacagatgaacagatttaatttgcaatcaaaagtaatatttatatccaaaactcataagcattatcttaaaaatttcttcgaacatttcctgatatgatggaaatcattgaggataatatcaatatcaatctcatctaataatttctttttattaaaaacatttatcaatttctcgaaagttataaattaacgacctataggcgcttcatgtaggttggcggttggccaaacgcactgcaatggggaaggggggggggtgctgacaaaccctgataacgtgtgaaccgggactaaagatgatcatctttagtcccggttggtgttaccaatcggcactaataattaaatagtgatgttgctcttataaatttggatttaaaaattatttttagtcccggtttttaataatggtttctccagtagtgagcagacagaccggcaacggcaggcatgaactaacctgaagtacagttctagctaactctagctcacaatataattcaagtatatgtagcagctagccagctaactctatatcgattggatgatcagtgatgagattgtgtgcgtaattatttaacttcgtcgtatacaacagctagctagatcagtcagtccagttcggctgactatagctctcgttgaatacccccctctcttgctcatcgatcgattgaaatcgtctcgatcagccaaaacgtgtagttagttactccctccgtttcgaaatgtttgacgccgttgactttttagcacatgtttgaccgtttgtcttattcaaaaaatttaagtaattattaattattttcttatcatttgattcattgttaaatatatttttatgtaggcatataattttatatatttcacaaaagtaagtttttgaataggatgaacggtcaaatatgtgctaaaaagtcaacggtgttaaatattttgaaacggagggagtacatgcaagtcgggaagtacgggtcgaacgtacgccggtcggttggtccgacaacgaacgggagctgacgcaggcaaggaggttaaacaatcgagttcatgatgatactattttaactaactactccttcatgagaatgtagttagcaaacgaacaacgtactgtaacctggctttgttggttgatcgtatctcaaaatcccttgaaatggccatacgtacagtacttgtagtcaatgtcaaacgtaggaaattgaattaaacgagaccgcggcccgctcgcacgctagctcaaaaaaaccgcgtttttctttttgttccgcgaggcgaaactgacaaatcaaaagcttaataatagtagtattagttcgttgttttacatggcgccgaagaaatgaagaatagacccggtcacttttgttgcacaccgcctttttaccaccaaactctatatataaccaacccccgtcctgtctctcttccaacaaacctagctagctaagcttcaatattaatttcttcatccattttcacgtacgtaggcagccagcttgaattcttgtctgccatctctgaaacaaatctagttagtaacttagtacagtagtaactgcagctgaattcgatcatggcgtcgtcgtcggcgatggtgagggtggtggtggtggccgtgctgctgatgcaatgctgcaacgcgatcatggcggcgaggctgctggaaggtgacttgtttggcagcagctggctgcagggcctgcagggcggcgtcgccaccggcgagctcatcttgcaggtccttgacaagggcacgtcggattcggaaggcaatggttgtcaccaaggtcccggaggcggctccggagccagctgccaccaaccgtaactagccgcgccggcgcgccgccggccggccaacgcgcatcgtcccgtccatgggtggatcgcggccggttttgctcgatcgctagctgcagctgccgtgcgagctgttaacatgtagacatgaagattggagatcttcatagacattgatcaactgttcattattggttaaatttattctttttcttcttcttcttttatctgtgagagagcttcatccatgcaaaaatgctggaaagcctcgcaaagctagctgttcatccatgtagaaatggagtagtttagtcagtttaggattgatttggaataattaaggtgatcctgacagctactagctagctacctctaggtcctaaaaatctgtaattagtcatgttggatgcttgatatatacttgtacgtacgtatagatcgatcatggagtcacaatgaaacaagatgctactcctatatattttacctttcctgttgattcttaatacaacagcgcaattcccttttatgcatggtttactccttgattctcactccttcaacacacaattttctctttttttaaatcagaagaaaaacaacgcactattatgtactccactgcatacacgtacacccacgcagatttactgccactatcaatatcttcttataaaagagtgtttactaaggtcacgaatttattttttgcaaataccctcatcgtgccaccttacctacccatttgtattttattaattattccttaaaatttttaatatcaagaaacaaacaaatcttaatgtatagccgcatgtaaaattaaataagacgaatattccccgtaacaaaaagataggcagtacatatttcgtaagaaatatatttttatgtattttagataatattataatatattttcttttagtatgcagtaaagtatggatattcaactagtttatatgaaaagtatactcacgcatgtttatatcaaaactaatgtattatcaataccgatcgtaacaccaaccgagattaaagatcataaagtcccgttgaagtttttaactgggactacaaatgatctttagtcccggttcttatttgaaacggaactaacgtgatttttgcatgacccggtaaagatcacttctccagtagggctagctaactctctaatatcgattggatgatcagtgatgagattgcgtgcgtaattaattaacttcgtcgtatacaaagctagctagatcagtcagtccagtcggtccgatcgatcataacaatcggcggctgactatagctcgttgaatacgaccctctcttgctcatcgatccattgaaatcgtctcgatcagccaaaacgtgtagttagttaattaagtacatatttacatgcaagccgggaagtacgggtcgaacgtacgggagctgacgcaggcaaggaggtcaaacaatcgagttcatgatgatactattttaaactacttgatgagaatgtagttagctaacgaacagcgtactgtacgtacgaattgaacctggctttaattaatttgttggttgatcgtatctcaaaatcccttgaaatggcactactacagtagtatacttgtcaatgtcaaacgtaggaaattgaattaaacgagaccgcggcccgctcgcacgctatcgctaaaaaaaaaaccgcgtttttctttttgttccgcgcgcgaggcgagactgacaaatcaaaagcttaataatagtagtattagttggttgttttacatggcaccgaagaatagacccggtcacttttgttgcacaccctttttactttcaaacgtatgtacacagtcaccaaactctccatatataaccagcccatcctgtctctcttccaacaatcctagcttagcttcaattcttcagccacttcaattcaaggaggcagccagctcttgaataattcttgtctgccatctctgaaacaaatctagttagtacagtattatagtaactgcagctgaattcgatcatggcttcgtcgtcggcggcgatggtgagggtggtgctggtggccgtgctgctgatgcagtgctgcaatgcgatcatggcggcgaggctgctggaaggcgacttgggcagctggttgcagggccagggcggcgtcgccggcgagctcatcttgcaggtgctcaagggagggtcgccaccggtaggcaatgattgccaccaaggtcccggaggcggctccggagccacctgctacccgccgtaactagcctcgccggccaccggcgcaccggcgcgccgccggccggccggccaacgcgcatccatgggtggatcgcggccggttttgcttgttcgcgtgcgagccgttaacatgtagacatggagatttggagagccgagtagagatccactgttcattttggttcaattcctttattcttttttttttcttccctgatgtgtgagtgcttcgtctgtccatgcaaaaatgctggagcctctcaaaggtagctgttcatccatgtagaaatggagtagtttagtcgatttaggcgcattgatttggaataattaagggtgatcctgacatctactaggagtctaggtgaaagtctgtgtaattagtcatgttgaatgcttgataattgtatataagaatcatggagtcacaatgaaacaagagatacactcctatatattttacctttcctgttggtttcctttaatacaacagcagatttcgcttttatgcatggtttactccgttgattctcacttaaacacacaattttctctttttataatcacaagaaaaacacacacactactactccacatgcacacacccctacacaaatttactgccaccatcaatatcttcttctagcagagtgtttactaagatcacgaatttattttttgcaaaaacccacattgtgccaccttacctgaaaaacttttttacaaacattaattggtggtgtattagcaaacgatatatatatcggtttacgatgcattgccactcgaaatttactccttaaaccttttaatattaaaaaaacaaatcttaatgtacagccacatataaggtgaatattggcctataactaaaagatagataacatatttcataagaaatatatattttttattttaaataatattataatatattttcttttttatatgtagtaaattacaagtattcaactagtttatatgaaaagtacacttgcgtgcgcgtgaacgtaggcataaaaaattagaaacttggtgaatggagccatacactcgcatcacaagtccatcacgtacgacatccgagatgctttacaaaactacaaatagtatgactaaactattgaaaagctacagataaatttattgagcttatcacgaaactatagatttaagacatactatcccaaaattacatatttagcactaaatctatcataaaactatagttttgcgatactctattctaaatctatgtaatttcgtcataaattttgtattaataaatttataattcagttattaagaatgtatctttactgttgatcaaaatatattgttttgtgaaatttactcattttttatcataaaatgttggatgaacttaaataatttcaatataatataatcgttttgatattatcattctattgctattgtgccattctataattctcaccccaaaaatttatatatatgtggattattaattgtacggtgtgatatattaatcaaaactagttgacgtggtaggcgacatacccgtcgacagcgaggcgcctatgataacttcgtcaatctccaggatttgccgtcccaatctttgaagatgctcataggggtagaatttgcatgcgtgcgtttataggggtgagtgtgcatgtgttgtaagtgtctgcgttgtactgtgtaattataatagaaaatattaatcaaaactagttaacctattagtttatccgtgtgcatctaacatgcaaatatcacgcagccagcaagctggccgtctagtctttatgttaacgtaatggcttgacgttggacttgatcaacaatatcaaaaaggtcagcatatacgagccgtggccacagaatgcattatataatttgaattgtttcagtacggtacattatataaatgaattaattaattattagaaatttgatgaattaatttgaaaaaaaataagaaattccaacgaagaatttttttgataaaattgtattatttcaggagtttcggaaccatactttcaacaatccataatccataagctataaacaacgcacccttaattcacagcagattatcccgcacataagtactcgatcctactgtaaaaccataccgtaaaacttcttcacattaaaagaattgggtaacgatacagtaccgttgcccaatcatcgttagccaattatctctcaatcatcgttagccaattcttttatttcacttttagatgacgtagtaacaaccaatgtcgtgcttaaatgtatgtgattttggattttttttttcagttgaaacttttctagagggagttaaggggtttctcccatcacttatgtctctatttttttatcagaactcaatagttgtgtgtctaatggctgtggccggagatgtaaacaatttttattatctaaaataatgaataaacataatgagaaaaagatcaatgtataaaattaaagattgtacatcgatctttttgcgagtcatatgtctatttcacccgttgccccgtaggcttgttaattaatttggctggtcaggcattttgactctccagccgagccaaaatgttcagaccaggaaagaattgacttcagacgtacatgctttgaataaaataaaataaactttgatttgaaagattcaatatgcagtctttggaattagaccgactattcacatactcctactacgtactctgtacttacgttgaggaatctaaattcagacaaaaacagtgaccggccagtatgtaagtactactacactatttgttcatttttcatctagtgatgattgagagatgtgtcaaacaaatgaccgtgatcaagagaagtacttgcagtcaggtgaaaatttaatggacctaatccaagtcattacaaatcctagctagctaggcacacaaagcaaccttatgcttggaaattgaagcagtacatgatagttgatggtggcagagtcttggcatgcctactaatcctttcggtaaaatttgacggctgcaggcagcagaccattgaagcacaactgggatgaaaacggtacggaaacgaagtgaaaccatctttatcgttttcgttttcatatttttttcggaatcagaatcgaaaaccccggatacgaaaacggaatcaaatattatcgaaaccgaaaacgaagcaaaaatgaatcggcgcgaatacggtgactaaaatttatcgaaataaaaaacccctcaaactgataaatccaattctcaagtctcaacggtcaacaattcatcataaaacataatcatataagtttaattgttaagtctcaaacagtacatcacaaaacacaatctatgaaataaattatctatatttaagagagtaatgttgttgataaatcctaatgcagaaaaaaaattcttatgcaacttcatatttgcataacaaatatttttttaaaaaaaataaaagccaaacaccatggtattcactattcagtacttaaaaaaagaatccagggtatttcagtcacaaaattttcggaaattccgaggaaatttctggaaagtttccgaccgattccgagttccgacagaaactgcccttatcattttcgattcattttccgagaaaatatttccaaattaatttccgtttctgaaaaaaaaaccaaccgtcagattccgttttcgaaaataggtctggaatccggaaagtttccgtactattttcacccctgcaactgagtgaactgactactgtactaaggtttgtaaattgtgatactgcatccgttccaaaattgtgtatacagtagtaccttttggatatttatgctatacactatacagtttctaatacacgcacctgatcattaatccctacattttgattatttactatgtactagtatatcgcttggttaaaaaaaaatagagaaataattttcaagtgttctgatcaagtcaaagtaaaattagcttggttcgttcgcatgaaattgtaaagtatggctgcagtcgagactcgcgagagtacgaatgcatgactaccgtgtagaagcagtagcacaggcttgagtagtcacaggtttttggtgtttgttggtgatcgatgcactctacacgtacgacgagtcactgccgctgcgtgaattgaaattttgaatcgcggtggcctatcgagcagggcacgactgcttctacctctacttgtgctccctatagttcctcaccggcaagaacggaacgagagacaaaacgaaacgacttcaaaagttcaaaccaaactctgccaattctgaggcgacatacgtgcggagaagatgggcatcaagcaccgcagcttcaccggaattagccgggatgattgcaaagcgacgtgtttcggctacgttcttggaacaaacgggtgctcgtgtgttgattaatttggttcgaggagtagcagatcgcaagtacgcacggcacggcacgaccactactcctgctcgctctgtcccattaagaaaaatactttttttttagtttttactccctcctccgtcctaaaataaaataaatgcagttttgcactattcacgtacaacgtttgaccgttcgtcctatttaatttttttttctatgattagtatttttattgctattagatgataaaatatgaatagtactttatgtgtgactaaatatttttaattttttcacaaaaatttcaaataagacgggcggtcaaacgttgggcacgaatatctatggttgcacttattttgggacagatgtagtatataatgttttgacactgtcttatttgaaaatttttatgattagtatttttattattattaaatgataaaacatgaaaatgtttgatttatcttcttcaatttttccatattttttaaaataaggtggtcagtcaaacggtgcaatgcatataaacgtttctttgtgggatggaagagtatagtgcaacgaatggccaagggacctgaaaaccgaaacgatcaaggtcgcagggttgaaacttgaaaggagaggctgaaatttggagtacacctggcagatccaccacggcgtatttgtttcagcggtccattcagacgtccaacaccaacagcacgttggccgcttaccaggactccaggagattttgcagatgtcaacactttgttacagcatgattagaattctatggaatcccatgttcttgatgcaggttagcaggcttttacgttaagcagcacagaaatactagtaacatgatctttatgtcactttggaagatgcatttgagacaaaagaaaaaaaaagaagaaaatatcaagtcaggttatcaaatttaaaaagattgacggtggcatataaaacctgttattgacacctgtgctgtaggtgttcgaccagaagaagaacacgactggaaaatagcaattcaaactatagtactaatcaagactgaagattaaaaacttgacctattcatatgtctgtttagaaattgaggtggaaggtctgacactggcagtttccaaaggacattttcagcagcgcaatgacaatttatttacaaaggcaaacattcctaaccttaatcagctaaaatccttcagccttctcttcagaacatccatggacctcttgcgagcatcctgcttgttgcggtttgaaaggcttccaaacaacccatctgcaaaatccttgtacttgtcacaaacgatggcaaccttcttgtagtctaatgacccatagttcctcccccttatcactggattcatgaaattctctggctggctgctaaggaggagattgactagctgccttatttcaaccaaacaatcggcgaatgttgtttccttacccaaatccaccaaaccggtcctataaaatttctcttccgcgaatgcctccagtaatttcaagtcaatgtcaaggcccataactgcattgacagtgaaccttttcacgccttcgttaagaagtgttgtcatgatagagtccgagatgtggctcattgcaccagaaaccatcttgtatagagcttctagcggtaaaatctcctgcgctgttgatactagcgtttcaagatagataaggacctcattcatatattcatttggattatctggggcttcctccactatccagttgacatcgtccaagagcaccataaattcatcaatcttgaaattggccaaatttatcaaagagttatatgctgcattctgggaggcttttaagacagcttttgcagtcaaaccggaatgagatctctgcgcaatacgctttggaatgccacacagttgagcagaatacaagaggaacatatcgcaggattgctcaagaacagaaatatttcctgcaagttgcatcatctgtgacatggctaacgagcgagcataaaccatgttcagaagactatcatttaacacctcaatcaatagcctgtctaggtaacccttcacaatttcatagatgtttgtgcgagcactgtaagaaaaatagctgacagaatccccaatgaaggaccggacgatacgacaaatatctggaacaccagaggaaaatggagccacatatggaaactccgggactacatcatcaggttcaaaatggaatgccgtgacattcatgttatactcatattccttctttataatcatctgctcatatgagtcattagcaaggatatcatctatctgctttcgactctcaataagaagcaactggtggtatttgtctttgtatttcgcaatgacttgaatcaattgtgcgatttgatagccatacttactaacagttgtgcctaacaaagtgacataatctttaacgaggaggaggtggctggctatactcatgcgagcaaattgatcctccagtatagatgtgatcttagcaatagcagtctcccatgttgattcaacttggctttcagacaacaaaccatcagcacttcgaagtacacgttgttctacaatgaaaaatccagctacctgagcaagtaagggttgatgggactcaaggaagggttgagaggtggagatttgcatgtccaagttgagctgcattagcctattcttgtagtaataatctcgaaacttctccccaataccaaggcatatgtgcatgtgatgtgcccggtacactggcgtgagatcaaaatttagtgttgattcctcatctgtattctccacatccaaggtgtacacatgctcatcagatctagcatcactatgtgcttcagcctctctcttccgggcacgcatttcctcatctttttgtcgagccatagaggcctgacttattgagacctgtccaatctgcttagccatccttctgatatgaacaagccaatcattaaactcactgcaaactttcttctcaatgtgcatctttatcaatggtatatgttttgcaactaccttcttcagaagtttcaaaggaatatttttcaagtagcccttctcgatcgtgtcgagagtcttaagcgcaggatgaaacttagcttctgcaatataaccattgcatgccatgcataaactgatgactttcacacatatcttcaacgttgttatggcttctcctatgtttttcttaatcgaatataactcaaaaagctcatcaagattcaacaatgtggcactagaaaccttttgcaggtgtatgttctcaccagttagcatgccctttagctcatcagcatcaaccaacacaccacgtagttcatcgacggccaggatgaaatcctcgtaatgaagtctacaaagctcttcgatctcaacttcctttttctttacaatactcctgaggttttgcatgagagcttcaggtttaccagaatcaaatccatgccgaatgatagggcccaaatcttcaccatttgagataaataaagcaaggccaagaccaagacctccatctccactttctattacactcctcttctttggctgagcagtcatgattcaactgtaaaatgaaagcaacataggtaataaagttcagtagaggttggaaattaaaggtcatatgataagtactatcaattataatgtgtagcatgttcagacaaaataaagcaacggtcaggccagcagaagagcctatttgttacttccttcttttaacaacattgtcatgcttttttttttaaggttaacattgtcatgctcatcacgcagacagatcatgttgagttcagcattactttgaactaaacaagcatgaagatcactatacagtcactaaactagtatggaggtcgtcctacagatggtgatattcttgtcatatgaaatcctaaatatgagtacataatatgtacagtccacattacagaaatagatacggatcagcactaatttcgtgcatcctcccttccttggcatttggcagtaaggagcttggcaccttaacattgccccaggaaattttggaaagatctccatcatggcgctgcaactaattggcaacgaaaatggatgcaacaggagaatttcatagagaaacgcaagaattgaatttaaaaaatcacttcccaaaagtatggaagagaggacattgtacaaacagaatatacagggagatgaatagagaatctggagaggggtgggactaaaactaaactcaatgtgattatgcatggctaatttaaaccattattgctattactgtaacatgacagcatgtaaatcattgtcactatcatcaatggtcaatccccataccaattaagaaaataccatacactcaacaccaccaatcaattgaaatgacaccgcatatcaaagtaaccatgaagtatcatcttcgaaattgaacgtaacttgatttattcagattatataggttcgaattaacaagagaagacaggagggattacaaattacctgcttgtgacacgggaatcgtgcagaggttctcaacgagcaagcgatcaaacccaaacagaaaagaacagagagaaaagagtggtgtggggaatatcaaacgacgatgaaagaaagaatcacagggcaatagaaagagatccttgttatcacccaaggcgcagagggaagcaaaaccaatgcaagaacagagagctatcctatgaaattggctgtggctctctctctctctctctctcgctctgcatgcatgaaatggaatacaaaaatagtgagttagccgtgcctctctccgcggcagatcttgactccttaatagcaggaactaagggtgagtttgagagataggggattgagaagattgggaagatacgcaaaatgagataagccattagcgcatatattttactatagaaaatttttaaaaaaacgcatcgtttagtagtttggggagtgtgcgcggaaaacgtgttttctcaccctatctcacacaaacgaacacagcctaaataacgttgtcagatgcagttttttttttttttttgactaacctgtgatgtcgccacctatctagctgatgacgcggatctcaaaaaaccgccatccccatccgttccaccatccatgggtgagggtgaggtcgccgctgctcaccggactaccctggggctcgcgcccactcgccggggcgccgctcctctgcggtcgcaggcgtgaggacccaaaccatggcgccgctgctcctcgctcgcccgcggcacatcgcgctcgctggaccaaaacacgccacctgccgccgccgccgcccgcggccggcgcttcctcagatctccgagcgcaccggatgccgccgccgctcccccgagcgctccggctcgtcgtctgctggtaaactcggcgtcggcgtgcctctctaggatttaccgcagttgagcgttagattaaatctcagccacaaatccaagttgggacggctgtgattctccggatatttctttgcataaggcgtggcgtaggaagggtaattttatcatcctactccgattcctagtagtctcctagtgcaagttaaatcgagaaactgtaagaacccaacggcccatattaatgcccaccgatccctctgtctcgatcccacctccttcgtctccgccgccttttacttgctcgtcgcgtctctctcaacgttcatctgctcgaggtgcatacatgtgatttgctttgctcctttttcttttattgcccctgattctgattctcatatgaagacttgtcgatctaagctcatattttttagataataaaaataatttacatctccgatctctgctataagacacacaaccaataaattttagtacttgaaaataaagccgtaaagtgatgggataaaacccccagctccctttaaacaagtttaactaaaaacatcccaaaatcatagactactagtagattctagcacgtcatacagtaggtactacctcatccaaaatagaataaaaaccccttggctaccgattctaaaaatatagcaccactacacaatactaggatgatttaagttcatgtaggtgcatacatgctattgggaatggatttggctataagttgtaggcgtgggattgtggtggattggttctttttccgcaattagttttgtcgggtattatgcttttccgatttaaggtagaggtaggattggagatggattaatccttattttaccgctcatcgtatgctttttccggtttaagttggaccatgaaagaggaattgaatctttttgtgacttggtttcgaatttcagggtggttggagcattatgttggggtggaagggaaactacttccccaacgaaaagcggcgacacctttatcttgtacttgatgactggtcacggggatacagcattcgcaagatcgatttgtcggttggcaatgacggtgatggggagcacagcatgccaccggccatattcagtttcgaggcaccccgtgctggtcccaagtactttgctggtgcctttgactccaagattttggcaatgcagcccgtggatccccagttcagcttcaatcccatggctggtatccctatctatgacgttcgcatgcggagcctggtggttggccctcggcaaaggccggatccagttgaccccatctacatccctgttggtggaaggctctttgctctctctgtcggttcatttcagctgctctacccgccgccagatgacgagtctgatgatcaagaggaggaggaggactttgtatgggggtggcacgctcttcctaatcctccattccagcatgagcatgtcacctcctacgctgtgcacagggatgggcgaactatctttgtcagcattggcggtgagtcctctgccacctttagctttgacacagcggagtctgtgaggaatggttgtatgtggaagaaccatggccagtggcagctgccgttctccggtcgtgcttacttcatcgctgagttggacgcctgggttgggctcagcagaaaacctggcaccaccaccagttggcgcatatgctcaatggatgtgatatctgacgattgcgagaatggccaggcggtgaaatacaccagggaggaactagctactactgtgtctgatcatgagttggtcacgggtgtcaccctcgttagcatgggtggtggaagcaaattctgcgtcgtggagtgctgcctggatcactcagtctcggtgccgtttattcaattggtgacattttctatgatgtatggtaagaatggagaacttacgactggcaatagccgccaatttcgagagtacaaaaacattcctcaaggagttagtagtgaaatgcttgagaatcctgtggcattctggatgtagagaccttgataatgttttatactggtaccctagcgtgtctggaactctgaatccatgctactttataagagcaagtttaatagtgtagccaaatactagctccaaatcatttatagtcaatttaatagccaatagttacgtataaacatatactacactattgatatctggtctcacctgtcatacacacattgcgtcttgcagttcgtgctgcagatggctataaatatgtagcccgttgctcttctctctattcttttatcttctcgatatatgtttatagctaagttataatcagctattgtacttgctctaaatctgaggaaatttaactatttgccactcttgtgacatggcaattaacgatttgccacaccgtgtttatgacatgtgggccctcatgtgtctatgacatgtaggtctagtggcaaatcgttaagcaccactcgtaagagtggcaaatagttaaaagccccctaaatctgcatctctatctctactttatttagttaaaaaatgaaacatgtttgcatcatccgccaccgtatgcttgagtcatttgattttgcttcgtgttcaccttgcgcgtccacaacctccatccgattcttatcaatcaaaaagaaaacaggcataatcgcacccctaatcgcaccatcgagtagagaggggacggcacaagctggtggactcgcacccctaatcgccagtaacttccagcaaacgggcatatcatcatacagacagaaaataactcaaaaagaaatatgcatcttttgctgcaaaatttcaacatattaggaaatgctagcacagatatgatgtaaaattcagattaggctgagttgtactaccaaaataatatttcttttttttcttacaaaatttccaggctgtggtactcacatggtgcagcacttatttcaaccaagagaaggaaaacagcagctaatagtgtatcaccgtgttcaagctacaatagatgcaaaaaggggatcagagaatgccagtcagcgctatgatacaagtttgctggcttcctgtcatgggtttcctttccgtggataccgctacaaaaaaaaattgtccgcccagtgtaaatcagctgctcggaagtagagaagtccctctgagaatgcctgcaacataagctagataagagattatgatgacgctgaaccaatgcacattccgtggatgcttacaatgaaagatatctgaatacagatttgaacttatgtgattctgcctaacaaagcaaataaatataggtccgaaatatcctcccacattaacaacaaaatattcagtattcaaacaagtagatagaattccagcaaaaagagggggagagaggggatagaagccattcaattagtcaaagatgtcacttgactgaattttgctacatcttggcatgtgaaacaaccataaatcaacactacatttgaactatactgggcagtgggaacaagatattattgtgaagtaaacaagttatggacaatactatcattgctccacgatcaaatgtgcattgcaaagaccaagagcaagtgccagtgtaaatggactgtacttacctcctatctgtactagttctgagtaacaaccttatctttagattctacctggaatgcagaagggataacatgtaagcacaatataaacaaatagctacaggcaattctagttgaaaatggatagttttaagaaaatactatcattgtttaaagggtattatcctgcacctcatctgttgtgcttctccgaacttttctagttgcatttctcattgtgacaaattcctctgcagatgttgggtgaatgccaatagtggcatcaaaatcttgctttgtcagcccagctttaacagcaattgcaactccctgtcaaaatgtagtaaattcatcagcagtatgtcaggaataaagctgaaatggagagtaagaatataaaacaatgcagacctgaattatctcaggtgcgtcttcaccacacatgtgtactcctacaactttgtttgttgtagcacacacaatgagtttcatgaaaatgcgatcaggtaatccagagagagttgccctaagtggcctgaagtttgctgtatagatatcaacatctccatactcctcaatagcctgcacaaaatacaaatttaattgactttcttttgtgcatcactttatatagatgcgcgtcgtatgctatacctgctcttcagtaagaccaacttgtccgatgggtggttgggagaaaacggcagatggtacagctctgtcaaatttgtgcaattcacaatcaaggagcatccaatggaacaacaataaccaaaaccaaataaaatttaactgataaacagtgaaatactgaaatgaatcaataatttcagtacaaagtcagtcatggcctcctaggagcttcaaggactactagaacacatcacaaaaacaagaacatcacgacaaatgatcaataacaagataattctagataagcaagaaatcatccaaactaatctgtattagcatatcaaacatggaagtggaagaatggggtatttactcctcaaaatgttccactagagattactgcaagcataaaaatacacaggaatactagcatgtttaaacaaggaaatagaggttatatctgcaatcaagctattcaagcccatctcctgcaaattatacattaggatgtgaccaagtaacaaagttctctaatgaaatgcaacagagatacccgttcactgtcaaaaatatgcagctcaagtgtacactgtacagcaacaacaaacattccctcaaacatgcgatgtaactgaggtattcttgatagggatatcctacatacctgtaatctggtttggtaggttcatcaccaaacactgtttttgcaaatgcaccaccttccataagtgcaactggtgtcaggttgaccctatcagtaacatctcccactgcccaaattgaatcaactgaggttcgagaatactcatcaacctagcaaacataaatacagtgcagaagctcaacatgttaaagagtcgcaaagctgagaaactcgaagtcaagtatcacttgattgattgcttaacctaccattattgctccgttcttgtccaatttcaccccaacctcctctagtccaaggttctacaagttaaagaacaacatcagcaacaaaggatggatgcatcaacaaatggagatgcaagatctaacaaagtgaaaacaaaaggcgcatatggtgcagacctttgtgtttggtttacgacctgttgcgaacataacatgtgagaacccaccaatagtttctttgtttgtcttcagagatagcaaaccatcatttgatttggttatagcttgaggactctgttcagtatgaaatgtgatgccccttagagacatctgttcagcgatgaaatctctgacctgcaaatccacaaccgacaaaaataactccagtgaacagatcacttcatctactgtgaatatgattttgttgttcccaatatttgctcacctcttcatcaaaccctcttaaaactttcttctgccgaataaacacatgtacctcactttttaagccattgaaaattccagcaaactccagagcaatatatccacctcccactattgcaattttctcaggttttgaaggtagatccagtgcagcatcagaatctataacatgctctattcctgggatatttggcatcgatggtcgcccaccaacagctataagtatgttcctagcagtgtagagctttccatctacacttacagtatgtggatcaactatctgtactaagtaaacaaagttacatcaacagctgcaccttaccatagtatttgtttagggaaacagtctattcaaagtttaacttgatttacgaacatcacccaacctttccacggccttcaattagagtaactcctgagttgtttaaaatattcttgtaaatgccaacaaggcgctgcagctctgtatttttgttggcaatcagagtgttccagtcatgctttggatcagtttcatacacccacccaaagccatgagactcttcaaactcatgagagtacttggatccatacactaataatttctttggaacacacccacgaagcacacatctgtgacaaaaacaaataacagttcttatgcatatgcatatccttctaggcactggtattacagcaaggtggtagctattaaaagcatgcccatcttttaggcttcatatgctggtatgttatgccaaactgcttacatattattggaaatctattgtctaatattgtacagggtcattaaaacgcatgggtttagctctggtattcataatgattcaaattgtaaatcccagtaaatactgaaataagccacattatgccggtatagcagcgcaaatcgtgcattggagtcattgcgttgtatacattcaaacaatttcttcaataatactgaataagaaaccatataaaaccttgaaacttggtgagagcggtaaaggcaacaaatggtgcaaatgtaaattacttaaaagtactaataataacaaacaagtgcatatcactggaaacacacattccccaccagatttgtgcctctaacccctaaaatgagcaaacaccactgagataacagcccgtgaggatgttctcactcaaaagtaccccgttcaaatgcagtatatgatagtgagtaacaatgtacccaaccacaaaaattctctagaatgtagtaacaaaaatgagttagcgaagccattcctatcacaaaaacatcacagaacaaaacatcagcaaagatggaacccgcgacaaaattggaaatgattcctggctagtcattcacaaatcacaaggaagcgctccaattacggtgcatgcaaaaaagtaaagccaaaagccaacgatgctaagttgctaaccttcctacgaatcaaggggaaaatgtgatgaactaatagactagtctatatagtagcaagagaagcgtccacttacgtgccgccgactccaccgaggtcgtccgaggcgacggtggcgaagggcatctcgcagacggcggcgcgggcgccgtagagcgtggaggcgaagcgcgaggcccggaccccgccgctcccggcgccgatggtgaagaggtcgtagtcgtactccccctcggaggacgcgccgttgggcgccgcggacgccgagacgtggcggcgcgcgtgggggaggaggggaggtcgcgggagcgggagcctcgggagggcagcgagggaggggaggtggtggaggaagcggcggcggtggaggcggaggcggagggggatggtgcgggttagggtttggagggtggaggagcaggagaaggggagggtcgcggtcgtcgccatgcctctctcgcgcggtgccgccgctttgcttccgacttccgacagtgtggggcggagagaggagaagcgaaggcgatgatgtgtggagagtggagacgatgagcttgtttgattcctttttccgatcgaaggcgtatttgccactttacgtattcgaagagtggagctgtaaagcctgtatgactgaaggcgtcattccggacgatggtgaatagtttgaggctttgggcctgtttgcggaggttctgctgctggaaattctcctattagctgctactgctagaagcttcctaaacagtaaagattttcacttataagctgttactgctagaagcttcccaaacagtaaggattttcactcagattctgagaagctgtagatgtagaatctagaaaataaactagaagcttctcacaaactgtttctcagaatcttaacctcctctaaatagggtctttgagcacttgtttgaatatggagattttaggaacactgttggtttgccttaattatttgattggaagcaagccgccatgtttcagtcatctctccttttaaaatcctgcaaattcctatggagtatctaaacagctcattttctcaattactgatcccaaataaccatttttttacccgcaagaaaaaactttttttccattacacagcagacgcacaccttaaacttgctattttttttttattgaaagcatgtttacatgtatgtaatatctatagaaaccaaggttaaatattttaatggttggagtcatacaccatccatcatacaccactggtgctttccccaaaggaccttactgatcccaaatgacccattgtggagtcagattggcaaaggctacaccatactgaaatctctgaaacatcctctttctgtttacaaagataacacagcgaaactgtgcagattctctgtccctccacctccaatcaagtcctcttcaacagatgcgtgacaatccacaatttcgcacaacattggtactatcttgtttcgtgaaggagcaaaggacccgcttaacagccaacagaacgtaacaacagcaaaagttagaaaaccaccatccactttcatagtatcatcaagaaacgatgtaccaacagaaggccagcaaaacatacgccgtcacagccagcaccgcgaagaacgcggtgtccgatatcggcgtctgcgtcttcttcctgctggccctcgcctccttgtacaggactacgtccaccatcatccggctgaggtagttctccgacgacggatcgacgtcctgcttgcaccgccttctcagggagagctcaggctgggcaggggtgaactggacgtcgaagatactcctcttacgcagcaattccgtgtcatggtgatccgaattcagagcgtccatgaaggcagcgtagttggccacatgggacgtggtgccctggtagcatttctcgaacgcgatcaggttctgcagcagctggatgctggcatcgctgacctccagctgagggatccgcaccttgccatggctgaagacgatgtcaaggaaggtgaagggctcctggaaatggctcaacggccaccaataccattgctgcctcctggtgatgcgaaccccatcggtgtcaagcttcttggcaggatcaatgccggttcttggtggctttggtggtgtcttcatcagatcactgtgtagctttggatttggaaggagtgaccggtagagcagctgcagaaggcagcgcacgtcctggcagcggattgggcgtgttgatgtgcacattccagctggcaggtacttgttgaacatgttcctcgcgcatgccgtcaggtcaacagctttgtcatgctccgtcttcagaatgtcaaacaggatcctgacagcgacgaaaggtatttggttctctagcaggagcatgtcgatggcgaccaggctccattcccagggtctctcccactggagtgtctcgtactcatgatcgagaagcccagcatccagctttgtccagtattcatgctccgcacctttgttcgggtcatgcctcagcaagaaatgcagaatgaagcagccgtcaaacagcagcatcatgccgattccctcctctgtcatatcaactggttttgcgtatagctgctggaaagactttgttttgattgtctttgacagtctaagcaggaaggcctgaaccaaaggttcaaggctgtggttgctacgctccagcaatctgttgacacaccagtgcttatgttgttccattcgcctgaagcttggtgaatttctccctgaatggaagtagggaccgatgcagacagccttaggatggtaagcctctgggtcgcgcaaccgagtttcttcagggatacgggtgataccattttcatatgaagaacacagcggtacttcacagctccggggagttgttaagcctgaagtttcatcggtatccccatttgcactcgctgtcatcttcctcatccttgtgttctgccctgcatgcatgaatgtacagatgcaagtaattacaggtgagaaataaggaaaaaccgaagacaacaaagaactcacctcttggttgctctggagaagacatctcatgaagccaaatcagaagatttcccgtagttgatggtgcacgaagaaacaatctgaagaaaacttttagtagtgatggagaagaatgtctcctacaaacaacaagaaggttgcctcccacttgatcaaatcaaactcaaaagaatagttatatatggttttattcaatagtcaaaaggcaacatcaaagaactttcctttccatttctttatgcaagattgctacatcagacaagttgactatgtgaatcaactatgtttacaataaacagaaaagattctgcagtttagctgcagataaataaaagaaaagctcaaaaggttctacagctattaaggcatatatgatattttactaaatggcctttatgactttttttttatttccctttgaacccaggggaaagaatgattaacatctaacgtgatacaagacctcatcataatagatgaagctactgaaatttcagcagaacatcaagctggaaattttatgtggaagtgtctccaccccttacaactggctgttcaccttcaaactcagatatcacaatgagttgatctgtcatttcaaaagaaagtagctccaacttgttcgtaggatttatatactgcatggcatacaaaatataaattagttggtggttattaacaacacttgattcatggactgctattcacaacgccaaaagaacctcatgtcaatacaaatcaggtccataaagctagatggcaaagttaagaaggacctgatcttaacaaggtcttatgtacttcgaaaatatcacacccttataaggctacagaataacatagagaatcttaacctgcttcttgcccttgacatagccaaccgcaacttcacgacgcaaaatcgccctttcagtgagctctgaaaatgatatcttctccccttctttcatgtagaatcctatttcctagaaaatgtgcagcaaaaaagttccttgaactatcacaaaaatacaagaattggtcagaaacaccgattgtgctcatattaccttgatgtagatctcatctccttcagcgttcagaatatccttccatacttcattcaactcactacttcccgcaactacatcacattttcttttatcatgcgatagatttcagagaaaataaaataaccaagattgattaaaaaaaaaactaaccctgtgctgttacaaggctcataacttcctctgctccaataaatgagagggatggttttattctagacatctgcaaaaaatgaaaggctaaaagatttgcttccaaattaaagtaatttgatgaatttagtaatagccaacaagcgaattctcacttgctttcccagtcccgtgtctacaatttctgatacaagatgctcaacctgtaggaacacattcagataaaatacaaaattcaattatattttattatttataagaaaactattgaacgagatgactagttgaaccacatcatattcaagaagaaaacaaaatagcattgaaccattcatattttattgaaccattagtaatgcaaaacaacaggataatgattttatggattttagacaaagtgtatcacagtattccaaaaggaaatgtgttgcatgctgatgagagaatggaggttcacttagtgtgtttcaagcactataaataatgggaacttgagaagaactgaccttaatgtcatgtttctggcaaatgttttcagcaaggagaagagtatacgctaactgtttatcaacctgtgcagtatctgcagaatccattagcaggtgaacttcaattttatatataacagggaaatagcatggttctgttactggcatgtaacccatacctccacctagccagtctttgtcagatattacgacaactgaaaacggaacattttggtcatgcttcctggatttcttaaatttaattattgcttcctttagagtatcatagttcataggacatcccacctgcattaatgctatcgcataaaaattagcgaataacaatagtagagttatttttctgcctgtgcaagcatattatcagtggacatcagaggttactattcacatagagggtttaagagacctgatggttaactttaatatttttcagttgtttctgcatgagggggttgacaatactgctccgctctttaataggggtttctgacaatatttcctgcacatcaaagttaacttattagacatgaacatacgtatggatgtggcaatgtagtcataaactcctcattttctactgcagctaatatttttatcgttcctattatccctacacataccaatacactgccaggtccaaggtaattatcatattcccgaatcatatcagtaacttttggccgccaaccaacaataagcacgtgctctcttggtcctagcgtgtaatcattgctctgcatacagtcaaccacttatgaacccagtaatctgacggagaggggatggatttccattggtacatcattacactagcatttaccttggagagcgtttttgaggggcgctttctgatgctatttagccgtgtttcattcacctcaagagccatactagacgatctttgtccctctgttgactctgagtaatgacttgaattttgtgctccatttggagaatttgagaatgtagactgtgctcttctcctccaggaaacaggagcaataagtagtagctgtgaattaaaggaatcaagaatgtatgacatcatcagctacaaaactcaattgtcaagtactatgttctcctgattgatgatataactggaaatcacaaccgcattatctcttgtagggaatgcaggtaattccagtggaccttttagaagaaaaatgcctactagtaaaatattcagaaactaacagatacttaaacttatgctaactttagtaattaacaagataagaacctaatcagtatctatttaacagaacaatggaataagctcactttggtaatggcttaggacggtggttagaagggctttaagacttcaatgaaaagataattcttctggaataatatgttgagaaatgttttctactagttgtcctaacatgaaaaggaaaacaacaacaaaagaaagaaaaacttactttgtctttctctgtcagcacttcatcctcacatgggtgaaagtgcatcattccagatcggaaaataccacaaacaactgcctggtcatgaacacaaagcagagaaatcacgaaaatgaagtcatacagatctgcagagtttagacatccacttatttgaagtaatattacatctgggatcctacgcctcacatccacatacttcatgcctactacttcccgaaagctgaaaaggttgaagacgttttctgcatgataagaacaacataa

SEQ ID NO: 7909 - DNA, 19435 bp, Oryza sativa
ctgcagcccggtcactcatatggtatatttagtgtatacaataagcactagagatattcacacctgatctcctgcatttggaccatctttgtggaaaagcataggtcgacaccatttgtcttcattcatcaggctagaattctgaaaatgagcaatcaaagcactccttccttgaatccgggcgtatgcgagcgacgccaccttttcactattgaatttctcccatttcttgccattaaatgtctgcagcaaatgtcaagtccaattaatcctatgcatactttcaattagaaaatgccaggggaaaactggcagtactctacagggcagaaatactttttaaaaaatcttcctcccacaaaaaagaatgcaacacaataataaaaatactgttatatcatatgctatgcttagatcttggaaggtacattaaaaacggagaagcttaactagtaatgcatgcatgatatgtataccttatagaatgggattatgtgctgcggatcagtcatattgataaaagcataccccacattacatttgttctgagaaaagtgaacattgcaaaagtcagtcctgaaattgtactcacagttgcaatcttttacactaagaaaaaaaaagtagaccttaaaatcaattgggagatagatgaaatcgtaggttccacggtggttctcatcaatgacagccaaaagcagcttacagttgtacctgtggatcacatcaagtatgacttgagtcaacagaagaaaaaaaagatacctgagtaatgtgcaagacagctggcaaccggtggcaagatgtgcagaacctacttgtttggtatgttcttgatcatcagggtggtgcgtgaatcttcaccctttgctatgcgatcaatgtcaagctcaaattgccgtttgttttcagactgtgcaggatttccatcatgtctgcgactcctcatccgatcattagtagcatcgtatgaagtggaaacatggatcataggattccgaccattgattgcattgcacatttgctgaagggattgaaatccaccgccaactggggagaacaaggcctccctaaaatttcctctgctggatgcaaaggcagataattctgatggatataactgagggctaccatgcaaacctatgcttccgagagatcctggatgaaaagagtgcacatttccaaaactgcctccattgtcaggagctgaacccaagtgatgctggtccatgggataagaacctgtgttcagcatgtgaggcggcacaccaggataactatgcacgtgcattgggtgctgcaagttcgaccacagtattggagctgagggactttgtggaaaaacatttgtgtggttccaggtgtagtgatatccatgaagggggcaacttccaatttcagtaaagccaaatgctgcaaaaaacaatttctgtgctgatgaaattctaacaaaaaaaatcattaagctggtcaattcatcaactacatcatccaatatttccaaaaaggttcaccattatgttgttatgataataaaaacataggttagtaaagccaacaatgagcagttgaagctgagaactgttaccttcattattttgatcaaaagaatgaccgcaaaaaccagcagggcccactttttggatattgtgatccactccgtcttgtctagagctagcattcctaccacttactgtcatggacttagagttattacaaatgcggttgtgatgctctggcaatgagcgtgggtggagggtttgtattccacgtccaaagtttccttgaccaaagtccactaagatcgccaacagaggcttgattattgtgctgaagtgtagatttaattctgataggtgaagataaaatttgaggaccagtcgtagagatgcactgggttgggctctccaattgttggttaactggagaaaataaattatgaacagtgctgttgtcctgacatttggtgcccaactttcctgttttggcatgaaaaagggcaaaataagtaatgatcaacaatttccaaaatatatccaagtaatatattgtaccaatggtcccaggtgaagagtttttaggttggtgaggcaaactgtcttgcttccattctctagaatgttgctgcctcaagctgttaagtacataaataaaatcttcaccacactaatcaaataacgcttaaaaaaaagttacacgcccagttggtttgtccctaatgaaaatttaaaaggttcaagtgattgacatagagttgatatttggctgttccacaaaatgaaagaacgaccaataggtgtgttagtggctgcaaagctatgagaaaaaccgtgaatgagaacttgagatacattccttgcatctaggagtatttgcataattttacctaagaaaacagtgaacatattttattatgatattatcccatctcccaaaggtaactaacatactaaacctatagtatgaaggaaggcaacgatagctagcacgagtatgaaaagataataccaaaaacgggtagaaaaaaattcagccaagcaaattaccaagatcctgcctctccatgttggctaagttcaaccttgaactttgggcctgaaattccacccttattaaggtcatgtagtgcttcttctgctgctctaacatcatagaactctacaaacttcttggtgcagcttataggagagctggaaatctataaacaacaaatgattaccatagtgtgtggatttcagttttgtagtcaattactcaattatggcagtatagctacctcctttacatcaccataaacactgagcatttggagaagatcatcattggagatggaagaatcaatgttagataccaccaacattcccttatcaatatccttgcctggaacattttcctagcaaagtacgcgacatgacagcatcagatattaagtgtttatctattgaactcataaagtggcatgcagacagatttagagcaaatatatagcatgttagaagtagcgcaattaccggaacgactgcgtgtctcagtactatgtaacaacagcatttaattttcaaaacatagaatataaatgattattgcatgctaaaaggaacaaaaaccaataaataaacaaggggcaccagtaaaagtaatagcatgattttgtagcaagttagaatgaaaaatgaaacagaacaacattgcccaagtaacaaatggcatgataaggaagatatatagattaggtagcatgcctaattcaaaactactgatattattatgcataccttaggaaaagaaaattgcacatcaagtttcatcagccccagaggcttgctatgcagcgctctcattgcattttgggctgctcttatgtcataataagaaacagttacaaacccatggtgcttgaaggaggtatagagcatgcgaatgtccccgtattgctgaaagatatatatgtgtgtatataggttcaaaaggatattgtttactaaactaaaaccaaaatttgaaatgaaataaggaaaaggttcaatacctgaaacagaaccgtcagatcagaatcctcgatgttagcagtaatatttctgactacaagagttcgggaaggttgtttattgatggagtgtcctgaagaaatttggctcttgaaggatccatcctgaactttgtcaccttttacggaatcattgttttcaagttccattcctcctccagtgcagaatatatcttcatcggcatcatcctggttggtcgacatgccagtaaattcaaatccatcggcaatacctgatattaaatcatcatcatcatcaggaaggagatctccaatagtttgagcttctatcgcttccatggactctagaggttcatcactgtcgtagatggaggtatgtgtcccagtagattgacaaagaacaccacttactatttctctcgctgcagaacatcatgaactcttagaaaagattaatcttcaatgaacaatattgtggtttctttcaaaaacagtacttttggttgtagtgcaactaagatgataaaattctactatcaacatggcttgtaggggaaaaaaagaaggcaaagggaactcacatttgccactgaatacttcagagagggagctggatgaaagtcccttcccataaccaggcacatgttgatcagcagtagttggttcaacaaaagctgtttctcttgtagacaagccaagcctcgatatggggtttgtgaggatctcaccccaagaaagtgacggtgaacctgaagcattttcttgccgcatcaaattgctgaggctaaggatgtccaggcccttgaaggcttgacctcctggagtttccggatctcctgcatgatttgctccattgggttggatcttttcaagtggagaagcaaaaactgacttgctccctgccattaatgatcacagtcagttcctgaagaactatttaacctatcaccatattacaaccttcaatacatgtatcatatgataaattgatcatttaatatcgaactgtgctaaattaactgtccaactagttcctaccaaactgtcttgggacaaaattccgtaagcattctcccacaagtaaagttcctactcattccctgctgaactgtttcagggatatctttacctaccaaaattggatacttgatcacttttagccaaccagtgcagtatctagtctaaacaggaaatccctggcagtaaataatctgaactaataaaatgatacaacagcctaaaaattctggttttataggttatagttagttagttaaattggtggcaaagaacgggcgggaagtgaccacaataacaagcaatcaccaatatctcccataaacatgaaagatgagttcccgaactgttctttcaagcataagttgggtaaggcaagtcaggtatgatctatttaggagattactattaacaagaatacagaagagagcaccaatctgaataatttccatcatgtaagaagcaacaaccatgagataataattttcaaatgaagcatgatccacacctttgtgatccaccattgactctgaattccaaaatccaacttgcctctgcaatgaagcatggaagggaaaataattgaggtgctacagtcttgcagaataaaaagaaatcagtggcaggcaggatggttttctggtttgtttattactagtacctctgtagggacaaggtcctgagagaagaatgaagatgaggagtcgtctgaagttggggtgaatggcgacaggtgcctcctgtcaatggctccagaagctatcaccataggtgcaatggaagagcccttttttttttcctgccttgggtcactttgggattcctgtttttgtggtttcttcaccgcctcaatctctcaaacttttggcccctttcatcaacttcctgcacaaggacaggagagattagcaacaggacacccaaaagaaagagagaagatgtgtgcccctcaagggttagggattagaggagagcaactacacatgtacaaaaagatggcccattccaacaaggagaaaatatatttctcttaaaccagcagaggataaactgaatcgagccaaaagagaaggaaaaaaaaaggcagggtaaaaatgagaaaccagctccttctttattaatgaaaaagaggcagccctcctgccctcttattcgaaaaaaaaaagagaaaccagcaggtggtgaggcaagaagaggtggtggtgatctcataataaaacttgtgtaagaaaaagatgtgacgattaagctgaagcctctagaaattttggcatgaggggaggaaaggacgactcagctcacctgaagcagcagcagcaaagaaatgaagaggttgcaggaggtggaaagggagagagaagattaatggcaaaatgcagtagtaacagggagggaaaggaagcagagcagaggtggttggggttgggattggattggattggggtttgcttatatgaaagaaatggttgcttgctgaaaatgcaagttgcttctcggtgagcgtaaggcagcgattccaaagaaaagaagcaaggacatggagatggaaatggacattagcttagcttaactagttggagaagagagagagaggcggggaaccctggccaggggcttcatctccttcttcccccgcactgcaagcaaacaagagacgagaaccgcccctggccctccaaaataatattaatagaaaaaaacaaatcttttttcgcgttgccttgccgccgcacgcaaacaaacaataacgcaaacaacaaggcgagcagcaggagtactagcctagtttgccactactctcctcttctcttcttcccttgttcgggtcgggcacgcgggagaggaaagaggaagaagaagaagaagaagaagagaccaacctccatccatgccatccgtagagcaatcaataatagagccatgccatatcatagaataggaagaggggagagcagagcgacagacacgaggaggaagaccacataccaacacaacgacacgagagtactagatgctctcttgagtaccactgtccgtaagacagacacacaatgacaacacacaacgtacacaagagctagagggaggcgagaggagaaaacaattgttggacctggattccccataccgtatgctcttgtagaatttttggaaacttcttgtgcatctaaaatagagtgatatattagcacataattaattaaataattattatattaaaaaacttgaaaatagattaatagtttttaaagaagctttactatatatatatatatatatatatatatatatatatatatatatatatatatatatatattaagaaaacacattattagttgtttggaaaacgttagcgtgaaaaatgaggagtagaaattagaaaagtgtagtgacgaatgcacccggctagctctacgtggtcgtctcaaaatgtcaggagttttaagattgaaagaaagttaatggaattaaatggggagtattatgattggttgagaagatgagatgtataaagagatagtgagatatgtcatagtgaaccaacaaaataattattagggttgtgtattagaggtaatgtattatacatgttgcctcttaattattaagtagatgacatggttaagattagaggtggtagtcacatctactataaaacttgctctaagacaattattccttacctttacacacattttgatgtagtgatgattaaaagtgaacttattaaataaataaaataaggtaaagataaatttattttagggcggagggaattgaataaggaattgggagagcaaagtgcaatgcaggaggcgtaacctctcccgttcacgcgagacggttgtcatcacctcccgtgtcctgcctaatagtgatattaatataaatttgaaaatactctttaaaaatctatagaaaagttattttaaaaaatcatattaatctattttcaatttcaaaataattaatatttaacacgctaatttatcaccttgtttagtgtatcttatcgattttctcatttcctctcttttcaaacgctctctaagttggcgttatacacttatcttcatggtatataactcctactttattagtggtagttgatataatatggtatttcctcgatcccaaaatacaacttctgcatttttaattttgttcaaaatataacaacctaatatttgtatgaagtgacatttaacactaaactacctatagtacttttggtattatttaaaccctaactatttaggtctatatataatccatcctgagaagataattttatttaaccctctctttaatggaaacatatcctactcacattgtttttttttaaaaaaacatatcctatgtatactagcctcccatgtacaccaactagcaattgtcacagaaaattctacaaaaaattggacacatacttccaatagtattacacttacatgtgaaatcttatctttaaattcattatattttagccgtaataaaaaagacaaaatcctgacagatttttacctgtaaaactgttagatttttcactttttttgttacggctaaaatataatgaatttgaatatgagactttgcatatatgtgtaatactattagtagtaaatgccttttttatagaatttttcgtgatatttgctagttagtgtgtatgaagtgtgtacgggaggtttttgtgcataaaatatatgatcccctcttttatatccgcgtcgaaagtaaaattttgttatatttaactctttaatatccacatcgaaagttaaattttgttatattttgagatggtgcaacggccgtgtcacatccattgaaggttagatggaggagtataggaggcagcagcagcatattgatggcgaacatatctttatcttaaacatgtggatattggccattgattactccaaaagaaataatctcttcgaaaatcacgtgtccacatcacgtgtatcttatgcttccgcaaacaactaaaccactactattaccttataataataataataataataataataataataataataataataataataactactactccttccgtttcagtttgtaagatgttttgactttggtaaaatcagactacttcaaatttgattaaatttatagaacataataataatattttcaactcaacacaaatttattatgaaaatatgttcgattgttgatttaataaaattaatttggtattataaatattactatatttatacataaacttagttaaatttaaagtagtttaagtttgaccaaaatcaaaacttcttatgatgattgatacgatacagtatctttctctctgtgttctcgagctagctatagctgacttgcatgatagagtaatgttgatgtcatgtacttactgattgattcatggttggcacgtactagatgctatggattttgtctactgtcttgagcgtgtatatggatatatatatagagagagagaccagtagtatcttgagattttggatccaaattctatcattaaaggaaaaatccgaaaatgtaagatagtaattgctgctgtagctaactagtaacatcctgcgacgcgacgcgtgcatgtttgttcgtactacagtcttccaacagaagctttgttgtttttccttcctcctaggtagtactccatccgttccaatatgtatcaatctagaatgagaaatagatctaatcccatgctagattgctacatattgagatggaggggatagtatggtagaagcagcaacaataatacatacaacacaacatgatctgcgtatggcacgtaacaatacatacatacatacatgtgacggcttaacggcgtagaagtggcttcggctcactatgttagagccacaccacctcatgacacatgcagtcttctttctcctttcacacggtttgttgacgagacagtaaaagagagaaaaaaagaggtcaaggaggcctcctccatcgctcgggtctggcggctccattcccgatctcctcctcacctcctctgcagattcggtggcattggtagcggatgtgctgatgcggtgtcctcgacaacagcgactgcgtgtggtacgtgagggaccaggcatggcgggggtggggtgagctttccaggatcgatgctttggatgctatgctgcttttctagttttttcgaggcaaggaactcgcgtcttacctgagggacgagagcctatgcaaaggtaatagggcccacaccctccctcctccacggcatcacgcaagtggggtggaggcatgaagcaactcgccccgcgtggtccactgtgaaaggccataaaatgtaggtcacacatagatttgtcctaagacgacaccggactacctaggaaagccacaaagtacatagattagtactcctaccgttattactaattattttattttatctattttccattaagcatcctctccacgttgttaatttgaatatattcggctgggattttttttatttactatgacttataaaccttgacacgggactaaagcaataataacaataagacatggcttttattaatggtgaaattggtgttggtaattccggaccaaccggctacgtaccgttctgatttcatttaggagtaccttttcttttttccaattgaaccatctgacaatggttatcaacaaaaacaggtgaaaatagtaaaaaaaaaagaaagcaaatagaaacacaaatgatttttctgccccaccgactgtttgtttggtttaccatattttcacaaaaattgttgtttttataatacggtaaattactttatttcttttttttgactggaataatttcattccattataaccttggtggggcagaatcaccatcaaccaaaattctaaatacctagtacatgtccatctccatttgtccatacatagaggccgttcgtattttacgagaattactaattaattttccgaccgatactgcatatgtttccatttgaacagttatattttctttgttttctgatatttttcattcatttgaatagttgagattgttttgttcacatcaacccacatgaatgtgaacatctatcatcgtattaataattacacgtctttcggcaaacacataaagtcaaattgatcttataaggctgtgattgcaatcccattttcccgatccctctccctcattttccgctcgcacgcttttcaaactactaaacagtgaattttttataaaaaatttctatacaaaagttatttaaaaaaaatcatattgatccattttttttaaaaaaatagcaaatacttaattaatcacgtgctaatggatcactccgttttccgtgcggggagtttagttcccaacttcctatatccgaacacagcctaaatgaagaaagaaataagctctccatcggcctttaatttaattacttcccatatccgaacacagcctaaatgaagaaagaaataagctctccatcggcctttaatttaattagaatttctttctccattgcgtgtccgtccacgcacgcaagggaccagtttaatctcattagtttcccgaatacaaatatgtatatatacttagattagattagagggaaggcgaactagctacatgcaacggattgggtagcatattattttgtgatcgatgcgtagagtaattaattaaataaattccactaactttatacatatagttaattagagtagcaggccagccgccgtagttttccagtgaagtcaggaattatatcgatggatcctatactgcggcaactaggctaataaagctgaaacgtaaccgagtaaacgaactcttgtcttggattgagctggcatggatgctcgctcatggagtaacaacaattaatcgcctcccggccttatgctatatgtttgaagaaaataattatactttaatatgaaggggcaatttcgttcttgctcctgcttcaatgtacactattgattttgcctcagtttttttttcgtttttgcctctaatttttcgaaacgagtcagtcgtttgcccctgttccgttaattcttgctaacggtgttaaatgagggtaaaaatgacaagcatagccttagatatttccccgtacttttgtacaccacttgcacatttgccctattttgagataagccattttgacacgaactttgaacatgttgtaaattgattcttcctatgtttcaaatttgatccaaattttggtaaactttcacaaaaatttgacaaattaaattactgctatagaatggcattgagatatttgtattttgattatgtcaaaagtgcgagaaaatatctaagagtatacctatctttttacccccacatttaacaccgttagccagaattaacggaacagaggcaaacggttgattcgtttcaaaaaaagtggggataaaaacaaaaacctaaaaaaacatgggcaaaatcaatattggacatcaaagtaggggcaagaataaaattgtccctaatatgaacatgtgctctatgtaccgaaacatgattcaagaagattcagaaatagttgcgctactgaatcatgataaaaaaatcagaattttttagaaaggttacgtgtgtatatatattgggtttaatatatatagtataactagtcagtcatttggattgatactaatttttacccaaatcaacagagttgatactactcttccctattatagtaaaaacttactcaaaggtttaacactaccaattagggtttcgaaccaaacatatccttactactaaaagtattgagtaattgatttattttgtaaaacgtgcgcgacccatgtttacaaaagaggtgaatatggtcaatggataacccacataacacacatttgatatgattttgtaatgtcaattcaagatgaactactaattaagttattatacccaccttgcaatttattatattattagttaatttagtagaaaggtactaagaacctgtttagtttgctactactactttcaaatctatcagaatttagtggtactaaacggtgatagaataacaaactaaacatatgtatgctaatgtcattctatcatcatttcgcatttttggaagtttgtccttacgaaaaggctagcaaaatttagtgaggcaatgaatgaaaagacatctagcgatactaaaattaaaatttgataaccctaaaatgtgtcaaactttggcatttcgtgaaaatccttcaatgcgaattttttgtgggaagtttgatttttttttcctttgattgatcatgaggtgggctggggctgagatgggccttaatttgcagtggatcagataggcacacggaccagaataatccaaatcggaggactcgtttctgaaagcattatccctcccacacaaggaggaaatatatatatacatccccgcaaaaaaaaaagaaatatatatatatatatatatatatatatatatatatatatatatatatatatatatatatacagaaagagaaaaaaaaaactttgatctggaaggaagggagagagaaaccgaaacgagtcaaacagaagaaacaaacagacacgtaaggaggagaaatttcccctcccttccctgctcttttcgtactacttgcaaggaggagaaagaagaacacgaggaggaaatccaagccaatcgccgcctccgcctccgattccttccgatgaagaagatcttcggcgccaagaagaaccaggagcccccgcccagcatccaggatgccaccgatcgggtttctttctgtctttcttgtttcgattccatcttcaattctattctattcaattcatccaccaagcaatcgaatgaatcgaatcaaacaaacccgcagatcagcaagaggggcgactccgtggacgacaagatcaagaagctggacgctgagctcgcccgctacaaggaccagatcaagaagaccaggccaggccccgcccaggaggccatcaaggcacgcgccatgagggtcctcaagcagcgcagaatgtatatctccccttttttttttatttcatcatcattacttatcatacttatatactcttagattagattagaagattggttactctacttttgcctaataataataatctctactgcaaccccaaccatccaaccctcacccaaatatcatacatagacaccaaagctgagctcttgcaacctgcccttgtgttgcctatcaaattgttgcactgccttcttccttgtggacaacaacaacacatgaatgaaaaattaaagaactcgccattgatgacattataaaccgttgcatcttgtaccaagtcccggttacgccaatttttacaattcatcgtcttacaagtcatttgagataaaaagaggcataattttgactctgtaaattgtttgtgtcctttcataagcacagagtcttttcctttctaagtgtacttcatcttctttttttggttaagtaccgatgtggttcttcatatatattttgaaagattttcctaagggtagcagttatgttataagaaaaaaagagacttctattttattacttagttaaggaacccaatcatcatttaccattcactctgtatatcttgttgagctcttttgcttctccttcgaattacttactctattacggtactgtgctcatctgtatactgtcttatatatgctttcctgacaggtacgaagggcagcgtgacatgctgtacaaccaaacatataaccttgaccaagttgcttttgcatcagagggacttaaagatgctcagcaaacggtatatagctatagtatactcaagaagttttatttccatgatgttttacatcctgattcccaaacttatgatacaagtgttttcatttgggcagatgactgcaatgaaggcagccaataaagagctgaaaggaatgatgaaaactgtcaagcttgaagatatagatgtacgcagcatctttttgtgtaacatattcgtcatgttttcaagattttctggcttgcaatggattttcgttgtttccctgttttcttctgtttccaattgcatctgaatctagacccatgcttttcttatctgcagagcttgcaagacgagatgatggatcttatggatgtgagcaatgaaatacaggaaactctcggaagaagctacaatgtccctgatgacattgacgaggaagaacttatggggggtatggatcttatttttcagttttcttagattatactggcaccacaaaaatgtttgccttgaagttatgcagtcaacttgttttttctccccacaattctgtccatagtgtagtcagggtttgccatagctgcttactgccgtctaattgaaaataatttccagtttctgatggtgatctggtggattttcttttcaacctaaatttgtatgcgtgttgaggcagaaaacagtctagatgctcatgaattgttatttttttctgaatccatctctttggtactttgctattggtccttcaccagttctgtgttttgcatgtgttgacttaccgaaagcaaagaaacaatgcttgtctgcttgatgtcctgattctttatgtggaaaatgcagagcttgatgctttggaagccgacatggactttgaatcaaattcagtcccctcgtaccttcaaccagataaggaatcagatctagattctgagcttaacttgcctgctgcaccaacgggtcacacacccgccccaccaaaccggcagcaggtacatggactgtgacaatgtttactttcaataagactgcttagaagttcactctaaataattttctttatcttgatgtgaactatttgataggatgcagatttgaagatctttgtacttgtatttattagatttgaattcatttactcactgcagaatttggtacttcatccgtttcataatgtaagactttctagcattatccacattcatatagatgcagcatgaatctatatatataataatgtttagattcattagcatctatatgaatgtaggcaatgttagaaagtcttacattgtgaaacggagggagtagctgataggatagtacaccgtgtaaccgaagtctgtaggggtatagattatattctacagttggtcgacctgccctttatagaccagatattcacaacgtgacggtgatggggggcacataaaaggataatatgaaaaccttttcatgccaaataggtcctttggcttcatttataatgaattcactcagagctttggaaacaaataccccatttaggcatagttaatggattctcttgtgaacaataataataatttgaaagttgcttttatttgttggtgcaggaggacgaattgggattgccgacagtgccacaagcatcgatccgtagttgattggattcgttttgtaaaaacataatgtcgtatgcaataacaaattcagtgtatctttgctcatatactactgcaatttgttaagattggaaatagctttctcattgttttgtttagggtctatatgtaagagcatttgttactttttgaagtacagtgtaaatttaattggctgctggggcatacatatataagtccttattctgtgttggtgatgagctgcccttgcatctcggaacaatggttttgcctgttgcagacctctttctgtccattcacttgtcggcatatgtcatcagactaatctgtttgctggcttgcagttcatgaaggattgctgatatcctgttcagtttggttgctttacctgattcagatatcttgtgtattattactactactccctccgttttataatgtaagtcattttagcatttctcacattcatattgatgttaatgaatctagacagatatatagatatatgtctagattcattaacatcaatatgaatgtggtaaatgctagaatgatttacattgtgaaacggagttcacagagggagtagttacttttctcaaggaagtccagtagactagagagatttgatactagtctgcactgctccagaatttgagcatatatgtataagcgatctatggagtgttgttgggctgatgtatactgaagattgtggcaagaaaagtaaaagcttgattagtgtgactgagtgcattgttattaatgcgtcgagtgtctacaccatttgtctcaaaataagttcacttttaaacatgaatttgaatatatctaaattcatatatatattatacaagtgtttttttataggatgaaaggtgtatgcattactggcgaccggattaacttgcaaatgctttgccttaatttgagctgaatattggctccagctgatgaactcattgtgaatgctatccctactatagtaccaaccctagcagaaaaggattaaacaacattgaattctcagcccaaaaggtgcagcagagcatgcatggcaacatagcactgtagtcctatctacagcggccgtcatacatgtacagatgtactgtacataacatagcttgcagaaaggaagttgcataggagtatgtagttaacctggtcaaggctcaaaactcaaaagacaagcatccgatctgagaattctgaaaggtgctgggtcagcagcagctttgggaaagcaaaatttttttttgatgaatctttccaagtccaatgttcactggctacaagcccagatatggcccttgcttctcctaccattttcatttttcatgtgtccaaataggagtacaagcagcaggtcaggtcagatcaggttgcctaataaaagattccacttttctgtgcatgcacacacacatttgcttttgcatttgcaagctttgaatggatcccagagcagagataaagagagatggtacagtgtacaagagaggactggaggcaggaggccaagtcatatcgatcaggctggcagcatcaagtacacatttgcaaggcatgcatattgcacacacacacatgcacatttctggagtattaaacacatgaaaagggagtagagtatctacagatgcaacacacagaagagggggaggaacagcacagcagcagatgaatgaatgaagcgaaacgcaggaggagcaacagtacatgtcctcgtcttggtactgtctgcatgcagtcttggtgacggtgaaggcagagatatcgatagtgtggattttggagcccaggaggagatggtacagctgagccagcaaccaaaggatccttgcgagatcttcaggaggttcaactctgtcggcttgccccactcttcttcttcagcttgctcacttcacttcacttgttgattcggcatctcctcctctatgtgatgctgcttcgtggccattcctagtttgtacaaatgttactagatagctgcattagtctggtaaatgcaacagttaacacatcatcagtcaccatttgcaaagaacataagctttgcttcttgctaatcaatcatgcttgtatctcaattaccagaatatgcatgggttctactactaatgaaagaagcagtggctgctcatctcgacctggtgaagagagccctgctgctggccttgctctccaacttgcatcaccaccatgttaatgtggctgctgccatcctgcaatgcaaaggtgaagcacagacagcgcatgcatgatcagtgtcacattgccttccttatctgctactcctactactcttgatgagtgcttggtggaataatttgtgttcaacacaggagaagcgacatcacatctgatgcagtcatgcagattgggttcagattcagagagactatggttatcatcttgacctgagcaaagcctgtgggtcctcctcctagtccttggagtgaaatgcctgtactccccatttggcccatgcactgcaccatctcatgtggcatcttgcaagcttaatcaaacaaggaaggtaatactaagtactaagagagtcagagatattgatcgcatgcatggcagaagcaaaactggaatcacagaattcttcagagatgcttgcttgcgtttggattgatgctgtcattgttccctattttactttacctgtcgaagaacatctgggtgcatatcaatgcccggtccaaactcatacatcaaagggctaagggaggcaagcttcatggacagaaactgaatgagcacaaaagaatgaatcagttcttcatatacagagcagaagagccatcgatgatactacgtgctcaattacgctatttcaattcttatctgagtgacatatagcagcacctcaacttggttctgcagagattgcacatagctgatgatctcatctagcatgagggctttccctgtgaccttgtcacaaccaggaaccaggctttgcagcatcttcatcctctcactgatcttctcccttctcacctataagtaacaaatcaacagatgttactactcctgtagttaagtgaagggcactaacaaacagctgttactactaattaagataacaacgattcagataagagaacaaaagactggtgagtgagtgaccctctcagcaaggctgtggctgtctgttgcttggcctctccttgccctcacatgaatgtacccagctggtggctccccacctgctgcctccttggccttcttcttcacatcatcatcatgttgatgtagtaccacccttcttgcctttttctcctcaagtcccttcaagcccacattgctcctcttgtgctttctactcttgccccaacttgcatcctaaatggcaagaccacataaggtagatcattacatgaacacaacataaaatgggcccatcatacatatttggacacttaccaaaggggttaacaacttaaacatcaatgataattctacttgcatcagaaa

SEQ ID NO: 7910 - DNA, 1278 bp, Oryza sativa
gcatctttaagtccctctgatgcaaaagcaacttggtcaaggttatatgtttggttgtacagcatgtcacgctgcccttcgtacctgtcaggaaagcatatataagacagtatacagatgagcacagtaccgtaatagagtaagtaattcgaaggagaagcaaaagagctcaacaagatatacagagtgaatggtaaatgatgattgggttccttaactaagtaataaaatagaagtctctttttttcttataacataactgctacccttaggaaaatctttcaaaatatatatgaagaaccacatcggtacttaaccaaaaaaagaagatgaagtacacttagaaaggaaaagactctgtgcttatgaaaggacacaaacaatttacagagtcaaaattatgcctctttttatctcaaatgacttgtaagacgatgaattgtaaaaattggcgtaaccgggacttggtacaagatgcaacggtttataatgtcatcaatggcgagttctttaatttttcattcatgtgttgttgttgtccacaaggaagaaggcagtgcaacaatttgataggcaacacaagggcaggttgcaagagctcagctttggtgtctatgtatgatatttgggtgagggttggatggttggggttgcagtagagattattattattaggcaaaagtagagtaaccaatcttctaatctaatctaagagtatataagtatgataagtaatgatgatgaaataaaaaaaaaaggggagatatacattctgcgctgcttgaggaccctcatggcgcgtgccttgatggcctcctgggcggggcctggcctggtcttcttgatctggtccttgtagcgggcgagctcagcgtccagcttcttgatcttgtcgtccacggagtcgcccctcttgctgatctgcgggtttgtttgattcgattcattcgattgcttggtggatgaattgaatagaatagaattgaagatggaatcgaaacaagaaagacagaaagaaacccgatcggtggcatcctggatgctgggcgggggctcctggttcttcttggcgccgaagatcttcttcatcggaaggaatcggaggcggaggcggcgattggcttggatttcctcctcgtgttcttctttctcctccttgcaagtagtacgaaaagagcagggaagggaggggaaatttctcctccttacgtgtctgtttgtttcttctgtttgactcgtttcggtttctctctcccttccttccagatcaaagttttt

SEQ ID NO: 7911 - DNA, 755 bp, Oryza sativa
ctttgattgatcatgaggtgggctggggctgagatgggccttaatttgcagtggatcagataggcacacggaccagaataatccaaatcggaggactcgtttctgaaagcattatccctcccacacaaggaggaaatatatatatacatccccgcaaaaaaaaaagaaatatatatatatatatatatatatatatatatatatatatatatatatatatatatatatacagaaagagaaaaaaaaaacttttatctggaaggaagggagagagaaaccgaaacgagtcaaacagaagaaacaaacagacacgtaaggaggagaaatttcccctcccttccctgctcttttcgtactacttgcaaggaggagaaagaagaacacgaggaggaaatccaagccaatcgccgcctccgcctccgattccttccgatgaagaagatcttcggcgccaagaagaaccaggagcccccgcccagcatccaggatgccaccgatcgggtttctttctgtctttcttgtttcgattccatcttcaattctattctattcaattcatccaccaagcaatcgaatgaatcgaatcaaacaaacccgcagatcagcaagaggggcgactccgtggacgacaagatcaagaagctggacgctgagctcgcccgctacaaggaccagatcaagaagaccaggccaggccccgcccaggaggccatcaaggcacgcgccatgagggtcctcaagcagcgcagaatgta

SEQ ID NO: 7912 - DNA, 6215 bp, Oryza sativa
caatcctacattgtttttttacttgaatttgaatatgtttttattcagattaattgtattaggtttaatcacattcaatcctacattgtttttttactacggatgaattactagtctatatcatatcctcctcacaaaagttgggacagggaagtaaaaaagctgtcagtggaatcagagaaattaattcattaaattaatatgcacatctatatatttagagaaaatccaaagaaatgtcattggaagcgttcaatttcaagaaatgccatcaacaagtacatacatgttccatgaaatgttattgtacaagcgattttgtcctagaaatgtcaccgccgttaggttcccatgcatcccgcactattcatcctatatcatttaacggagggttgctaatagaaccctaacagcgatggcattttatggaactcacactggttgatggtatttttttggaattgggagcttgtcagtggtatttcttggattttcacatccatttaaattcaatttcaagaagagcacgtagtacgtttcgctaattattgaattcaaatttttggaattgataacttaagtattttaggttattaattaattataagacgacactccaatacatttaattacaactagggtgctatcctatatatctataaagttcatccccactaaatatagtagtgctaattttctcttctctcataaagccacatcacataaattgtttttagcctttggataattcatcaagggtgtaaattgcatctcttccctaaaaggcacaccatacaactcaaccgtttataacctatggataattgataaaaattaaaaaaaataaacatatgaaaaataattgtatattaagtaagaaagaaaaatttggaactcatatctactatgttctcacacaattctcctacagcaacgagcgaggtacccatctagttcattctaattttttgaattgttaaatatattgcgcaaaatataattaagactccaaattgacgcagtcttatatatattatttatttattaaaataataagaaaaatagtccagtttacacatatatatatatatagtaaatttgtttggtgctccatggtgcccggacaccattgttgaaattgagtatatacccaattcaaatgagtataaaactttttcaattacttaggtattaacattaactactttactaactagtttaaagcaagtttgaattgaatttgaacttgtttttgttagattttgattctaggtatatagcatccatacatataattagttaggtatgtaatcatggattgtgaaataaagttaaatttgagttgttttgttgataagtataggtatgaatcaaattattataactaggtatatactcacaatttaaaatatttgaaaaatttgagtgattttgtgcattagataccatggtgccatatatatatatatatatatatatatatatatatatatatatatatatatatatatatatatatatgttcgatacccaattaaagttaatttagttaagtggaagctaattaattaagtatctatgtaatttaacagtgaaataattaattgtgataccgccaatcaaagataaacagtaaattaattaatgctctagaaaaaaatcgtgtgattattatttacaaatgaagcagtcgtcacatttgttgtttgcaggtgacgtaacgtggatgtctctataagaattgacttgtcaaatttgtaagaaccacctgacacctgtctagcaacctgcatatcgtcgtggtcgtagtctaactacgcttgggcctagtgtatacatgtagggagatggattttcatcctcgggaggtgatatcatctcgttttcttatatgctatttataggttatgaaaaattattaacataattaatataaaatatatcatttcacaaaaatacaagacaaatacatttttttacaagttaaaaggaataaaataaattgaaaatagttaacacatatttataattatttttcttacaatatatgtatattatatccgtattaatagactattatttatatccgtattaataaactgaaaatagttaaatacatttagtggttaaatgtatttatttattaattaattgaaatattattgattaaaaattaatattaaaaattttggggaaaaaatatattttagcgcgaatatttttccaggtagctagactagcattttcgtaggcggcacatcatgctctcgttcacctaggaaaattgatcttcccaatcggatcggccggctgctgattgttttcgcatgtctttgcctacaggtggactggccgtccgcctaggaagaccgttttcatcagtgtagaaaaatggtgtcaaattttttgaaagaaaaatattgataaatgcatacgcagtccctatatggctatatatatggtggtaaactggcatgtacacatgctgttgtgagtagtgattagctaggcggctattagcagcagcaaccagttctttttgcgtatgatagatgatgcagagtgcagctggagcaatggagctgctggtggcgtcgcaagaagcaggcggcgttgtggtggtgggcatgaacagtggcgacgccggagagctgagctacgccaacaactcggacatgcagcggacgatcgctgcggcgacgaggaaggagcggcaggagatggcggcggccgttcggcgcggtcggcggcaggcgagagccatagccatcgccgacctcgggtgcgccacagggccgaacgcgctgctgatggccggcgacgccgttgaggccatgctgggcgacgcggagcggcagcaggaggcggcgcctgcagagttccacgtcttcctcaacgatctccccagcaacgacttcaacagcgtgttccggcagaagcagaagctggtggtgccgagcaataatgccaatagcagccggtgcctggtgtcggcgtggccggggtccttctacgggcgcgtgttcccggcggatagcctggactacgtggtgtcgtcgtcgagcctccacttcctgtctagggcacccgcagatgcggcgcccaacgaggggaggatgtacgtgtcggcgtcgtcgagctcgagctccagctccagggtgctgcacgcctacagggctcagttccaggccgacttccgcctcttcctctcctgccgcgccgaggaggtccgccgcggaggcgtcctcctcctcaccttcgtggccaggcgggaggcggtgccctcgccgcacgactgccacctctgggacctgctcgccgaggccgccgccgacgacaggaggctcgtcgactccttcgacgcgcccttctatgggccctgcccggaggagctgagggaggccatccgcgaggaggggtccttccaggtgacgaggatggagctcttcgaggtgagccgctcccgctcatgccaatcccaagcagatctagatcagctggcggctcagacaagcagcaccatcagggcggtggttgagcctatgcttggaccacacttcgggtgggacgccatggacgccctcttccggaggtacacccacctgctccacaattactaccgccacaacaacgaccagctcaccaacgtcttcctcgccttgcacaagatttgacttcattcatcccatccttccttccttcaaccatatatatataccacattccctacagtatcagtatgtattactgtatttccaaaacgtacctacaatatataccacgtgtcagttctacgatatatatatactacccggataaaatgatagtatcgtttctaaaatcgggataccaactgtttcatgtactagacaatatttaaattcaaaactatttaagtgtatttgtgtttatgtatcttcaaaatcaatcttaaataaaattattagaactagtgagtggctttctcttgacaaatgtctcttttcatgtactattctatttatttagaatggctatatatatttaatataaatattaaattaaacttaaaaaaataaaatattatatatcccgatactacgatgcgattaaacaatccgatactactcaccttctacatgttcaaagtgtatagtacaacttccattctagcagtatattatatactagtatatatctgttcaaagtgtatagtacaacttctcttctagatgtgatcctcctatcttattataaatatgtttttattgtgtttgtgttgtaattaacatatataaatctgttgtgactggaatggattttaaacctcttgagggataatgactgcttgtataccttgttcttcctaaatcaaagtaaaggattatgggggatcctagcacgcgcgtacgcaccagctggaccccgtccccgcatccctcttttttcgcacttttttgacgcgttttcttctctttttttcgcttcttcctttttttaatctttcgcatacctctttataaatgtagaattgaaaatttttaattttgacttgaaagtttttaaattttagttgaaagttttcaaatttgagttgaaagtttttcaaatttgaaataaaaagttgaaagtttttcaaatttgacttcaaaaaattcaaaattttgagttgaaagttttcaaatcactagttgaaagttttcaaatctgagtagaaagttttcaaatctcgagttgaaagttttcaaaactcgagttgaaagttttcaaattttatcttgcaaatttaaatttcaagttgaaaattttcaaagtttgagttgaaagatttcaaaatttgacttgaaagtttaaatcttaagttgaaagttttcaaatctgacttgaattttttcaatctattagtaaaaaaatcttcaaaaaaaggacaatcttatcttaattagtgtcattatctaaaactaacttagttagttaggcttaactactcccgtctctcgtgaaaacgctcgcgacttgctgatctcgcgcgtgcgcgcgaattagccatctcgacgtttgttactcctacttggttcctatactgatttgtatttcgaaaaggtttttttttggaaggacaaaacctagatattactgcggagagaattaagcagtttgtattagaggagaaaatcgttgtggctgatttggccacgtcttgcgatgcccacaaaaataggaacaaattgtggttcacatggatggtccgctagtagtatttctgcttgctttttgctcatggaaattattaaaggactaagcaactggacatttaaggggtggtaactagcaagcatgaagcatgggctaactcgaaggggcgcagctaattcgcgcataagcgcctctatgttaactcgcgcgcactaccacgtggcacatacagcgaatcctcccatcgcgcgattagcataacggtgattatagatctaattacggtgctacagtaatttctcaataaaaataattcatttaaaaaattcgagttgaaagttttcaaatattgactttaaatttttcaaaatacaatttgaaagttttcaaatctgagttgagagtatttcaattttgagttgaaagttttgaattttgagatgaaaattttgacttttgagtaaaagatcttaaaatttgagttgaaagttttgaattttgatatcaaagtttttatttttgagatgaaaattttgaattttgatttggaagttttcaaattttgagttgaatgtttcaacagtgagttgaaagctttaaattttgagatgaaatttttgaattttgagttggaagttttcaaatttttagtttaatgtttttcaaccgcaagttcaaagtttttaattttgagatgaaaattttgaattttgagttggaagttttcaaaatttaagttgaatatttttcaaccgaagttgaaagtttttaatttttgagttaaatgtttttaaatttcaggttaacaattttattttttttgggtatgacttctttttctagagagttttaaattttatgtatagatttttcaaatttgtagttgaaaaggaaataacctttatgtgaaaaagaaaaaagaatgattcagatcgtgattatcaaaatctaattacgctagacatgatcttatctgatatcatgcgtacgtgcgcgtgtttctaccttcccggtgttgcgtggtaggccgggccgaaaca

SEQ ID NO: 7913 - DNA, 647 bp, Oryza sativa
attcctgcacccccgcagtcgttccggtaattgcgctacttctaacatgctatatatttgctctaaatctgtctgcatgccactttatgagttcaatagataaacacttaatatctgatgctgtcatgtcgcgtactttgctaggaaaatgttccaggcaaggatattgataagggaatgttggtggtatctaacattgattcttccatctccaatgatgatcttctccaaatgctcagtgtttatggtgatgtaaaggaggtagctatactgccataattgagtaattgactacaaaactgaaatccacacactatggtaatcatttgttgtttatagatttccagctctcctataagctgcaccaagaagtttgtagagttctatgatgttagagcagcagaagaagcactacatgaccttaataagggtggaatttcaggcccaaagttcaaggttgaacttagccaacatggagaggcaggatcttggtaatttgcttggctgaatttttttctacccgtttttggtattatcttttcatactcgtgctagctatcgttgccttccttcatactatagggttagtatgttaggtacctttgggagatgggataatatcataataaaaatatgttcactgtttt

SEQ ID NO: 7914 - DNA, 1730 bp, Oryza sativa
  unsure (1)..(1730): unsure at all n locations
tgtatcattttattagttcagattatttactgccagggatttcctgtttagactagatactgcactggtgggctaaaagtgatcaagtatccaattttggtaggtaaagatatccctgaaacagttcagcagggaatgagtaggaactttacttgtgggagaatgcttacggaattttgtcccaagacagtttggtaggaactagttggacagttaatttagcacagttcgatattaaatgatcaatttatcatatgatacatgtattgaaggttgtaatatggtgataggttaaatagttcttcaggaactgactgtgatcattaatggcagggagcaagtcagtttttgcttctccacttgaaaagatccaacccaatggagcaaatcatgcaggagatccggaaactccaggaggtcaagccttcaagggcctggacatccttagcctcagcaatttgatgcggcaagaaaatgcttcaggttcaccgtcactttcttggggtgagatcctcccaaacccaatatcgaggcttggcttgtctacaagagaacaagcttttgttgaaccaactactgctgatcaacatgtgcctggttatgggaagggcttttcatccactccctctctgaagtattcagtggcaaatgtgagttccctttgccttctttttttcccctacaagccatgttgatagtagaattttatcatcttagttgcactacaaccaaaagtactgtttttgaaagaaaccacaatattgttcattgaagattaatcttttctaagagttcatgatgttctgcagcgagagaaatagtaagtggtgtttttttttttttggggtttccccaaaaattttgccttaaancttggggngacancatacctccatctacgacagtgatgaacctctagagtccatggaagcgatagaagctcaaactattggagatctccttcctgatgatgatgatgatttaatatcaggtattgccgatggatttgaatttactggcatgtcgaccaaccaggatgatgccgatgaagatatattctgcactggaggaggaatggaacttgaaaacaatgattccgtaaaaggtgacaaagttcaggatggatccttcaagagccaaatttcttcaggacactccatcaataaacaaccttcccgaactcttgtagtcagaaatattactgctaacatcgaggattctgatctgacggttctgtttcaggtattgaaccttttccttatttcatttcaaattttggttttagtttagtaaacaatatccttttgaacctatatacacacatatatatctttcagcaatacggggacattcgcatgctttatacctccttcaagcaccatgggtttgtaactgtttcttattatgacataagagcagcccaaaatgcaatgagagcgctgcatagcaagcttctggggctgatgaaacttgatgtgcaattttcttttcctaaggtatgcataataatatcagtagttttgaattaggcatgctacctaatctatatatcttccttatcatgccatttgttacttgggcaatgttgttctgtttcatttttcattctaacttgctacaaaatcatgctattacttttactggtgccccttgtttatttattggtttttgttccttttagcatgcaataatcatttatattctatgttttgaaaattaaatgctgttgt

SEQ ID NO: 7915 - DNA, 1326 bp, Oryza sativa
gtaagtcaacacatgcaaaacacagaactggtgaaggaccaatagcaaagtaccaaagagatggattcagaaaaaaataacaattcatgagcatctagactgttttctgccacaacacgcatacaaatttaggttgaaaagaaaatcctccagatcaccatcagaaactggaaattattttcaattagacggcagtaagcagctatggcaacccctgactacactatggacagaaatgtggggagaaaaaacaagttgactgcataacttcaaggcaaacatttatgtggtgccagtataatctaagaaaactgaaaaataagatccataccccccataagttcatcctcgtcaatgtcatcagggacattgtagcttcttccgagagtttcctgtatttcattgctcacatccataagatccatcatctcgtcttgcaagctctgcagataagaaaagcatgggtctagattcagatgcaattggaaacagaagaaaacagggaacaacgaaaatccattgcaagccagaaaatcttgaaaacatgacgaatatgttacacaaaaagatgctgcgtacatctatatcttcaagcttgacagttttcatcattcctttcagctctttattggctgccttcattgcagtcatctgcccaaatgaaaacacttgtatcataagtttgggaatcaggatgtaaaacatcatggaaataaaacttcttgagtatactatagctatataccgtttgctgagcatctttaagtccctctgatgcaaaagcaacttgggcaagggtatatgtttggttgtacagcatgtcacgctgcccttcgtacctgtcaggaaagcatatataagacagtatacagatgagcacagtaccgtaatagagtaagtaattcgaaggagaagcaaaagagctcaacaagatatacagagtgaatggtaaatgatgattgggttccttaactaagtaataaaatagaagtctctttttttcttataacataactgctacccttaggaaaatctttcaaaatatatatgaagaaccacatcggtacttaaccaaaaaaagaagatgaagtacacttagaaaggaaaagactctgtgcttatgaaaggacacaaacaatttacagagtcaaaattatgcctctttttatctcaaatgacttgtaagcgatgaattgtaaaattggcgtaaccgggacttggtacaagatgcaacggtttataatgtcatcaatggcgagttctttaatttttcattcatgtgttgttgttgtccacaaggaagaaggcagtgcaacaatttgatag

SEQ ID NO: 7916 - DNA, 1134 bp, Oryza sativa
acccatgaattcagaaccccagagtccgcacatcctcaaatacaaagcacttccctagttagatgtaggttagacttcccgttcgagaaactctaccttctacctgccctcaatttatgcacgattaatgaatgccacctgggtggaagcgagaggtggaaatggaaggtcttagttcggaggtgggatctctacctgatagttgcattgccattcatgatgatcccctggcattcgtccattcagccattcaccattcacccattcaactggaattttggttgaatgccggaattgtgtccacaaattgtggatggatagttggttggctggctggatggctggctggatggctggctggatggatggtgaatggctggcggcggttcggttgctttgaagcatttgttgctatctaaattccatttaaggtcgtaccttatcgcccagcatcatcttattctctatttgtattccctccatctttcagatacggatgtagccttggatgtgcccgtgcccaatgaagaggaagagcgcaacatgaaacgtaagtacaaaagtaccggacacccacccagatcccaatagaatccgccaaatcctgcgggaaattgtaatcccattcaccagctcctacatttaattaacaagagaactattgtatttatctaacacctggattatctccacctttcatttgatccctatttatagattacgctgcgttgctaacgggccgcacctcctatttcctcaagggtgaggaaatgaagtccatgtacaccacctacaatccgcagaatgtggtggccaccgcccgtttcctgttccacaagaagaatctatactactccttctacacctcatcgcgaatcggtcgtccgcgtgccattcaattcgttgatgatgcgggtgtaatcctggaggagcatcaactggagaccaccttggcgggcactctcagtgtctatcagaatgccacgggcaagatctgcggtgtctggcgacgagttccacgtgattacaagcgcatcctgcgcgacgatcgtctccatgttgtcctcctctggggcaacaaacagcaggccgagttggctctggccggaaaggtggccaaatacacggccctgc

SEQ ID NO: 7917 - DNA, 16164 bp, Oryza sativa
acgactttctttatgagtatggagggagtacatgtttaaactcaatctaaagtagaataaattaaacatgtggtattattcttatttctttttagccccatccctggggaaacgtagaaggcgtgccccatcgcttttgtttgggtttgagttggacttgtcttatccatttttgcctttccacccaattttatttttctcattgaggtgtcaaatgtgtttggttggctggtttcaacttgtacgggtcccaattgatctccatctcgttatcatcgtcttatacagtggtattatactagtagtagtagcagcagttgaaaaggtgggtgaatcaattcgatcaatcttaccactactacagaaaaaagatcgaggcatctctccttttcttaaagttttctcttaggcactttgaaaaatgcatttgtcatctgtcagtaaaaaagtcaagacaagctcacctgtgccgtctatttgtcgctttttcatatttactttttgtatgtatgtattgtacacgttttttttccagtcctaaaaggagttgaaacttaatattgaacctgatttcttcaactgtatattgtcccctcttttccagaatttagaccacgtaaaatgtcttctttgaatagatgtcattatcatcatctcatgataatcattatggcattccaaaataaataatgcactcctatgaataaaatggagtgatattctctccgttttctaatatatggtgttgttaacttttggacatacgatttgatctttgtcttattaaaaatctagtataaatgtgaaagtcatttttaaaatatctttagtgacaaaacaaatcataataaatatatgatacttacatagagtactttataagacaaatgatcaaacatataactaaaagtaaacggcatcatatattgaaaaatagaaagagtagtaattatctgcacaatcgaataaccggaggacaatgccattttaggcaatctgttaatcccagcacaaatgtctaatgtgacttatttttcagagacatggatttcgtatgtatttttggacaaaagactcaaattagacatgtaattttaccctataccatatacttttactccaaagtataccctgtattcagatttaagtacacagctcgacctgacatatatttatctgagtttggatctcaagcagggtgcaaatacacaagttctttttgcaacagttcacatacagtacacaagcttgcactccatctaatctatagctaagaaattaccactagataattacatcagaacaagcttaaccataatgatactggcatgcaagtgcagggtgtctgtattgttcttgtcaattaatttgttctatctttcacctctctgctccggtgtgagcccttccttgccacagctaggacagctcttgagcccaaacccttggcaatcgaagcacctgaacacataataatcacacaacataaatactacatggttggttaatactacttcatttgctagttgatataaagacataagaaatgtaagagtaaacatatagcagaagcatgagtcatgaatggtgtataaataaacctacttccatctctcgaatatgttgccattcttcttgttccttccagtgccctgcatcagttgatcatttcagtcatcgaatcaaggcattcatacctagctcacttgtttgctttaatttgcagagatcatatatacttaccttgcaacctgggcattctacagctccctttcctctgcacgtcttgcaaccggcagagacctgcagtgcacaatacagctcattcagattcagagaacatgtagtgccagctgcttcccaaaaattgaagaaaagttaggagcaaatgtaattagaagctagtactgatcttcagtaagaccttcactttggctccaggtttggatgccatggttggtgccatcctcatcctcctcttgatcttgggtgaagtgaatgctgctgctgcaccagttgctgtgaaggtgatcagagaaagctccatgatgctatattgctatctatgctcctgaagctgaattcagagtggcaagaagaagatggagcccaaatagttaagcctaggaagaaagacagaacagggaaagaagaaagaaagaaagaaagcgacttgccgtttgaaggatttggagccacaaaacatccatagatgcaccagtattattaattctgtaccagattttgatgcatggtccatgtgttgtgaggcgttgtggccatatagtctggatagggatgcggctgcttggcccggatgggatcatcagccatctacagattcaggttccttgtatgcatgtgagtgtgctgctaagagccaagtggcactgatgagtgatggctcctagctctgaattgggcatctccatatatataactgcactgatgtactctacctgtcattgctggctctgcctctgcatgatgtatgtaaattcatgttgatgagtttttgattcagaaattcagttagccagcactgataattagctcaagaagtataacaaattcagcacttgtttcctttgagacttgagggctagcttcagcacctgcaggattgataatttatcagttgatattattaagtgtttacctcattagcttttaaaaggaggaaactggtttcatgtagttaaaaatcctacagattaatgtatttcaaggacaccaaaatctgctcctagaatatctgacaagaactccaatgtcagctagatcataacatgttagtaaaagcatccatatacaagcatcaattttttttctcggtgatcatattaagagttctgaacaatcgggttaacaagtagttcagtagcacacaaccaagcccgtcacatggaaaacatgttgcgacctcagctaagcaaacttataagtttaaaatcgcttataattgttaaaaattgcctatgactgttagattgtaaaatactatattttacacatgccacaaaaaggcgtaggttaactagctcactcaagtcttacttaacacggtatggctaattattctttacgtggtacacaacaaacccgtcaacattaaggttctcatgatgacttcgtcaataccaatatatgcccatttagtttttcagagaatgtatgtgcgcaagcgtctaaatttgtaatgtgtttatataaaaagtaacttctttttcacacaagagcaaattctaattaaaaaaaactagactgttacaggagctgtgtttagttccacgctaaaattgaaagtttgaagaaattggaacgatgtgacggaaaagttaaaagtttgaagaaaaaagttgaaatctaaacaagaccagagattgaaatgaaacctagaacaggataaggatacgagagttgaaccgaaaaataaaaaagaaaaatcagactcacctcacaagcttgatctgagccgtcggtatacaagatccaacggcgcagggcacaagctgtaggcctgtaccagtgcaccgagagttggggggatgattggtggcattaaatgcaatatctgagccgttgttttgtgcattggatggcccagattcgatgtaatgtcatcagtgcagttgcaaaagccctactactcctatacctatactacctagtactccttagagagagagaagagagaagagagagagagagagagagagagagagattgcaagggaagggaagggaggaagcggaagaagctttttttacccttcccacgagcattcaggggagagggtacgtgcaggagccaaggtccaacaaagcgatacctccttctcctcctcctcctcatcctcgtcatcagattcgccgcacgcgcacggtgaactcctccttccttcctgcatttcgattccctcttctttatcgcattatttcctgccctccattcttctatttcatgccctttctttctttctttctttctttctaataatcgatggcaagatcgatcaacctgttcgtggttttgggtaccactgccgatttcccccacaattccggggtaaaagaaccattttttggggggttattttttgggttaaagattccctttttgtatcacactgggggccataactgtgtgcaagtgctcacctgattttaactggtgaggtttgatcacctataagaccattttaatcgtttggatttagggcgtaatcggacaatgttgccttgttcagagataaaatttgtatcttttgtggttgagcgttgatttaccgaggggactgagttgtataacttttccatcctttttctgccctcgttatgttttgatcagattgattatgtaacggtggtctattgccctatcaacaatctcatttaaacgagcaaataaaagttcaatcaattatggcaatcagttacatatctgctgctgggagaagtaagggttgtaaccctttgtgggaaatggctgactattcataactattatgattatcaaattgttcattcgtctttctgttctccctgcctcactcactggtggcctggtggagtgaatgagtgagggtttactgccaatggtacatttcctttttccatgtaataatcccacattatcacccatttgaacagaaaaatacatataggaactctgctccagctagtcctccgcagaggataagtaaagggagaatttctcataacatatagctgatgcaaggattttgttcaaagtcaccttgtcaaaccatttttcacaatctagagaatatattgtttggttatttaaacatggctttcttgataaatatttgatgaaatgtcgcattgaattttgatccgtctaggcaaatgagtattcaagattgatctctctttaaaggctagcttatatatacatatatattctgcctgatgatcttttatttattttccctgatgactgattgatgtcggattatatctacagaagcagcgattgcataaaatgtgcatgcagctgcttccatgtgaaattctaagagaaatatgatcaccctctgcaataatcttactgcaacctatcttctgctgatgagtttgaagatgctttgccgtagttgttcgccagttgcaatatttgaataataataacagcaagaaataaccatcttattatcagttcttttcttccatttacatacttctattgtgattgacagatgcaggaagaattcgattggccaaccttagtgttatcaacatcaccagaaacagaaaatgttacctccagctctgtgagaagcacaaccaagaatgacgtggttattcagcaaggttccatctcttcatactggccatgtatgcatccggcagtttccaaataaatatattctagttgaggctgttttttgtacaccttgttttattctgtgaaaatctctgtctcattctgcaggggatgtcatgaaacttgaaaacgacacccattttctgtctcattcttcaggagatgggatgaaatgcacaaaggctgaccattttctatctcatgcaaacaggggttcattgaacttggtatggtacaaaactatctgttctactatcgttgatgggaacatttgaagggacatattgctgaaacataaatactgggatgggaatgggtcacagggtaaatatatggatacctatttgatccacactagttcaactaaatacacaacataaactagaaaaaaaaaagcaattttagttgatcagcttgcttgaattagagtggctcaatgggcacccatatattgacccactcccatccctaataaagaagttttgtaggtaaagaaataacaccctaatatactgtactaatcactcaatcagttcagcaattgatatagaatttcaagttgtttgcattatttcaaaattttagttcagttgaagttaacaataaaagcaaggaccaaactgtagccaagttggttggttggtcatgcaggtgtgcataccacccacctaggttaaatcttactccctctgtttttttatagatgatgccgttgacttttgacatgatgtttgaccgtttgtcctattcaaaaattttatataaatgtcagttattttgttgtgacatgttttctcattaaaaaactttaagaatgacttgtactttagcatatttacactatttttttggaataagacgagtcaatggcgtcatctattaaaaaatggaggtagtagatcaaaggcagggaggcaaagcagcaattatattcctttaattaattaggagtagctgctggatttttagccacacttcagagtttcacttgatttgaaacatgcccctttattcatcactattttttgaccaaaggctagaattgctctgcttctcattagaatcaatgtatatttacagtgagtgatgcaagttgtgaaaaatctttcctttgttagtagctgtaatcaatatattatagtaaataaaaccatcatccaggttcaatgtggtaattcaattgtgtttcaatgttaatatgcaatttatggataacatgcactgcattgaaacgtaaagctttgttcatcaggtgaccccttttttctttttgttttgttttgaaacaactcccttctcaggattatcaagaacaaccttcaaagtccaattttgctactgaccttggatcacatgcatattctaaggaagccaggacacttggaagagtatatcatgggcagcagccttacttttccccttcaagctgttcttgggaaaaatcttctgcattaaaagtagtgccaaatagtccagatgcatcagggcatatagtcggggaaatgagaaccaaaaccaacatcctcagtgcaaggtcaaattacctttcatatcctactgatgttcctcatataaggtatcgagatgaagttaaagttgatcttagccaagatgataattccaaacagtacagaagacctgatcaatttactgccttctcaaacttcaatggtcaatcttctgaacaccttgaggtacatctgttgattgtgttaatcataatagagttgttacttctatatacatctctctatctggcatcagtagaaaataattaagatcatttgaattcgggagtatttgaccgtgacaatttttttgttgaaacagacagccaaaggggcaaactacatggatgagatcactccaatttcacgtcaatggtgctttgataatagaggcccatcactaccaagagggctggtctatggtgatgagataccatcgctatcttctaagaagtgtaatggcaatgttgcatcatcatattcaagaatatgggattatagtgctgaaaccacatcagtcagacaatgctatggcgataaaatcccatcattgtctcaccattggcactaccgagataagatccccttgcattctggtcagtggtgccatgatgctgaggcacgcccattgtcgaactaccagcaaggtgcttcttatgggaatggtcgtttaagagataatatttccaggggtggtaggaatgagcaagtcaacattatctcaagcagacgtactatgacaaaacctagggtggctaacaaggttgtaagcagcaccgatcactacaagattaataaggataacctatggagaaattctgaggatataagggatcaagttcgtggcccccgggcaaataaattaaataattcttcaacatcatctatcaagaataatgccatccctcctttggtctgtagagatcaaattaatagaccagagttcacagttcagtatgagcatgcaaagttctttatgataaagtcatatagcgaagatgatgttcataaaggtatcaaatacaatgtttgggcaagcactccaaatggtaacaataagctggatgctgcttttcatgaagctcagattttaatgaaggagcagggcaaaaggtgccctatattcctattcttttcggtcagtaaggatgaaattctcttcttctaagtatcatccttattaagaaaaagtccacctaaaataacgctgagatatattatttggcgtcctagtacctgttgtgtttgatgcttaaatatgatagttaagtgagacatgccggtgctttttttagtgcatgtttgtttgtgtttagtttattgtcttctatttaggaaattgagatgattggctgttgtatcttcactcttcacttgcggacattttatgattttagttttcatcgtgaatgagtattcttaagaaaactatagtgattgatagccatggatccagcttctacagacaacctgctccagattttctttttgacttggttaattatttcaacaatacattgaatttcctttgagcttgtttgattaggagggattagattctgatatctttgtattgttaagatttcagtagaattacttgctcagtcataatccccaccgtctgaaagagctgattttacctgaaatattggtcacaatgtcctgccattagattgagtaatgggcttctctagaagatttgatccactggataccattcaccaaatatgcctgaagcattttttgtcttctttaagtccgttttatcatgtgacaaccaaaagctcttgaagcagctccatatctcgtctgttgtatggctatttttatcatatggttactacatgtgcctgaagcaattccttattatctgttttatgttttatcatctgtccaattttcaagatagttaattttattatgatccctttttttccaggttaataccagtgggcagtttgtaggattagctgagatgttaggtcctgttgatttcaagaagaccatggacttttggcagcaggataaatggaatggatttttccctgtaatgtggcacattataaaggacattccaaatcggttcttcaaacatataactcttgaaaataatgaaggcaaagtagttacttttagcagggacactcaggaggtaccatgcttgtagctttgttctgagacttttttttttgaaagggttcttatagttagaaatggaatactctcttttataatttgtttagtcgtagtctcttttatattggtacaatcaagaacatagaaactaaaaagtattccatatctttgaaaatgaaatggacacttaactattttaaattaggtgtctatatcaggttgccaggttttatttccagtcctctgaagaaaggtttccctttcagattatgaatattctacatgatgtcaaatgctgttattccatgctttgattttttttatccatttgtattgttgattcgtttttatccagcaaccttttgtccttctatgtagattgggctgccccagggtctggaaatgttgaagattttcaaggcatatcaccagggaacatcaattctggatgatttttatttttacgaagaaaaggaaaacatgcgccatgcccagaagggaagaaatttggaaacaaccaatcaagatttgttctctgatgacttcagatcaatatcagtggtatgtgctttctatttagatctttgttttgaatggctacttgataataattttaagacaagatgatacttttgttatgtaaatatatttacgaacaccatgggcattttgtgaacactgattgtggttgcttgccaagtccacatgtcattatgcagaagtgctcttgattagaacgaataatcttcaaacccttcttaacataacgctttaaggagaaacttcacggtttccagtctatctcaaggagagaattaacatgtatagatcctactgttggaaaccagatgatcctgaaccatgtcgtttaagtttcactatttcgaccaattaagatacatagagaaagtgaatatgaaaaaggactgttggaacttctctggatattgtgccggtttctgccacacatggtccgttgttgggctcattgctgcaaaaccaaaccattgtagcatgtattgtgaaatatcttctgatgtagatggcaactggagctaaagatcttgagagtttatgggtcaggaactcgggatagtttagatctctagtgtcctttggtcacttttttcttctgtggcgtgtctgttttaatggaatgtaggttgtgatgtactgtttgtttaatggaatgacacgcagctctcctgtacgttcgagaaaaaaagttagtcttctgatcctgcttatttccatttgtaggagaatttggaggccagcatgcagagcttgagtttctatgaaacttgggagtaatttagattgttctagtgtgcatccaaaatcagtaagttgacgagtcagtgaagcagctcaaggcttgaccctcctttgcaaaattgggttgatccaacgacgggataatacacagatgaatccaaacaattttaatgattatatatatatatagtattttgtgtagaaccacgtatgattgtgggtaaccttagaacaagatttgaacacactgaatgtttgtaatagttacttatctggtggctacagtgactttccatagactagatgaatttgacgaaactggcaagaacaaagcacaagtctgtaggcaataatgccatattatctgcgtgaacaatcatgttgatgaatgtgcatctcttctgatgtgtatgtgatgtcggtttccttcctgttgacatgagcgttaatgttaactaatgtactctgatcaccacgttgttcgttggtgttgatgacacagctacaagtttccatccacagagatactaccatgagattgtaccatagcccataggctttctgtgatcatcaattgaggagcaaaaacataatctagagacagtaaagaaaggtttgttgcagatttcctaggaagcattttgaattgcttgccatgaaccacaaatccacaattaaacgcaaattagcaaatgaatgctcatctcaatgaggtaccatggctgtgaagagcgaaacactaaaccaggtcgacgagaaggcttcagttttgactcaaatttagaaggaaatataacccaggcagacgcctgaatgcaatacgctgaatcatcatatatgcctctgaagatagattttgttcatacaggcgtccaggatggcccagcaaaatgttggcagggaccaatctcaatctgaggacatgacaaattataattgatatatacagcttcagaagcgttgtattggacagatcactctccacatcacggctacactaatttgatcggcgtccttggactcgacggaacgccgccaaacctgtcgaccataagcttgaaacaaggggtgaaaaccatgtacagcgcagcaagtgcgaacggtgcagcgatcagccacccgagcatctgtgatccgcattggcagtagaactcatgtcagtgtttcctcaaaggcaaagcaatggccatatcatcagctagatggataatagatgaagtttgtttactaaccgcatgcacaatgctgagcatcacatcctttgaggcctggccagtgataaccttcttgaatgcatctgaagtcaaagggaagtgtccactgcctgtgataacttctccgaaacgcaagaaagggacaatcaagctgaacaaaacataatcagtaatgaattagcaaagccaaacacatggaaaccaagtgaggaatctggcaaaatgacaaggtcaccagcagtggtaaatcaattcaaaggttgtcatgggtcataaatctacactgttgcactaggtaccgttagtcatttacagagaaaatatacatataaatgaaagtgcaaaggcaaagacctgaagtaaagcagttcatggatacatcagaaattgtaacatatccaaatattcatacagaaggcatcagatgcaagcaatgagcaacagcaaatgcatttacaaaagccataaatagctaataagaacacaaaaatggatttgggagtgtatgcacatgaggattataatatgtaaagatgcaaactgtaagcaagataataccagagtaccaaacaggggaactcaggctacacaaactcaaaagaaatcagatagcctggcctatcatagattcgtatcatagagcaaagcttgacatagaagatcaagcatctacagacgtctaagactattttatgatgcaaaagaccaccatactgttatgaacaaagtttggcgtatatacaaaagaacatgcaaagagatagcacaacaggaatgtggcttctcaataatttaatacaagtttaccttagctcaaggggagtaacaacgaaatttagaaccatgacagtaacagcattgcagctacttcccaacattgctattgcaactccacaaagaataacagtggtccctgcaatcatgaaagctcaagatgcatcatgttgttttgaggaatatatgacatgcttgccactttaccagtagctcagcaggcacgatgcttacaagttacaacttcatgccacacagtgaaaagtgttgacagtttcacttgcaggattatacacagacatgattgagcatcatcaccacagaaatattgtgaaactttttaactcggtagctactccacatcatatttacaagtgctcgagaatataaaacggatcctccaaacttctaagataacaaccagaattaatctttctagaaccagaacactattaccattgcatcgcaacaacactgaacttcgaatttcacaacagattaaatacacgtactctacatgtatctgtaatttaccaaaaaggattgtgtgctatttcttcaagaccatggagcaggaagtcattgtttcaagaataaaaaaaagttagtgccccagcttatcaaaagccacaatgaaactacacagcttaaatgcgcaaatttgtatctaatcataacctccttggctgtctaaggccacttaactcagttaatttggatatcttcttttgttcagttaaactatgagaaaaatctggtacaatgaagacatgctgaggcttgagaggctccttaccacatatcggaaagatcccaagggtgacaccaagagcagcagagaaagccagttgcttcggctcagctcccctgcacaacattacatgaaagttgtcagcaacgcaaggacaaaatgaaaacaaaccatttcgcgaagaagttaagcagatctagcccaagatgtgacaccggatggaagggggaaaacttaccttctaactacttgcattaggggatcgacgaccttgttctgtatccatggccaaacgccaatcctcgtgaaaaatgacattttcttggcaaacttttcaagaaaaagaagagtccagcaaaacgcaatagcctatctgttgcgggcaccaagaaaccagaacctgcaactttttatgatcaaatcgcgcggaacaaataaatgtctggccttgcagcatgaaacaatccaagaaacggtgaagtgcaactatccaacccaacttgtaggggtgaagtgcaactatccaacccaacttgtaggggaaggagacgaaggagggattggattggaagcgggggtgaacagggtgggtgtcttaaattggaagaaaggctccacctttgggtttggatttggattgcttgtgaacagggtgggtggcttaaatcggaagaaaggctccacctttgggtttggatttggattgcttgcgcgaaaaagatttttttttgcttggaaagatgggagcggaagagttgacgaaatcgagcgtgtgggcaacacctggcaagatctgacaaaaaaggtgactgaatctcttcctcaaatcaatcgaagaggaggtgaggtggggaagtagaattaatttaatggggaaaggcacttttacatattaacccctatctcctcaaatcaatcgaagaggaggtgaggtggggaagtagaattaatttaatggggaaaggcacttttacatattaacccctatctatctagttgatagtttttggaggtgaggtgggaaagtggaattaatttaatggagaaaggcacttttacatattaacccctatctatctagtttttggatattaaaatttcaagtaaattggtgttacatatgcataattaccattcccttagtatatactactccatttgtttggtttaatttaggtggactagcaaaatgcccgtgcattgcaacggatgaaaacaatacaattttaataattaatctgtcgcatggtaaatcatacatttcactcattgacatttaataaataatacgtgaaaatatttagaaatacatcaacatcattgtttattaataatatttttcctttaatgattttaacttacattttattatgttctcacttacatataaatttatatttttctttaattttaagtatgaatcgtacttaaaatttataaaaatattgaattaatattgtttctaacattttattgttattagattgtacttggcacatatcattttgcatttttattctaaactatagtttatttgaatttattaattacctaatttaaatatctatattattagtctaaattatttttaaaattaaaaacattaaaatattatagatatatcacaatgttttagggacgggaagacaaagtacgttcaatggtttcaatttataacctgataaagaaagaatgttaaattagattcatgcaagtggcacaaatgtcttttagaaaatttataacctgataaagaaaaaaaagttaaattagattaatgccaagtgtgacagtatgtcctttagaaaattttgtggaatgaaaatttcttataagaatataccttgataaaaagatattttgtgtgactatgagtagtttgtggtctagattcttcttaagaaatttatgtgagtttggatgagcacaaattatgtgagcttacatgtttcgttctaagggtgtttggatgaccaaattacatctgctataataaaaatggaaatcaaaattaacaacaagttggaagtaggtggagctgggcagaggcagatctaaccctgtttcggttgaacccccaaactttttgagggataacgcagaatacctgatgaggtacggtgtgggtagggaggggatgctcaccggcgagcgacgatgcggtggaagaattgaaggaggacgccgggcgccacctctgctcgcaggatggggatcggcgcaagcggcgggcgaggagacgaaattcgaggccgaggccgaggccggatgggatggattaggatgctcaccggcgagcgaatgcggcgggagcaggaggacgccggcgccacctctgctagatggagatcggcaggcgaggagacgggacgggacggattgcggaggcggaggtcgtgcagcgctctgctgccgcggtatgggtcatatgcacaggcccatgaggctggagttttttcatatcccaaaaaagttcatctaaggtcccttatcttgtcgttgagttttaacaggatcacttttaattgttgttgttgttcacgtggcggccgagtcagtgtagggcccccacaagccaaccagcaatcttctttcacctcactcccctctactcccatctcaacctaaacctccagggcattcgccaatgggtagggagaaggtgtcggtcggcgaggaaaagctcgacggcggaggccgccggctgacgtggctcccaacggccgggagcgctcacgtcatgaacgggttgcgcctcgatcgagccgaggatccctcacaccaaccccgcgttcttcctgctcttgggcggcacaaagccggcggctagacctcgatctgacgaatcagcaatggcgctagagcgagacagggtggcgcggcacgacggttggcgggggctcggtcaccgcgacgacaaacccgaggtgggggatcgttggcaatcgcgatgatgatggttgtgaggaaattcggcggcggtggttgaaagggaggagaggaagatcacgagcaatgcagaacgtggagcggactgtgggcgtgtgatgcgtatacagagatacaggagtggtaggtcgagacgagaaaattgatattataccatcttcgaaaaatgtggcttcgctaaaatacaactctcaaacgaatacaa

SEQ ID NO: 7918 - DNA, 35965 bp, Oryza sativa
aagcggggcacactgtcgtcgtccgccggctgtgcttctgcgatggaatggaggaaggggcggcgcagccatgtcggcgaggaggctcgtgggcgcgcgcgttctggcagatgaacaaggagaggctggctgttcggggaggatcgaggtggcgcgctggagcatcatctgcttcctcacagccgcgtgccgatcgatcgaggtgagtgaaggcgaggaagagcagctgcccgccgacggagaagagcagccgtgctgtccattctgattattcacacgaacgaagcctaccaaccctgaccaccttattgtctgaaacaagcccttgctctgtatcatcattgaatcgaatggggtaacaaaattctcttcagaagccttgcattgcatgcaaggaaatcaagaatgatgccatcaacttgaccatgctttgaaccaactggttggaattggatcaagcatctattgatgagctagttaaaatagcgttcaccaacttcatatgaagtctgttaacccttgttcttcgagaatgaatccttccgcgatccatctatttatcaaacgttgtttgttgatctcattatcttctggaatatattcaggtacagcaaacaagttctcaaatggtgaggaacatcatagtaactgagagataatatcattttcatgatatcaacatctgggtcctttgcaagcacgagaaggagccaaggagaatggtggcggtggctcaccggtgatgggaacaaagcaacgaaagaggggatgaaatctagagggggtattttggtcagctcatcaagaaaaacaaggtaaaattcatgtaatttgattaaaaaaaagagaggaagaaatggcattccagcaagttgtactggtttgaaaatggtgttttagcgaagccatattttaggatggcattctagtgaaacccaatcctgaagatagcacaatgtcaattccgtagatgcgatctagaccgttgcgtgagaaccgaaagaatgagtgatgactgaaatcatttgttgaactatggggtagatttgacgaattcaccatcgctggatggagagcgacgcggcagatagaaaaggcttggagaatcatatgctacatccagttttttttttcttgtgcaaacaagaaaaaaaatagtactccatccgtcttacaatataataacttttaattatatatcttgataaaaaaatatgcctagatttacatctaaaagttactataaccagcccgccattatgattaaaagataaacagcaagataagttgctataaccagccattatgctcaaaaggtactaaacagcaagaatgattgtctttctgtcatgactcataatgtggtcgagtcgagactcgagagcacgtacatgcacacacatttgatggcgttaagctgccgagtgtaagttacttgagcatttgtaccatgttacagggactttgttttctccagctcaacacaccaaatttactcaaataaatcaaattaaaacgcacacaaagaatgccagtaaactagattaggctagctttcttcgtccacgataatggtcgatcccgtgccgatcccaagctccatgagagaaaccgtgtcttcctcgaagaattgcggcatagggcaaccctgtcaaaatgcaaatcgatcagatcccagccgttccagcatgcaagtattttaccctacctagctttctgcctcttcttttcttttttttttcctttctcgacaacattttaatacatgagcaatgatcatacacagcacaaataatccatacctcttcctcaagatacagtctcagtttaacgtccttcagtttaaagaagctctcgcacaaagattttaactttccaacctataacatgcaaatcataggcaatttagccgtcgtagcaaaacaggagagcatgttatatcactatcagcaagttgccactaatatctcgcatgtgaaagctaaacataaccaacctgtgtttgagaggaaaggaaaggagaagattgaaaagatacaccaaacgaggtgagtcattaacacatgattaattgagtattaattatttcaaacttgaaaaattgattaatatgattttttaaagcaacttttctataaataatttttgtaaagcacacaccgtttagcagctcggaaagtgtgcatacgaaaaaagagaatcgtttttctctatctgctggtctcaaagactcaaccacgaaaaaaggacagctaataagtagtaataggacccaagaagtacttacagtagttgcaggaggcagcttctttgtcaatggttgcttctcacccatagatggccctacgcatttcaaggtgatacctgtgtgcaacggaggaaaagaaaaaatcacttcctcgcatgcataccatacaactctcttgccttaattatagttcaacattattacttataagcccagaagccattttttgaggaccagaagtccttgaactcggcttctcatcctcaataccatgaaaggctttcagctcagcaaatctgcattgacaaatcgttattgcctaagcataatccaattaataattggtgcgtcactatcatcaggtatctgtcccagcctagtcccagggaagttaaatttagcaaatgaagccaagcaacacaaatttggaagcgcgtgtaaacatcaagatagacatataatcctaattgttgaataacaggtataactgagatcatataggctggaattgactaggtagagcttttctagttagtaaggtcacagctcatgtggtgaaatcatttaagtaacaacatgtgtcctttgcagcaaaataatggcatatgtagtgaaaaatcctttggttatatcatggtcatgtggtgtcaaaaagtaaagaagggaaattggacaaccttacctagggtgcagccgtttgatctcttcaggatcatatgattcagcttttcccataacaaggcgaacatatctatgtttttgcatcaaaagtatcagatatcgtaattgtggtattccttcgagaaaagcaagacaatatagataagtgcaagaacactttctagaaaaccagaagaaaaattcaccgttggcatggataaacacacatgtaaataatggatggctagccatatacagaggccctatacatcataaaagaaggtaataaatttacagaagggattaactgaccgtatctctgcttcccttcgctcacgtggacttatctggatatggaaaagaaagatgaagtaacatatttgtacaacatacatgctcaagaaacatccagggactcaacatacctcactaccattcagtattttaacttttcctagtcgggcgataagcacaaatcgaggcacgccgcccttggcagggtcagctacaggattatcagaaagcctgacatcctttagaaaagtagatattagtattggcgtgctaagccataactaataaaaatacagtgtggtgtacatcataacattcttgtaaatctaagaatcgcagtgtatcaaaatcttgcagttctaactgttcaaacctcatagaaaaggaattgaacatcaatactaaatttcagaataataaacacaaaccattagaaagaaacttgcttactgttaaactcggaaagaggttaagtgaatccacagaaaggacctcatctatctggttagatcctgaggcatttgaaagtgatcattagcaagtcattttgaacttacttgaattaaaggcagttcttaaacagaaaatattatggaaaacatttcatggcgcatgatcaattttcccaaatagataacggaagccagatattacagaaaatatcttagattcgatattttgttatggaatagataagggaagccagatcacaaaaaatacctaagagaagaactcgtagtttttcaaaaggcaaaacagctgcatcgccaagagatcctagtggaggaggattggatggatatgttacatgttttagcatgttcttattcaaatggagctgttccaagctgccccaaaaaagaaggaaaaacatcaatatctacagttctgaaatgcagaagtaacattaacttaagacaaaagcttcagttatacatttgtaccttcttaagtaagatagtttcacaatttcatcccatgaatcaatgtgattgtcttctaaatttaagagtcgcagtgtatcgaaaccttgaacaatatttccaactggagtctagataagcggacacatgatagtttatagttagttcttcaaagctgtttcttaatgtacacaaagttgaagaaggaaaaccttgcactgcaagatttggaaggactacctattcaaatttccaaatggatcattttccagttagccaggggaaaacttttatgaggagtttctgttttactttggatgaataacagtaaatgaagcagtaggcataaaatgcatggcaaaaaaatgtacaagaagaaacgctaaccatcattgcttttatcctgttcgtcattagatggagttcactgagacatgaaaatgagactttaatcttttcaacctgttcacataaataaacatcaacttatactgtgattggcatcaataaatagaagcttcattgtgtcagccaaggggcataccagttcccatgttacaccacagtagttgagaaccaaaacacggatattcttgacagatgaactgtcagtaaagtcattctccatggtattgtttgtcaaatcaagaatttccagtgatgccagagcttcacacagagagaatatatcctgtgaaagaacaaaactgttcagccaaatgccaaaagaaacataacattagcatcaattgtgagaaaacataacaaaacaattgaaagttcaggatatcaagcaaatcgtgacctgtactgtcaagtgagtaaaagatgctaaatgtgctttcaacagaggtgaaaaagataagatggttggtgatgattacatagcttaccaacgcacatgaaaagtattaataatccaatacagggatataccacaagttttacttctaggtcaaaataacataaatttgaataaactccaagcttatgagtaatgaagttcaacagcacaatgtggcaccattgtaatgaagagcatacagccttttgctgtgcatgtttcaatttatgaagttttgtatgttatatccatactaattaaaaattgtgctaaccataatgttagtctcttgaggtacatacttgccactgagagagaagatttccagttaaatcaagctgtctgagatctgaaacgagcaaaactattgtcagtactcatcagaattcaggataaacataggccaagtatgcatgacagtcctgccagcaaatttctaatgaatgtttactagtaaaatcatccctccaatgctcagtgcctactaatggcctaagagaattcatgccattttcaaatagattatgtaatggtgatacaactgaattaggtcctaagggactagtcttaacccagaacctagatgctagaggtgagccaatacataatgtcatctttataggaaatatgagaatattgtagttgaaaatgacccagctgtggggtgaacacatatttagtttgctaaaggaaactttaataagaaaatgcagctaaaaggtatttcaactcagttattgtagatgccgacgttgttacagtcggtcagtacatcgagtctcaaatttacactcaaagaataaaaagtgacacaaatacgaagtactttaggttaccacccttttaattttgcatacgttaagaaactataaactctattccattatctcatttccaatgccaaaatatgcagtgaactaaatgctttagctgcagagcctccagtgacccaaccaaaatatatacattgtgttccctctaaggaaggtaacgtttccaatatataagatcaggaagcttgacatgtatcgctgggttgcaaaacaatcaaataaaagagatgatttaaggattaaaggatagtaagtacttggaaccaaattctttagttcatctcctggcccaattgagcttactcccatgtaggatacagatgcactggtcagatcattgaggtttttcagcttttcctcaactttgttcttgccaaccaattccactgacacgcgcttctgacttgatgagaagacatacatttcatctggacacaacaaaatgtttatatcgggtatcattataaatgtaaaaaggtgtatgcatattgcttttacaagcaacggaaaatcttctgcccttgaaacagggaaaagaaaacagagtagctggaaaatcttacgccaacccaccaatagcacatgattttgaaattttaacacgaggtgtcccatacatgctctcaagcaatgagcaactgtcaaattcaagaactagtacatatacacatgccaacatggatgcttgagcctaagttgtataatgcaacaaaaaaaatgtgtagccgatttctcgaatgctatttacaacgcatagaaggtagaaagtatgtactaggatgaattttagcaaaaaattaataagtggaatgggaaaaaaaaaagaaaaagaagctagctggtggaatgaagagcagcaagatttggatttggaagccgaggaatcgagggatgcggaccttgttcctccttggtgaattcctcgacacggtagcggttgcgtatggcgtcggggagcgtgatcccggcgctgagcgcggtggggcgcgcgaaggaggcggagcgttccccggcggcaacgaagtagcggcggccggcgagcgacccgtcatggcggccgccggcgccggcgtcccagtcgacgcccagccagtctccggggtggccgtcgacagggccgaggtaacgcacggtgccgacgcgggcggggtcgccggcggcgtgcacgcgctgtcccaagcggaaggcgacggcggccatggatgtcgtctcctactactactactacgaagtgaagtgaattgggagttgccgttcatttctttggcccatttagccccatcgcttcactattttgggctgtgggctggccttatccggccaaatttggaagttgcaactgggagagatgatttttttatcaccatcaatcaaaaaagaaaaaaaaatactctactactgtactagatgaaaacaaaacctttatatgtcaagctttcaccagctttacaatctttaactaataataatacaccattggtagcaataagtaaaaaagatctaccacaaccaaaccactttacattatcatacaaaatttcacaatatactgtatcatgcaagtttgtactagtattttctccgtcctaaaataaatatacatgaatatggacataaaaaaaagataaatatagtaattttgagtcacaaatcaagacagcctaactttaatttggactctgaagggaagaaattgactgtgcttagtcacctgtcaatgaaaagctcccagtcctttttgactcttaaaaattcctttttagccggcaaaccgaacccactttgttgtgagttgggagttcctgacttgggtttatggcctgataaaacggatgcgaccgcaccaagaaaagaagcaacctttttgttcgctttgcttccttggttagtttccaaggttgccttcttcttgtgatcctccttccacctgtctcttcctccccttcgctaaaaaacctcgcctttttagaattctagttagtttttcgtcctccaaatccgtcgagacccaacaacccaagaggacgccatgagcatcgagtagtaagttcccgactctccgccgccgcggccgtcgtctccaatttcccctctttgtgaaactgcgattaatggtgtttgcgttttctgatgcagcgattacctgttcaagctgctcctcatcggcgactcctccgtcggcaagtcctgcctcctcctccgatttgctgtaagaaagcctccatcttaatttcgctcggaaacttctcttctttatttcaatagagtagcacagttcggtgtttaattaacttctcgtcctgacaagttccggttcgtttgattcatgcaggacgattcgtacatcgacacttacatcagtaccatcggtgttgatttcgtcagtacaaatcttcctcttctcttgctattgatgaaccattgaattctgcagttgctatcatctaactgaatcaaatttcgttaatttgttagtgaatatgtcaccttttcagaaaatccgaaccattgaactcgatgggaagacagtgaagctacagattgtaagttcattcctcatcgagacaattctcttatgcgagttcagaccaatccattttttagataattgcacgattaattcatgcctgggatgcatgacttttgatgataatgcctagttctagaaactttggaactcaatctactatggattagggatgcttggcttgtatcctcccttagcattatcctgtcaaaacttgagtcataagttggttttcagttccttttcgccggaccggtgttttcagttcttactccctttgtttatactctctggatattctaaaacgtggtgctagttccaataatccaaaattgtaatcttagaggaatacaatgatagaaccatggtgatgggtgtaaaatttaagaattttgccatctgtgcagaatattcttgaatgaaacaacttgtccatgctttctgagttgttgacctgccattttcctcctattattgttgaagggagaatggacaggaaatggagcaattaccatgcaggcatgcattgacaattacccctaaactaatttgaggaactggactgttcagcaactttgtttttggagggaactggtacagttgataggagaggttttcaagatctagctaattaagaccacatagcttagagttatagtcagggagagcttatagttgggaccctaaagaaaagcttagagttgggacaatgtacttgccaagcagctgatttactgcatcagttcacatcagatttagattacacatgcttgccaagtagacatatatacataaacaattggaaattatggtcttaatgtttaattgtttggtgagtattgatgtatcaggacacacattgctttatgaaatatacctttatttgttcagccctcaaattattataatgatgttgtttctttttcagtgggacacagcaggtcaggaaaggttcaggacaataacaagcagttattaccggggagctcatggaatcattgtaagtcctattgagtttttgcagtttataagatctttaaaatcttaaactgatttttttagctgtactgtttttcttccgcgatgtagtactgaatgatttacgattgactgaataggtttacagtttacattggttgttattgaattgaatttcttccttctttctttttgcattatatgttgtgttctacttttcaagatctagacttccacgcatggagttaatacatcttacaatactttttcagattgtttatgatgtgacagacatggaaagcttcaataatgtgaagcagtggttgagtgagattgataggtatgccagtgacagtgtatgcaagcttctagttgggaacaagtgtgatttggttgacagtaaggttgttgatacagaagaagccaaggtaatttatagttttaaagaaatcataggaaatttctgcagtcatgctacacttagaatgtcatattcactgattgttgctgtcatcaacttatcagagatgtctgttgttagcatacatagatcaatgtagtatccattgagcttattgaagggatattgtcatattgtatccctggttgtgaaaatatttccagaaaccactatgtagcatgtaccttcttttgtagacctatatctttgtatgttcttggtatatatcttcctgaatgcattttcagtctctgctcttcaggactaaagactgaacatggtatcaactgactgaaatgttaatgtttaattgcaggcttttgcagagtcattagggatttcttttcttgagacaagtgcaaaggaatccatcaatgtggaggaagctttcttaaccatgtcgtcagacatcaagaaaaggtaggagtaatccatttgttgcacccttggagccttggaggcccatatttttccctagcttaattttgaacttctttctcaaattttgtcatgaacctttccatcctttgaaaggaaattccagttttgcactcgaccatgaaatttgatttcctaggctatgaccattctgaatattgcttctttatagctgatgaaagtttatgacaattatttgagggtgcaaatgaataaatttaatattagaaagttgaaatgttgatttaaaaaaattctaagaaatgctggtgaagaaagtttttaaagaaatggaaccatttaggaacttgggaaacgtgcccacgataatccataattcataagctgaaaataataggaccctcttcatgttgaataataaatgccgatgatgcagtttatgtaccttttgtactcctagttcctttccgtgcctttcaacaacaaacgaggggtctatgtctacctgactgactagtgaatttccttgccgtgcaacctctgcaggatggcaacccaacctgccgtggagaggaaaccaactgtccatattcacatgagaggccagcccattcaacagcagaacagcagcagtagctgctgctcatcatgaactcaacaagacgccgttcctgtcatggcactagccaaatgttggaggattcatttcgtcacaaggctggaaaaaaaagcattggattggatgatactttagcattagacaacatcatcatgcgtgcacaaagtgttcgttacttgccacagtttgtgatatcatcggtttgttaaaacagtttataagcctaaatttaatatatatgatgcatgatgttggaactgaacatcatgatgcttgatgcaagcttgtcactcttgtcatttgctggtgtttggaggcttgtcagtttctgcttattagcaggatgttgactgatgcaaccctgaaaaaatggacaagagtaatgcaggaggaaccaatgatcttgacatgatactactgtatatgtagtaattaactgctttaggtaatatatgactgtcaggtatagcaaggtaaatatttatctgacaaaatgaatcaacgaagctttaataaacttaaaaagaaagaacaatcacaagcaccacacaaggtacacgaaatgacatctgaaactgaaggattcgttctaagttgagcagcattgcttcttttcactattggcatcaccggcagcgacattgatcgtcttcccttctttgacacctccagcggcacctgccccgccttcatctgatgccacgggcttcttgctgatggccctgtaaatgtcaccgagaatcagctggaatgcctcctccacatttgtggcctcaagagctgaagtctcaatgtaggacagcccttctgcctcagcaaacttgtgcgcatcgtctgtcgcgacggcccgaaggtgcttcagatcagtcttgttgccgacgagcatgattctgatgtttgcatcagcgtggtcgcggagctccttgagccaccggctgatgttgtcaaaggttgtgggcttgctcacgtcgtagaccaggactgctcctagagctccacggtagtaagcgctggtgatagctctgtatcgctcttgacctgcggtgtcccagatctgcgccttgattatcttgccctccacctacatcaagtcaaagatttcatgcaaatggatcagtttcaatttttccaacgctaatgcatttgtttacattcaatagagagaactagtgttcagtaactatccaaaaaagataaaattgggaggagaggccataatttggaacttggaaagaatctgaactggctgatgagttgaaggccaaactccaaataagcatgacgcatatggcactggaagtttattactttatcatggtaagttcattagagggtgctatcccaaagtgtacaatttagtacaatctgactagaactgcagactattatatcttcaaagtatcatagagcatggtgtcacaattctctgtgttggtccattttcaatttcttggtcggtatataacaagtgtgtgctgattgtcattagcatttagcagcttaagcctcgcagctagacactgtcaagcctagcaggtacaacaagaaagaaagaaagaaactttaagaggttattaatattactgtggaaagtattacttttgttaaaaggaaattaaactattactgtggacagaggtactagtagctgtcaggcagttgctaagccaggtacagaattgagtgtgacagtgagatgaacgagtagtaaaggtggtggcgcagttgggattatggcctatcaggatatcacaatcaagccattggatcccataaggcacacacgcagctggcacctcgtcatcgcccacatgtatgtggatgagcgctccgctcacacactgttgttattttttaagcaggagctgcagcaacttgttactcctatctccatattattatgtatgtatgtattgagttcctcctctggtttttttttttaaaaaaaaagaagaagaagaagaagaaagaaactgttttctgtgtgttaaacgaaattagtggagtaaaatgatgcaagtagtggagtggcgaggtagatgtggaattgatgaaattggtgatagtagatcatggttgagcagaagcatgtgtggtagatctaggtagcaaagctcacgttttttttagcaggagaaaaaagcagaatgcgacagagaggggattgcagattggatccctgatctggatttgtcaaaataaaaaagaattgctggttgaagagaaagatcggatctaaggtagaggaggggttgcttgcagaaaatggtagatcgcgcgaggagaaagaggaattgaattgattgagaaaggaattacgaagcagctagggtagctagagctagtggtaagtacagtaagcaggaaggaaggagatgaaagatggacatacatggagggtgcgggtggcgaactcgacgccgatggtggacttggactcgaggcagaactcgttgcgggtgaaacgggagaggaggttggacttgccgacgccggagtcgccgatgagaaccaccttgaacaggtagtcgtactcctcctccgcacgccgcgtccccgccatctatccaattcccttcctcccttctcttctgctactgctacttctttctactgcctcttcttcacttcctcctcaacaacaacaactcaactctcaataaagccagctcactctagtctagtgggagactcactcctagatgacttcccagccgaatcaaccacctgtctccaccgttccttccccttcgcgattcgtgctccttgcttgccttcacggcaattcttacatatcacatctaccctatagttcaacaagttgttttactcattcatcgtgtgacacatccaacgatccaaaaccaacagatgaagttgatccgacggctccgatcgattagaaatcgcgcacctccctctgttccctatcagcatcgtgcaaaacgctaccccacccggctcgtagggcgctgatcgcgcaactcctaatctcctctcgcatgcgatcgatcctccgccctcccgtacgcattacggccgactcccgacgcctccgcttcggccaatcgacgccgtcatcctctctcgcctcgcgcgccgtcatccttgccgataggattataaccgggcatcggcgtctgtctcgctgccgtcaccccgcgccgacgggtgtggcactgtggcgtcctgaccgtattcacagttcctcaccacctggatggccgagaaggaggggatcatgatcgaccaggtcggctgcactggttgaattacctccagcctgacgtgtgacgtcaagcactgcaacttcagcgccaaggagcagctgcagaacctctttggtattcaatcctgccgatcccctacctccgtgtcctgggtttcttgagacagttaaattctagcaggggctctagcaatttgcaacttgatatcgtagtaatatatgattgttttttgtttattttacaattatttaaagaaacctgatggattttcttctgtatatataggtgagatgagaattttaaccaagctgattggatatatatcttttcactgcttatgagtggaaaagatagcattacagttcaataatttgcaatgcaaaaattataaatatagcttctcaggataactagaatgtcatattgtgataacaatgctgaaatttctttcaacggagtaagtagtgtgcctattgattgtctgcttttccctgactttcctgaaaaatactgatacgaacttatggctaattctgatattgataccatgatatgtctgcactaccaaagtaccaattcctgatgagtgcacactaattttgaggaaaacgattgcagttccaactaaaattagcttattattatttgttgagtgcattatcataactggttagtctcttctgacagttcaattcaaatgtatatccagattgacctgattcagggttgggcatgcaatgatggtcctgtgactacccgaaggtatttatttctttaccgtgtttcttctttcttctgattgttagccacttctattttgtagcaatctacaataccggagctaattgccactactcttgagaaatgcaaattaagcctcatactgcaagatgctgtaaggcatcgttaatagatagagaatctactcagaacattctccattttgatgtttgcatgcagattgatccttgagaaatgccatgcactataagatgattatatagaaattttggatatttttaagataaatttgcaatataacattgctatggtcatctgatatcattcttatgaaatgttttattttagttatttgtccagctgagcctaaaaaacatgattgagaagcatccgcggaatcaatcgtattatgcaggataaacataatattttctcctgcaatgtagaagaacctccccaaagggctctatgtatttgctctactcattggactaattggagatctttttgatttttcttcagagcacaatcaaacaacatgatgtaagcgccataaagttgacagacttttggccacagcgagaaagggcaccgacaaaaccattgggttgatggtcgaaggtggccagtgccttcgtaggtgagagaaatatggatttgccgatttgcaaaaaagatagtagtgttgctccttctaatggtgaccaggtcatgtgaacaggacaaaataaaagggaaaatgtgtttgatgggaggtgaataggaattgctaattatttatgatttataagaaaaatggtaaacttcttattgtaaataatgaattctattgtaaacgagatataaatcaaacattggatggtgatggatggtgtggacttttatgtctactcactgattatcaaagttgtacattaggaattacatggtttcagaagatggaacagttataatatcattatttttctaaaaaactaaacctatctcattttatgcttgatagccaaaacatataattctcttgattgtttgatttgcattaataaatactaccgtaacgttagtacgagcatattactagtatactatagttgataaaatacagtgataataaatttagcatgcatcatcatatgaagctgacacttgtaaataaatatgacagcttcaaaagtatcctcatgtgaaatttgattctaagacaaacaaacttaggccctgtttaagaccctgtttagatgggattaaaaccttttaatctctattgcatcggatgtttggtcactaattataaatattaaacgtagactattaataaaacccattctataaccctggactaattcgcgagacgaatctattgagcctaattaatccattattaggctatgtgatgctacattaaacacacgctaattatagattaattaggcttaaaaaatttgtcacatgaattaactctcatttatgtaattagttttataagtaatctatatttaatactccaaattcatccgatatgacagggactaaagtttactccctggatctaaacaccacctaaatcccacctcaaaatttttcaccctatcatatcgaacgtttaaacatctgtatgaagtattaaataaatgctaaaaatataactaattgcacaaattgcgactaatttgcgagacgaatcttttaagcctaattacttcatgatttgacaatatggtgctacagtaaacattggctaatgatgaattgattaggcttaataaattcgtctcgcagtttacaaatgtattccgtaatttgttttattattagactacatttaatactttaaatgtgtgtccgtatatccgatataacacgccaaaactttacgctactggatctaaacacccccttagcataagattttgacatatcataattcgtagtgtttctatttagttattatgataatcttatattagatctgtttattttggaacgaatacaatacttgccttagagatacgtcgctccaaaattgtgatgtcagaataaaatgctatgtacgtaaatctatgtcttttagctattctcttcttccacaccaagtcacgactcacgactcagatgttacatacgattgatgtatggatttcactaattcactgccttctataaggtgtgggagaaaatattgcactcctttatataatattttctctgccttaaaatattacaatcaagatgccatttgatctatcctacttccatccagattcgttagattgcaacattttggagcaggggtcaacaaaccaagctatcagaaaccgttacccaaaccgccgagatagttaatttgacatgagagacatttatggttgagagatgtgattcaatcggaatcaaaatgttgagggagatataatagacttattcgtatacatagacattcgtgcaaggagatcatggcctttcttttcagcctgctggctgcttaatctaccgggctttctttcattcattccgtattataaactattttgagtttgtcctaaattgatatttttataaccgagtttaatgtatatttaattaaactaatttgatactctaaatattgctacgtttccttataaacttatcaaactttaaaattaattgacctaggataaacttatagtaatccctccctcacaaaaataagttcattctttttactaattttttaagactgcatgtaaattttcactacccggctttttaagaaagcctgaaacataacagagtcttgcatgaaaacaaactgaaaaggaaaacgaaaacacatcagtaacgctgcccatctccacgcaaggagaaccaaagagtaaacagcaaaaaacctctcctcccagtacaccagtcaacaacagcactatccaatccccaagtcatctggcaaaacatctctaggcccaagttgtgccatctattccattagcttagctttttaacaacgttgttcagcggagcacaatctccttccagcgttgcatcgtacacgacctgcaaaacagatttaggtaatttatcttcaactaaagctcccaacaaagacttgcaatcagaccaacttcacccccccccaccctcaaaaaaaaacttttgcttaactattctaacaccatcccaaaaatcctaatgtgattattcattttctttatctactctcgatatatttatcttctatttttataaactccgatacaattactgttcaacaacgaacttattctagaataaacaggaggggctaaaaatgatcctgttgtgagatggagcggtactgtgcaacggaaggattaataaaccggatggaattggatatacacacgcgtgtggatatattctggcatggtaggcctctcgcgtaaatttatgattgcaacatctaattaacacatgggtagaacatgcatgtatatgcattaataacaagttggaagcagctatccgatcgctagctggtttcttgattggcacatactatatgatgatgggttgatatatgatcgatgataggtgaaaataacttgcaactgatccatcgatcgggattctcccttataaaaaaacctattcatcgatcaatccatcgagaatcgagatgatgatgaccgggtggattatataccgtcaacacaaatataaaatcgttcgtacgaaggagcgcacactaattcctattaacgtatatgctcagactctagctcctttaaagattggctacatcattaattagtggtaggcgagtgacaatcggtgatttggtttagtggatacatcatatatgcatcgatcatttttagacatgcaaggcatattaattatatatataaatattaatacatcatattttaaatatagtaacttttgattatgaattaattaatcacataattatttattagatttatagctaaaattatttgtatgtcgaaacggagaggagtactatattatcatgatggatcgtcaacatgcacctctcactctcgggctattgtctgttcatccaccatatacgtacgcgtatccatatatttatatggtcgatcaatcacgcatattttacacacgccgcctactgatcgatcgatctctctgtctctttcacagggacgatacaaacacgttagcgacccaataaacaaaggaaaacacagtgcatatatataatttgcatcgatcgggattcgggaccaaacatcatcatatccatgagatgagtggccagagcgcggaaacaggggacgagccgaggccaggcaacctcaaatattagtctctctatctcagatattagtatcattttttctcatgtcataatataaagtatatactccttctggttatatattaattgacgttttggataaagttgagattaaacttttataactttgaccatcaataactttaaaaatatttagtttaaagaaactagaaaaacatatatagatttttctttcaaaacactataataaaaataaatatgcatttatttattatatatattataatagaaaaataaggtcaaatgtatatcttgtagagcgtgtcattgtctaaagtgtcaattaaaatgaaaccggagggagtagctattatctctttattctttaaatttgatttattttaaatcctctaccattaaaccccaatcatattacttgtatgtacgcatgtgatctaattaaggaggtaattaaattctttgttggtcttcatgttagaagtggttgagctttatattttgggatgtaggtagtagtgtattagatccctccatatctttaggtctaaatactgactccgccattttgagtaagtggcttgtttgtccatcatcacacattgatcggagagtggattttaaactcttgagggaacgccccctcattgtttacatgttactgaaatagttataaaaaaattaagaagatatattaatatatgatatatcactccacaacatatacaagttaaaattttaacttgtgttcgctaaaaaaagttaaaatttaacttgtacatgtcacaaacgaaaaaaaattgactataaatatacgttaattagttctaatttattttctttttttattgtgatatgtagaagttgaatttgaacttgtatgctgtatgtttgtggagtgacatattacatattaatacatcttttaattttttaaaaaaattaataactattcgattaacatgcaaataacgagaggatatcccctttagagtttagaatagtttctccattgatcgacatatgtcaaaaaaatataacaaaacccaatctacaaagatgctcctcctacccggccgatagaggttgtgtttgtatattaattagtttataggtgtgagtgtacaaattagtatggacatacatgcagggagtggatcggagagatatatagatagcaaaacatgaaaatcgattagatggtggtatcgatgtatatatagagacatgtgttgtatggtgaagtaggtagtgggctccacaattacgcgcgcactgcagggcagctatactatatatgcatgcaggatgcagctgaggccgggcttgagctcaccgtcgacactaacaaaacaaaagaaagcaatcaagaagctatataggtatgggcagcgccggcgtggaggatgcagcggcggtggcggcgttcctggagcggtgcgcgccgtcgggagacgcggcctacggcgagctcaaggcggtgctggggcgcctccacgagccgaccactcgccgcgccgcccgcgccttcctgacggcgctccggcctttctgctccagcggcgactcgctggcgcgctacggattccgcatccacgacctctccctcctccactgcgcccacgaccaccaattctcaggtactccgatgcatccatccatcaattggagtaattagctagctagtcagtcttttgctcgatcgatcgatccatcatctgcatgcatgactgcatcgatcgatcgttcatgcacctccatcggtattaatttttagttactccaatcctaagtagtagtagtagtagtagtagtagtaattagtaaagtaattaaattgactgcctgcgcctaggcctgaggagctagctactatatccatggatcgatcagagtcaactgaactaatataacgtccggcctgttcgtcatcggtccatctctcctctcatttcatctacttcttcttcttcttcttaaaaaaaaaaccaaaacaataagctagcaaacggtccttgtcgatcacttgtacatcatctcaaaagtctgaataatgcagagcgcgcgacggcgacatccgaccaatcacagacatatgcaacttgttgacaaattaacattctacaaggaattaaggcatcgttcgatcatcacaaataataccaaagctagctatagtgtactcactttctagctagccatacatatatatactactgtagtgtacatctatagatcgacatgacaatgcaattagtccctgccatggaatttcaattgcgtgccgtccagtcatctccaacgtactccgatccatccttcgatcagcgaatatttactaccatacctgtcggcccacaaggatccaatcgatccatggaatcatcgatcgatcatgcatatatgtattccacatattatatatggaattgacacatgtctttttctctctcttgtctgccccttatggccttatcaccccccccctccgatccacccatatcatttgtcggtccgtggattattccaaaaacatactagtaaaagattaagaggaaacgctagctatgactagcatcatatatattcatatgtaggagctaccgtacgttccacacatgcaagaaattaaggtcctgtttggtgaagcgtctcgtatccattgctactttcagaatctttagctcccaccatttatattttttttagataagtaccatttatattttgggacttagcagccagaaaaatgtgaagctcaagcatctttacattctctctgtagctaattatactcaccccagcttcccagattaatagagcataaggtaggtccatcaatgattgtgcctagttgatcatacattaattcaatcctcgaatatgtggtttggttttgacttaaaaagttgcagcaacacttaaggatagacaagtagggcatgctacatagttggctttgtagagagatgggggtgactatggtacaattttatcgatatttcaacaatttgaactcgatgttttagacgtgactacatgttggacgttcaatttgtgaaaaaaaaaacatcaggcttgaatttaaacaccgacaaaatttcataaaaatgaatattaaaatggttaaacacaatccaatcacatttaaaacattttctctctaacacacgaaacatcgggtttcattgttgaaacattaatttataaaaaaaaactagaatattagggaaagacctaatatcaaataattaggaggggtgaggctttgaacccaggtcgtttagcccaccaccttatgaagctagccggaagactcctgggcatttctcaaaacattaatttatagatccacgtgattaaagatgaaaaggtaagaaacaccatcaaaatcctgttgcagatttttttatctaactcatgaaacatcaagtcaaaatagtcgaaacataaaaaattcacaaaaagtattgatttatatatggattcttacttcattccgagcagtggccaacgcctgccatgactaaggtggaaaataaggagaaggaattgacaagcactcatgaaatagggaggaaattaattaaaaaacgatgtgaaaaggatagagtgccgtgtcgatgtgagataaatggatttacgttgggaatgggtggcatggcgttagatttttattccaaaaccatgtaccggttagaaacattccccatgattatcccatatattttaaactttttaacgtagatgggttttatttctattttataattataatcatataggatatttgaacgagcaacacatacgaatttatcaaacacagagcaaagaaaaatgtgcagtaagtattttagctaaacaaacagttatatggtgcattcatgccacacatatatgtagcatactttttttttccaattagaaaaaaaaccgagaaaagtgtatttccccatgttatttagtaatatatctttcagcttcaatggagcaagtcttcgagaagatccaatatacctcgcactcatcagaataagtggtgcttaacgtggttagagagctgaggaaaaaaacaataaatcaacatagcaacaagttagcattcatgttcaaaaaggaagaaaaaaccaccaagttggcacctttgaagatttcacctaacccacaaaggccacagccatgagtttcttccaccttcccttttattttggagaactttacagccaaaagcaattgagaataatttgatagggaccaaagaagactactcatgatctactaatagaagtattgaatttaaaaatataaagtttttcaaaaaaaaccctaatagtaatacctttgagaaaataaaaaagaggaaaagaaataatgagaacaacctcatcttttcgcttatacttatacttataagccaaaatttgaatttttaactttaaatttagagttgttttaggctttttgattacaatttattttccaatctttacttttaaatcactataagaacacgtatataaaaattttaatcctaaattattttttatttgtaaatatattgtttagctttttttttcttaaatataagccaaacgatgatcctataaaagtgtaacagaatcgggagtatatactctactcctactcgtacgagaaaagagaagagaagagaaattacggtagtacccctgtctccttcgtcactggccacggcggtatataactccctccgacctccccgccaatttttccgcctgttttagttttcctcctttccacatctcatccatcgattcatccgatccgactccgacctaaccaatccaatggccgccgccgccgaggtggagtccttcctggcgacgtgcgcggcctccggcgacgcggcgtacggcgcagccaaggccgtgctcgagcgcctccaggaccccgcctcccgccccgacgcccgccgcctcctcggcgccgtccgccgccgcttcgccggccccgccgccggggaggaatgcttccgcaccttccacttccgcatccacgacgtcgtcctcgatccccacctccgaggtatatatccaccatctccactcccgcccttccccctcgcggattcaggggtttaggagaacccttcggatgtcttgtcatgtcacccgcccttgcttacttggttgctcgcagattcctccatctgcttctcaataatttttttacagtttggtaactaaatacctttcacgatttactactactctatttgctagtaatttggattcttgctaaaatcttttcttggctgcttggctaattgagtaattcggaactgctatttggtagttggtactactagtagttagttgctagtaatggttttgtcaccactcgcaactgaccagccaagcaagtatgctatcaccacatatagtgagcctctgcctcccatggtaaagaaaagggataacctagattggaatcaacaactgtgctgtgcacactgttctttataaatgacaattgtatactgttggttctggccaaattgcttaccacgtgtgatgctgctgtaagcatttcaaggatgcatgtgctaggacagatttgacccatatgttcagtttctgggaacaattcgtgtggctacttggataatttatgccttctgtttgcctcattaaaataaagacccaccaatccacaatgctctgcctgtacctttttccttttttctcttttcaatttttatttctgctgaaggttattcaccttttctaatttattccttggcagaactacctttgcccaacttatcatcatatggacaaaagcatggcatatgagcctggttcttaacttatctcataacaacaaagttaggacacaagtcaaccaaccatattattataactagtagtaatattggacagcgtagtagtctttaaatctgagcaatttcctagattgtctcattgtctggagtatggacctgacatgaatcctcttctatcgttttgtcattgttatatttatgtgtgttggctcaatggtaaaaccttcctatttttttataccaatacattacccctttttatcccctcttgtatggtatttattgtttggtttccataacttacaaatttatcaactgtttataggattccagcagaggaagaagctaacgatgatggaaatacctagcattttcattcctgaagactggtccttcactttctatgagggcctcaatcggcatccagattccattttcagggataagacagtagctgagctgggatgtggcaatggttggatatccattgcacttgcagaaaagtggtccccttcgaaggttggcatctctttcctgtgtacatttttaattcattgctactgtacagaggtgggagctacagcacttagacatttactaagtcacaagatatgagttttgctaatccaatgatggtctaccttgatttggtacgtctagaaacaactattgaaagtaaggcactgctctataccacagaactgtttcagtcttggtaaaatgttggcgtcctttgagaatgaatagtaaggaaaactaacatgtcatttgatattttaaactgcatgtaccactgtatctaattaattagcacttgctctatgttacctcacttgttcaacctttttttttttttgccacaatccaagctgagcattgcttgtttcttttgaaggtctatggactggatataaacccaagagctgtcaagattgcatggataaacctttacttgaatgcactagatgacgatggtctcccaatctacgacggggaggggaaaacattgctggatagagtagaattctatgaatctgatcttctctcttactgcagagacaataaaattgaacttgatcgcattgttggatgcataccacaggtacagtcatgctaatatattcttttttgaaaggaaattatagtaaaccagacggaaggaaaactcttactccccaaatcctcccttttcagattcttaacccaaatccagaagcaatgtcaaagatcgtaactgaaaattccagtgaggagttcttgtattcattgagtaactactgtgctcttcaggtaaactgaagaatattttcagtatattcacctcagtgaaaatgaataaatatgcatgaaatataatccattcaatttatctaataacaatggtgaattatctccaagctattggaatataggaccaaggcgtgaacttctacacttgatagatcttcatattctttaaccccagtaatccactgcttgttatcttagtgcacaccttattgcatccagggttttgttgaggaccaatttggccttgggttgattgctcgggctgttgaagaagggatatcagtcataaagcctatgggtattatgatatttaacatgggtggtcgaccaggacaaggtgtctgcgaacgactatttcgacgccgtggatttcggatcacaaaactgtggcaaacaaaaattatgcaggtagtgatgctgttatgaatcagatgctggtattatgcaggtgtctttcatgctgacattatgggctggtttggtcaagaaattgtactttatgtttcacaatatcttttactaggcctagacttttcatcgatgagtttatgcttttacatcacatgtccattttatttaccatcgttagtcatattactaactagttgggttaattgcaggctgctgacacagatatttcagctttagtggaaattgagaaaaatagccggcatcgctttgagtttttcatggatcttgttggggatcagcctgtctgtgcacgcacagcttgggcatacatgaaatctggtggtcgtatttcacatgctttgtcagtgtatagctgtcaacttcgccaacccaaccaggttccttgtgtattctttagatttctaaaagcaatgtaatgacaggaaaaatactaattcatataactttcaggtgaagaaaatatttgagtttcttaaagatgggttccatgaagtcagcagctccctggatttgtcttttgatgatgattctgttgctgacgaaaaaatacccttcctagcatacctagctagttttttgaaggagaataaatacaatccttgtgaaccaccagctggttgtctaaacttccggaatcttgttgctggatttatgaagagctaccaccatatcccattaactcctgatgtaagacttggtgtctgttatagttatagttacattcactcattagaaattaaaataattgatattttttatcgtcctccagaatgttgttgttttcccttcccgtgctgtggcaatagaaaatgctcttcgattattctcaccagcgcttgcgatcgttgatgaacatctgaccagacacttgccaaagcaatggttaacttctttagcaattgaggtaccttaatttctctcttttctgtgagtgagtcttgtgcacattgaccagaatttgtttggcgcatctgagctctactttagtagtctctgtcatcttctttttctttgttttactttcttttgttttaaaaatatctttttcataaggaaaagtggagaagaaagtatggacaagactcataagacactcattctattatagaatgcaataatgttgatgctgctacctccttttgaatttcagggaaaagccaaagatacagttactgtaattgaggcaccacgccaatctgatttgttgattgagttgatcaggaaactgaagcctcaggtggttgttactggcatggctcagtttgaggctatcacaagtgctgcttttgagaacttattaagtgtaacgaaggatgttggttctcggttattcatcgatatttcagagcatctggagttgtctagtttgccaagctctaatggtgtattaaaataccttgctggaaagaccctaccttcccatgcagctatactatgcggtttagtaaagaatcaggtgcctgtaactattgcagcagctaattttaattgagtgagcttaaatttctctactatattgttttcttttcaattgctttatcttattttggattaaatccttgcaggtttattctgatctggaggttgcttttgccatttctgaagatgcagctgtttatagggcattatcacaaactattgagctattggaagggcatacgtctcagatcagccagcactattatggttgtcttttccatgagctactggcatttcaaattgctgatcggcatccacaacaagaagtaaacatgacttgtctcttattcttaatctcacgcatccttatggtgatcttggatatgtaatggcagaaaccagctacttcttaatttatgaattggtcttcctttgttggataaaacacactatagtaaacagctaaattttttagaagagtttgatgtgttttttacttattttatcttatgtctaattataagcgaagttaataattttccagtggactatttttgtgaacttaaagtatcttttttggtttgtggtctttatttttttttcttgctctttttcagagactgcctgcagaagtgatacctcagaagatgataggattttcaagttcagctatgtctaccctaaaagaagctgaatttttcattcctgactccaaaaaatccagtgtcattcatatggatttagatcgcagcttcttgccagtgccttctgcagtgaatgcctccatttttgaaagttttgttaggcagaacattactgagtctgaaactgatgtccgttccagcattcagcagctggtgaaagatagctatggtttcccagcagatggttgttctgaaatattatatggcaacacctgtcttgcactcttcaacaagcttgccctttgctgcatccaagaccagggcaccttacttttccccttgggcgctaatggtcactatgtctcagcagcaaagtttgtgaatgcaaatacgctgactattccgacaaagttagaatcaggcttcaagattgaaccacgggttctagctgacacacttgagacagtatctaggccatgggtttatatttctggccccacaattaaccctactggtttcctgtacagtgacagtgatattcaagagctcctttctgtttgtggtaaatatggagctagggtagtaatagatacctccttctctggtctggaattccaaactgatggctggagtcgatggaatttggaaagatgtctttctgctgtgaattgtccaaaaccctcgttctctgtagctcttctcggagaactgtcctttgagctgactgctgcagggcatgactttgggtttctgattttgaatgactcatccttggttgacacatttcacagtttcccaagcttgagtcgtccccacagtacgctgaagtacactttcaaaaaactactgggcctcaagaatcagaaggatgaacacttctccaatctcattatggagcagaaggacacactaaagagtcgtgctgaccacttgataaaggttaccttctcataacattctgaatgatacttccaattaagctttcattcacaattctgatccctttggaagtaagatcaacggcagggcttaaaatatgaaattagtaactttatgtttccatgatattatattcaaaaactagctagacctatcttgggacattgaaatgatctggctagaatttgctaggcatactttgcacaatgctgcaacttactagacatactagactctgagattttttttttttgactgaaagactctgagatttttgcagctacgtatggcggtttcttcatctctctgttttttttgctatgaacagacacttgagggctgtggctgggatgttgctggcagtcatggtggcatatcgatgctggcgaaaccgactgcctacatcggcaaaataatcaaggtggatggttttgatggcaagctagatggctgcaacatcaaggaagccattctcaggtccaccgggttgtgcataaacagcagctcatggacaggaataccggatcactgtcggttcagctttgctctggagagcaggaattcgagcgtgcaatgggctgcatagttcgcttcaagaagttggttcttggaagcaaggcttttcatcagatcaatggtaactaaatgaaatttcccatcgtcgtggaaactgaatcctgaagaaatgtagccactacatacatattattatccattgttagcctgtcctgttcggggctgattgaacatttttgtgcttagaaaaagaataatgagcacaggaaggctggtatgaatgtagtagcaaactggaattaagtctgaacgacgtattggcatggcatatttctccagaagatgatgcttcttttattttctgctatctttatgcttacgtttcatccatatttatccctactcgttaagatggcaccacaaatatgcggatgagattattgtatttcctttatggtagtattattatcacttttttctttaataatacgaaatatcctgatgtaagtttgctgccttctttttttagtaatcacaaaaataaaatgtctaaacaaaaattccatggcattgatttattgatttaaaaaaggaacaacttttccttagactagtaatatctagtaacaaacaaactttagaaaagcataaatacatgaccgtgttaccttttagatatatatttaattatttgtttcattaaaaattgttgtacaaatatgaaaaatgtaaatcataatcaaagtttttttataacaaaacgatatgcaagaaaataaataataataacatatttttaaataagacatggttaaatatatgttacatattaacattgtcgtgtattgaagaaaaagaaaacaataatacttaggttaaaatatgtgaaaaatcaaaggcattatatattttaaaaaacaaacaaaggagtgtaatcaagcctggtttagttccctaaattttttttcaaaaatatcacatcgaatctttggacacatgtatggagcattaaaaatagattaaaaaaactaattgcatagttaggggggaaatcacaagatgaatcttttgagcctgattagtccctgattaaccataaatgctacagtaacccacatatgctaatgacggattaattaggctcaaaatattcgtcttgcggtttccagctgagttatgaaatttgtttttttcattcgtgtccgaaaacttcttccgatatccgatcaaacattcaatgtaatacctaaaaattttctttttgcgaactacacatgccctcaatggccgaaccaactcctagattggttaggcggtagtctagtctgagctttttgtcgccaggcttggatgtggccgttagggggtgtttgggagagagagaccctaaggacttattttttttagagctcccaacccccccccccagttgtatcattggctaggtaggggttgtttggttgttgcttaagattgacatgactcgcttgccagaagtgtgacataacacacataacatagtccacacaagtatatcaatgtttggctagagaataagacctcatccttttccttttgcatatgcttagcggccaaaatttaaaattgtaatcttgaatttagagctgattttgaggttttttcgtcgaagtttatttttcagcctttgtttttaaattgctataagaacacatatataaatattttattcataaattattttttatttgtaaatatgtcgtttagtatgatatgtgagcccatggagcaccaattcgtggccttccaaaattaaaataagcaaccaaacattgcgacatggctaacgtataatgtgtgatcatgtagcaatatgtggcactcaacaagataggacggtaggattacttgttgggatggatcgtctcctttttttggtccttggggatgacgcgttctcagattacatacaactccaagttccaatcaatttcttaaagaaaagaaaaaggaggaagaagtgttcaaaccgaagcaaaacgggaaggaaaaccaaccaaatccaagaagctgcttctatggcgacggcggcggatggcgtggcggtagcgaggcaagcggagctccggcggatcgagggcaactcctgcttcaacaaggcccgcctcggcgccgccatcgactgctacaccgaggcaacctccctctttcccctccccctccccaatccctagctccccctttccctttccttttttcaatctttggcaaccgatatgattaactccacgatctccaggctatcgctctttgccccgacgtcgccgtctactggctcaaccggggcctctgccatttcaagcgcaagtatttctctcccttgtttcttcccctccctcactatctctttcttgggggaaaaaacttgattcttttttaatgtgatacagggaatgggctaaggtcgaagaggatagcaggagagctcttgcccttgatgacactctggtcaaggtaacatcatctcaatgtcccttgttcatacataaatcaagtgattgttacaggtcttcaactttggtccagggtcactatttgctgggatgtgccatgcttgagaaggaacaatgtgctcttgctatcaaggaattcaacaaggtttgttattatacttctatggcccttgtaagtttgcttcagcttcttctgaatcatatcctgagctcttcaccatgttattgtttaggacaaatcttaacataaacaaagaattttggaattgagaaatagcttaaatgactttgtttcccttcattttactacattggaaaggatggctcatttatttgtgaaaggggtagaatttttttggctggggcaatcatggaagaaaagatgaaaaaaaaaagcctaaagtgacttgcatttacaaaaggcttgagaagactaatactacttacatttggaatcgaaggggatatttactaatgaatgctaatgttgtgtcttcacgcacctacatattgatattttgttgctacattcatgttgaaatgggatgttgatctcttgccatgctattgctaataccatgcttatgttatcatgtaaaacaggctttggatcttcttaagtcttcgaatttgggggacaaaatggcggaggacatttggcaggttcttgcgaaggcaaaataccaagattgggaaatacactccactaagagagtttggaagatgcaaagtttaaagtatgttatgcatgaaaaataattgcaataataatgttccataattgtgttgcagattaactgtagtgtgaatcttgggtattggtggccaatttactcctataacaacctggacactccctttattatctaaaatttatgatgctttaaactttctaacaccactgtgtcacatggacaattagggaagcatgtgaaaatgctttgcaggagcaccactttcttagtggcacacttgtgggagatggctcaaccaatgagtatacagaccaactgaaattgttatcagaagtcttcaccaaagctacaatcgacgatacaccaacagatgtaatattattatctatgttatctcatgttcaacatctttgtgctagcatattttttttctctgtgatcttaggctgttgctacctgaaaatctaggtgcctgactacctttgctgccaaataacctttgagatttttagagatccagtgatcacacccagtggtataacgtatgagaggtccataatccttgaacatctttgcaaggtacacctcccttgctaatttgctatctgtttttcagaaggtttttggctctgcatatctttagatgttgttgctaatatttcactagaaggaccatgtattagctggctacatctacaaataatgtctccaacagatgaaatacttgattgtataattaaaaagaataagtcaaaatcgaactagtttttttttttgaaaggaacacagcagggaggcccaaaaaaatcgaactagtggaatatttgaatcagcacaatgctgcaatatttaaatatgaaactgctgtagttcatatattgggtggattatgtgtcaatgatctaatttaagctatagtaggattcaatctaaacacaaactataatttaaattgaaattaaatgagaataatgtgctcagtcactgcaatcttccttttgggttttaggtgggcaatttcgacccggtgacacgagagcctctgaaagagcatcaattggttcctaacctggctataaaggaagcagtccaagcctacctcaagaatcacagttgggcctacaagttgaactgatgatgttgctctgtagttgcttagtgctaacaacaggtgttgataaaatgttgggttgtcaagggggaattctttgcttttctgatgtaatgtataagcaagttcattcgtgccctcatggaattgattgattcttgggcaacttctgacgaaccttggacaattgtacataaaacatcatagcagaaccttggacggtttcagacataccgtgccaaaatgacaattctcagtgacaaattattcttttgttcggtaattcactgttacagcaaccagcgaatttaacatgcgtgatactagtaaataccatttgcaactgatgaataatatgaattgaatacttcactagtacatgttttgtttctcccttgtcaatagcaaacatgtaggttgtatgttattttgggttcggattgcctctctgttacccgaaggattcaatggccagaatgggatatctgaagagtaggctgtctggtgagtgacatcaggaagatcagtgtcgcttgtacttttagagtaagactaataatacagccgacctgttggctataaagttctttgtagtcttctttcagcctgtctatataatagttactccatccgtttcacaatagcattttccacattcatattgatgttaatgaatctagacatatatatctatttagattcattaacatcaatataaatgtggaaaatgttagaataacttacattgtgaaatggaggaagtagctatttacaattaatacatggtccacttgtctctctcacagagtttattggttcttgtgtccaaaccggctgtaagtttacagcccgcttctcctctctctcctccacctcagcatttagccggcttatagcctactattatacttgctcttatggatgttaatcgcttgtacttggtggcacgcactttagttcgtctgtctcagcctaagagcaagtataataatgagctataagtgtactataagcttatgtggaggagagaggtagaaaaaaacaagggtgttggctctcatgcaagagctagcttaacacaatctccaagacaaatacattaaatgtataagtgagagatagagagcggagaagaaaattgtagccaaccttatagctaattattatatatattgactttaagatgaactaatagtaggaagtgagctatactattattatcttactctaatagctatctactgtcactcgggagtttattcgtgagatcctctgtattgatgctacttaatcaatgaagtgccatcgttatcttttttttttaaaaaaagtgtgcaaacatgtaggagccctattggttactcatatgtaaaaagaataaattaaagttaaaatttgaattttaaaactcaattttaaattttattttaagatttttcaatatagttttttcagcatttacttttaaatagctaagaacatatgaataaaagttttattttttaatcgctaataaaccgttacgacttataataagttttgggcaaacggtggggcatgtaaaa

SEQ ID NO: 7919 - DNA, 18388 bp, Oryza sativa
ttcccaaacaccacctcagtgtagtatgcatgtaatatgggagggaaatttggtttggaacttaaatataatataagctctctatcatagataaaaaaatattcctttcaaatatggcactgtttagtttcaggggtaaaatgttttggcgtgttacatcgtatatacgaacatacatttgaacatttgaagtattaaacgcagtctaataacaaaacaaattacagattctgcctgtaaactgcgagacgaatttattattaagtctaattaatctgttattagcaaatgcttgctgtagcaccacattgttaaatcatggcgcatttaggcttaaaagattcgtcttgcaatttacatgtggtctatgaaattagtttttttctatatttaatacttcatgcatatgtccaaatattcgatgtgacagggtgaaaaatttttgttagggactaaacagggcctgtataggagtactccctccgtcccataaaaatccaacctagtattggatgtgacatatcctaatactacgaatttggacatacaatcctagattcgtttttttgatagagggagtactcccttcatcctctaatataatggattttgatattttgtttgcactgcttgaccacttatcttatttgaaaaagttgtgtaaatataaaaaacgaaaagttgtgtttaaagtacttttgataataaagtaagtcacaaataaaataaataataattctattttttttaataagatgaatgattaaacaattcaagtgaaatgttaaaatttgttatattagaggacggatggactactccctccgtcaaaaaagacaaaccacgagtttccgtgtccaactttgactgtccgtcttatatgaaatttttttataattcgtattttcattgttgttagatgataaaacatgattaatattttatgtgtgacttatctttttaatttttttcataatttttttaaataagatgaacggtcaaacgttaagcacggaaaccagggtttgtcttttttcctttttttttttttttttttcggagggagtagttacgaaggggcacagggaaatcatcaaagatggggaaattgtactcgtagctctgtaagggctggatcacgagctgcataggaatgtggtggtactagcgcaaaagcagggatggtagtggggtgcaacgtgcacggctgcacgcaccaaaaaaatgtgtacgcacatcacctcaccagcgtactgtatggagtacagtaacagcacgcaagcacacgcacacggagacacgagtcgcagagataggcttttggcgggaagcgggcctctgccattccctcccgccatcttctacatcctgctctcctgtggccttctccttcctccatcgccatggttggactggatcactggaaattggatgctaaagctttgtttgcttccaacgacatgcatccaaaagaaagggcgcctgcttcccggcctcttgttctgcttgcttgcctgccactgtgccactgccgaccaatctcctctcttcttttcttgtgatatattcctatataaagtgttactttttgttctatttgtcaatgaactatatattgtgtgattattactgctctccattactaatattcaaacaagaggagaaaattaatgttcaacaaactcgtcacaaattaagtttgttatgtttgtccgcccctctgcctgtcgggatgggatgcatatggatggagtatgaacaaacctgatctgaagtagtatagttggcaaagtcggtgagatttgagacaagggtcaacaaagtacttgaggtcgttgcatgcgttgatgagtcgtattaacgatcacttcttctctttatttattgatgaagcctgctatcttttgcaggaagccggtcggttatccgccgccgaggatgaagagctgttgaggaggctgcgactgctgcggccattccgccgccactggaaaaaagatggacgacgacgaccatgaccaccacggcaacggcaacacccccttctccttggccttggcgcgctcctgcggtgaagttcatctcatcgggccggcttgcagtttagcccagcccagcaaggcccattggcccactgggagtgggaggaacaggaaaccgacctcctcatcctcgaagacgaagacctctctctctcgctcgcctggcgccgccttcctccaccccactctctcctcctccgccgccgcatcctcaccaacccccaacagccctccctccctcctcgccaaaggtaaaaaaaaaacttagccggatctctcatctggagacttgctcatccttatctatcttttggggatttcttcatctcattctcatgcatggtgtaggccaaagtttattgcgatggatctgatgtttgcttacatcctttcctagtcaatttcctactctgcctaggagtatattagagcgagggagtctttttacaaaccaactctgaatctgaacaaaaaaaaacaatacagagacctgtctgtgccgataatatgaaaatctttgctttctacacaattactgcctttggtttttgggtaccactataaatccagtataaaaggagctctgagatatttatgattttagtgtactaacatcatcagtagctgaaacaggtgatgatgagtttctacgctctaatactaaggcccttcactctgaatatgatagcttattttttattttagggagatcaaatactctccctaaacagtaaacacccgaaattactagtctagccaaactccaaccatcaaacctagtttaaatctctaatctttctttggtctaaaattattaatctctcaaaatttactgctgtgaggtaagtcttttccttttccatgtccaaatcaatctaggctatgttctggtatggttcaatcccctccccactgctaagtaagctaatgttatgctctcgaacttgccattgccagctgcacttgtagcagatgggttctgtccaggattgatattctagcactgactagctcgagtgttttctagtataatcggaacttgtattacaaattcccacttttagttatactgtgatttaaagacaaacactagtttaggtggtgtttggatccagggacttaactttagtctctgtatttagacactaatttaaagtattaaatatagactacttacaaaactaattacataaataaatgctaatttgcgagacaaattttttaagcctaattaattcataattagagaatgtttactgtagcatcacataggctaattatggattaattaggctcaatagattcgtctcgtgaattagtccaagattatggatgggttttattaatagtctacgtttaatatttataattagtgtccaaacatccgatgtgatagggacttaaaagttttagtcgcatctaaacagggtcttagtcttgaggctacatcagcaaaccatatctatcttcagtttaaattcatatatcccatatagctctgtgccttggctaaaggtcaactggcatcagtgtggcaccacttcttcctgtttctgtaacattctcttcttcagtttctgcaacaaccggtgcaaactaaagatggcgggattcggcagcctggcacccaagaccaagaactttgtggtggctggaggactgtctgctttcgtcctcggcgtgtattactacaccatgagagcggtgggaggcacagatgagctgcaggtcgccattgataagtttgaagacatgaagaaaaatgatgctgggaactcatccaccgcgggatcctaagaacagggtttagaattggctccatgtccgcctctatactgaactgatgacacttggttttgatcctaagaacatggtttagaattggctccatgtccgcctctagccctctatactgaaccgatgacacttggttttgtacaataatggctcgatactaggttttgcttatgctttgatgataggctggaataatttttgactgaatgatggctgcagagttggattgcagttttaattttctgaaagttcatataacagtatgatgacctgtgtaacttgaaggtttctatttgtgtgtgggtatgcaaaagacaacaaaagtgtagcaatgttatgggactattatcacgttagattccccctcttgtatgatgtatcaatcacctttttattgagtagcccaacgacatatagcagttcacatgttcacatttatttcttaaaggatgaaataatatatttgtaaccggacacaaaagaatgggttgtttggttcatgtgctatgagaggacaagcgtatactaatatcctcttctggaaggaggaagaagaagatgacaaggtccttctcctccaagaagctgtagtattattcaggtttaaggtactgatctaatgaagacaatctatcatcaaattgagctttgatctggtattgccaatgccatattattattccgaggactttgtagtttgacctacaatatgctttacaataatccaatgtactactccatttaaaaaaaaaacctaatatagtattcagattcatggtactctagtactatatttgttttcctttcgaatgaagggagtattattatttgcccttatcaaattaccaaaatgcctctaaacttatcctaaggccttctttggttaatcccatcgggattaaggtgcggaattaatcctactcaatcccttctaatccctgtctcacgcggaataatagaacagtctagagtgagtaaccaaaggtgcttggacatgaataaaaggatagtaaaaaaaaactatcaactatgaaaataacacacgtgatcttttctgcttattcaacgtattattgacgtggattatttgctctatacttctaaaattacgggctcaaacaatgttcttatagtacattgcatatacaaacttaggccatgtttagttcccacgaaaaacttttcaccatatcacatcaaatgtttagacatatgtatggagtattaaatatagacaaaaaaaattaattacacagattgcgtgtaaaatgcgagatgaatctttaaagcctaattgggccatgatttgacaaatatggtgctacagtaaacatttgctaatgatggattaattaggcttaataaatttgtctcgtagtttacatgcggaatatgtaatttattttgttattagactacgtttaatagttcaaatgtgtatccatatatctgatgtgacacgctaaaaattttcacccccttgaagtacacagggccttatactatattcccctacatttctccctcacacacgggagtagttgattcgaccctttttttcttgtgatgcgtattcgttgctgaccatatatatcatgtaagtcaggctcttctagtgtggctacgagctgagtccgacttgagtttattcttgggctattcctcgactctaggttgggtgagagacttgtttgtcacgagatgagatggaagtagcactaatctttggctaagaacaagtttgagttggacttatcacgcaatcacactagatgagcacgatctagcttgggaatgagcaattttcaaagcgacagtgttggtttttgcaatataaataggtttcgaggtagaatatcaaaacaaggatgattaaagttgaggcagtttatgcaattttgtgataaaaaggaaatgggacggattaaaaaaacgtagtggcagtgtcgtaaaaaaaataggattagaggggagcgtgggaaaaaagaaaacgggtaatatactgtctaacttcaacaggtgaccgtctcagattgagatctccccttggcctccctgccccgttaataattacagtattctattctctctctagcaaacaagtaggagtaattttcctctttctttattctactagtctagggaaaaaaaaaaagtagtcgatcgatcgatcgagaggtttaatctgtcctccctctcgccggtcgccgccctcgtccccgccgccgccgccgccgttagattgaagcagagctacaggcaggaggggcttctcctcgcgcgccgccatggtgcttggcaacgtcgccatcctcgtcggctccggtgagtcactttccgccgtctgctccctcctgaggtccacccgcagccctagctagcttctcgtcgcccagcccagccggttgactttcgacttggagattgatagatagataggagtagatgccacttgcaaccatggcgcagtcatagatagattaccaaaccaatccctcccacttctagggaataccactaccaaatcccaacttatttgctcatcttgtacggagtattttgctttaccagattccaatacatagattgatctagccttttagggccggggccggggtttgtttagttcaactaagctttcgcttcaaaccagaggggaacttattacctgggtatcccactgctacatgaaacaccactgtcaaatcccccccaacttagtggcttccccagtacataggctgatcctgcctttctttttatcttaagtataattacgccttcactaaataactatactagttttactcggtaccaatgtttatgttgtttgcttgcctgcaggaattcttggatcagttcttgtaggtggtgatgccaaactccctagtgccggggaggtactttctggtgctgccaaggtattgtattattgcccctccatgccctaactatcaacccagaatactactgctatattgattatatatcttataactcaccgtcacatgattcctttcccccctagtttgtcaagaagcatggaaacgaagggaaagatacatcgtctaacaccgatacacacaccgctcagctattatctcaggtcaaccatctcagacaggagatacaatctctaggatcaaggcctgttacagttgtcaccaatgctgctagatcaggtaagttcctgctgactagttactatgttttagttacagacttatgcatgggtcacagatcatacaaacataaatttcacatgacactagactttgtgtatgccccgatgtcgacatctcttgctaagaattaatgcgattttagagtgttagatatttctattacctttcgatttttttttcagacttggtctgttgtttttatatctacatgttcgacagagctacaattgcgttgtctgttcatatacagagtataccattttgcgattcagttcacatgttcttttctttttctttccttattattatttgtcatggtcttggctatgcactactgattatcattatattattcgctgcattataaaggttcttggacacgtgatagtttttataattgctaataaactttcatcatgctcttttgcctttaaacatacacaattacatatgtttgcccctctaggttacacacattctttctcaaatgtccttgaacgacattcatgtaaatccttcttctgtaggacctggtacatttactataacagcggtggttgttgctggggctgttggctacgcctacattaagtggaaggtaatgtttgattctttcacctcaatggaagtacagaatgaggaggacataatctttgattattctagttgctatcttgatgtttattgttctgtccgtcattctagatcatggacgcaagtgcatattattacaatcctatctgcttgccatttcttgtttcactgttctagctagtttctaaagttacatagatttgcagggctggaaactttctgatttgatgtttgtcacgaagcgtggcttatctgatgcttgcaatgtagttggcagccaattggacaaggtttcagatgatgtcactgtaagtttttaacttctttcagcaacgctgaactcaaatgtgttacttgtgattccatgttttcattgttccaaccaaaacatcttactggcctttgattttcactattcagtctgcaaggaaacatctcgctggaaggattgatcgtgtggatatcagtttagatgaaacacaagaaattattgaagggacaagggatgaggttggaactgtttttccttttattttttgtgtttacttttatagtttttgatgcattttcggcgacctaatggcatttcatgactgacttgtaggtcacagtcatccatggggatctgagtgctttccaagaggatttacaatcagttaaccttgtagttcggagtctggtatgtgcctcgtaccggaacagattctaccttatttactgaatatccagatttctaccttatttactgaatattactcgtgtacattttttgtatcttgtatcatgcaggaatcaaagcttgtgagtctggaatacacccaggtgagtagaaagctcatgtttttttttttaggaaaagtagaagctcatgttaccactacatattaccaacaaactcatcgacatgctcctaatgctatcttcttaaaatccttttaggatcatacggctaatggaatatctgacttggttgagttcacccagaaagccactattcgccaggcaagtttgaatggtctagtgattccttaatgccatgcttcttctatgctttatttaacaaaaccagttgcacctcaactataagcatattcttttcctatatgcttattctgaagagatgtttttattttcaggtcccagcagcatccgttcctccagctattggatcttcagagcgagttgttaggagggtaaaggcttgcacttttcccagctttgtcatggtcggaacatgccccagtttgttgacttgggttcatgtgtttctggttgcaggtttcttcgttgcctcaatctactgctcttccagctctgccgacaaccgcacctgcagctgaaccatcacctagggcagaggtgccacaggtgtggtttcagtttgatgttgcactttgttgcatgcaatttcagtttcctcttgcgctttccatgattgaaacgagctattgctggacttttgcaggaggaacagtggggttttgtgagcaaagcatcatctagtagggaaggattagggcgtttgcagcagcagcggagtgttgtgaccagaacgtcgtctatgagggaaggatctcctgaatcttcaaatggagcctcatcctcaactggagcaagcacaggaaggaacacaagcacaggaacaaacacaagcacgggcagatttggtgggctgaggcttcctggacttgggtttcttgcaagttcgacgagttagttgatgaggtgtttttatttaagttaaaagatggtgctgccaggagctctccattgctttgcttgtagttttaggttgtacagtaggagagaagagataacagtagcagtgatgtgatggaacaacacatatacgtgcggggctgggctcgtttgttcttgaggaggccaaatttttgtagaaaaaagagaggaaaacatgtgcacctatgtatctatctatctatagccatgaatgcatcatccagggcaacaccttggtctttgatgtcgagatttttaacttaaaatgccaagagtactagtacttggttaattaattttatgaagacgagtcaactggttggttgcctttgttactagtatcttgtatgacatatgccgatatttcatccagcttagggccatgattcgtttcagacttctgttactgtatatatgtcatatgatatatgatttgcttggaatttctgttaagatcccgctactgtatctcgtatgatatacagtatatgattcgtttggtatgtctgttaagatgtgctactgtatcttgtatgtgacatgctgatatttggtactccagtagagatcttataacaggaaaaaaatatgaaagaaaacaaacttacaaaacagcagccgcctgatatgatttgatgagaaagagaaggaagaaaaagaaagccgaagatatgggccgtgtttatatgggcccaagccctaagaggagagtctaggcgacgggacgggaggcttcctcctcctcctcctactcgagactcgacgccgccacctccacctcccgtctcgtctccagaagcttctggaacacccttccggcttcaattcccccctgctcgggtcgggtagctcccttccatcatccatggccgacgccaccgccgccctctcaggtacagtaccatcttccaactcaactgttgacctagtactagtactgaggtctgaggtctgaggtcgcttcgaattcattggctgcagctcggagcaaggtgcaagctttcctcgaagcggctcgtgccggtgatctcgactccctcaagagtaggtgcccccatgccttcctctctctctcctttgctttccttgcgtttcttctcatctcctctcctcatgcgccattgcagagctcgctgcggcgctcgacgaggagggcaagggcgtcgccgccgtcgctgctgccgtcaaggacgccaacaagcgcaccgccctgcacttcgccgcccgcgagggccgcacccacgtctgtcacttcctcatctccgacctcgccctccccgtcgaccccaaggacgacgatggtactactaactatcactatctcttactctcatctgatttcttcacaatctctcatccatcagtttacatccactccaccaggtgaaactccactcatccatgctacgcgccaagcccatctccaaactgtaacctatctgcttcaccatggagcagatccttccgttgcttcttccctcggagccacgccattgcaccatgctgccggcataggtaaaattcatcatctatttgccatttcacttcattctttccatggattgatggtctatactcttttcttttttctcccattttgattgtgccaacgcctctataaatgcgtccaacaccactctccttttttttttgtttgcatctgcagggaacctggaccttatgaaactatttctctccaagggggttgatgttgaatcagaaagcgatgccggcacacccctcatatgggctgctggtcatggacagcaagaggcagtcaaacttttgcttcaacacgatgctaaggttgctcctcaataaatccactatctcctatctcacttcatatctcactgatttaacgaacctgagcttctagtcattctgttcagaaatcttcattatgctgaaattttaatatgtcgccttttaatattgtcaaatactagtagcaactgacactttaacagtaaccaccaagggttctcaagcttgctattgttaagaagatgctatcttttggttctaatagcatctgtatctattatgtttctttgaattggacaggcttctctttgtttagcactcaaccacctttcaatcagccgttcatgtggcctttccttaacttttttactgaagctagttattgcttggcagccaaatactgaaaacgatgatggtattacgcctttgttgtctgctgttgcagcgggttccctcccatgcttggatattctaattcaggtacacaaatctaatttcaagagtaaaataccaaaatctgttgcttttactttaggatattatccacttcgatgccattcattggtcatatggtttctgtatgctatatttccttgtttagtaatctggcttgtgcaatgggggttcagacaagctcatttttcgtgttattgattagattgctgcatggcaaatcatagtatgtcacgttcttatatgtgtgctacctatatcaaaagattttgataagaggatcaaagtgtctgttcttacttttgtcatatgctgtttctgttcttggttttgtttgatgctctgttgcttctacaccccttacatctatgattcgtataaaaaaccgatcatataatctgctacacaggcaggtgcacatccgaatatcagagctggtggagcaaccccattacatattgctgcagatggtggaaacatggaaataataaattgtttacttaaagctggaagtgaccccaatgcatgtgatgatgtaagttgtacattaatcagaattccagtgtatcattaaatatttaaatgtcaatagccaggttcatgtgcattgattggtcaaaatgattcgtaagagggtgtcaagcgtttgctgtttgttccacaccatgtatgataatgaatatccctttcttggtcagcatgtgttactctgaaaatttccaccgtttcattatgcagtgaataactattgtaaccctgtagtgtattgtttagctggattggcaactgcttttgcaattccatcatctgtcctttcttgcattattattgagcaaacagcactgggctgcataatttcactgaaggacatgactgttgattttggtgtagcagtagagctaagtaatgctaatggttgaataactattatattcttctacaggatggactaaagccaatacaggttgctgctttgaggaataaccgtgaagttgtggaacttcttttacctttgacatcaccaattccaggtgtttcgagttggagtattgatggaattatagaatacactaaatcagtcgaggaaaaggtgcaacttcaatcttctcatgatctattactagttgcaagttctttgtcgatcccaatggttgaataaattttgcaggcacaggtaaaggaagctacaactcagaaagcagacagattacaagtaccacaacttgttgaggtgcattgcaatttactttatagttttattcatcttcaaggctccaactatttaataactgtaagactcaagatctaactattgctgcaaatggtgctttcctgacactgtacaggtgtcatctgaggcaaaagagagatcattggaggcaaaatcgagaggtgatgatgccttcagaaataaagactacctagtagcagtagatgcctacacacaggtaagaaccaaaccgcaagacagcgtgtatttttagaaaaggcgcataagtttatcatatgaactcaaattcaaagagtagaatggaatggaactacatttcaggctattgagttaaatccaaacgacgccacgttgcattcaaacagaagcctttgctggctacgggcagggcaagctgaacgtgctctggaggatgcaagagcatgtcgagcgctgaggccagactgggcgaaagcttgctacagggaaggcgcggcactgcgcctgctgcaggtctgttgatttcagtgataagtttgggaactgataggcagttgtgattacctacctatatatttgttgctgaagttgttccggtgataccaacagaggttcgaagaagccgcgaatgccttctatgagggggtgcagcttgagccagagaacggcgagcttgtgagcgcgttcaggtagtaaagccttcctctgtgagcaaagaaaagcaatgaattcctccgttgtttagcaattaacatagacatatatagggtgtcgttatgattggtttggaactcatgtgtgtatgtgtttgttattccatgcgacaagtgaagttgattacttaaactgattgacagggaggcggttgaagccgggaggaaattccatgggacggacaagaagcaaaaggcagatgcatcaacgtgatgtgtttttggaatggcttagacctatacaaggaggaatcactgaatctgtaccactagattagtattagtttggcttggccaagaaacggagcagctgaaatctgaacacctcttttgatgttgctacaaatttattatattagtatcaattactatcagattgaattctgtttgtgtcgtggctggttctagattcgagtggctaaactgtacccatgttcttcagcatttctttaatctacggtattgagaaattcatatcttcctcatcataggatgattgattacctaaggagctcccgcgtccctctgaactcttggcatgtcaagagacaatggaattgatggcatcacgcatggcattaatcaaagaaaatatcatgagtgaatacacagtactatgacgacgataaggttggggggggggaaatgtttttagagaaaaaaaaactccataacaaagatgttggaaggaagaaaaaaaaatgttgggaggaagaaaagaaaaggtctcagtctatatatatatatatatatatatatatatatagagagagagagagagagagagagagagagagagagagagagagagagacgcaatggcccaaagaagaaaaaagcccaataatagtaagtagaaagcccgacacagagacagggcagaggaagaggaaaagctgttcgtctccccaaccccaaccgcgacgaactagggcgacgggccatcgccgtcgtcgccgccgccgccgcagctcgcgctcgctctcctcctctggcgccgttcctctttctcctgcgtcgccccatcgacctcgaccgctcaggtaagcatccgctcgatcccctcgccaactatcccttcaattacctactttttaggacgttaggatttgccatcggaatcgcggtgttgccgcgaatccggtaattgatctctcgcccaccttcctgcacatgcactttttatgcaaagaatcctcctaatagccaattgtctaggcagatctggcagccgaagaaacaaagatagatgatcttgaattaggggatgactcctccttttaaaataaaaaaaatcaagataaatgccactacactgtttgctctgatttaacttggcacacagtcatgcctagtttacagcttcttcttctatgctccatactctctgtcagtatcaaccaagctgtataaatgtttctcatcttccttcacatacaaccagcacaatgtgcttcattgtattatgctaacatatatgatgaacatgcgctttttacgactgcatttcaatacctcctgtgtatgtgcttgctgcattgtgttactacttaagtaaacttcatgctgatgcctcaacctggtttccttttggttacttctattgcagcgtctgtttgtaactttctgttatgggtgactacaccatccagattagcaccaagctaatcgaccagcttgctcgtgatgacgagaagatcaaaaagaaaaccaggaaacccaagcctaagaagactgtcaaacaacatcaacaagagccccaggacaactcaagggaactcccagcttctgaacccaaggctcctcctggctggccactgcagcctcccatgtatctccccgtaacccctgctcctccaccacccccacctgctttttcagagctggaagccatccgtgccgttctggaagagagcgaaaaggttcaggagaagctggataagcagcatgctgggatgcgtgatgaactcatcaagaaatcaaaagacctgcgtgacaaggagttcaagctgccgtaccaaaaccccacgccatgcactgaggagaggtcaaactgccgccagtgttacgtgagcaatgcacaggacccactcaagtgtgctgaggcagtcaagagatttgaagcatgtgttcgcctggcgaggcaaaggggcaacacaaaagttgctcagtagccctggaagatttgtgatgaggaaagaactgatatacgattttgctttgctgtgatgatttaataacctggaattttgatgagacctaagacatatttctacaattctaatggcatcgcaccaggctaggtgaggaagctacagatccttgagtttagggattctgtattgcaaatattgggtaaaaatgaaacatgaattctgggtgtttttctctgattggtatcatgagtgaaagcgttatccatacataatctatgctgttgccatttgcgttttgcaaaacccttattactcgtctgctttttactccctggtttctgttgtggtttagctatgctactgcagcatggttcttcttgtggtatcaatccctgattaaaacccaaccattgatagtcatcttgtgggattgagcattttttttcttactggtaaccgagcaaggcgagcatgcattagtaactgtttagtactgcattgttggcttctccaacaagatgtcttggtgtaaagataagatgtcgaagaactttatggtgtagtagtttcagaagtagatatctgatatcataatgcactattacagtcagtcttaagcattcatggatgtttaagatgttagtctttcagaaatcagaatcacctggatggagtaccttaatttgcctggcttacaatctagaatagtgtttttgcttgtgaaatggtaggtaattatggagacctaagagatggattccatctgtgtaggagttggaacttggatttcttttttgctataatactgtctatgttgctgctaaaaataatccactgcgtgtaatagctacggagtacaaaagcaagcccaatatttttttcagcttgatcaactaggtacaagatggaaagctagtgcatgtgctgtttgcagctaatgtttaagtaatgtatactccattttacacttgtgaaggtctttttaagtgaaatatctgcggctgtcgtgatgcccgtatatacggtcaaatgtattgaatatcagaaagcgaagggtataaagaaatggaggaaaaaagaaggcaagaaagagatgttgcataaacgctctccattaaataattcagctttcatccgtgacgtttcagatgaaagggcagggaaccaaaaggcaggcaaaggtgtgagtgaggctgactagcatttcgcttgctcttatcatcttaagatgatggccggtaaacgttcctgaccagacaaggccccgtgcgaaaattcgatcaatcaatctatgagtggtaacaggaatctatctgatagtatggtatctgtcaagagattagttacttgttgtgcttgtcagcttcatcctctaggtaaagcctgtggtgcattgcatatgtacaaaacctcagcttgaagcttcagttgggaaaacagaatggtataaaacttcagttcagctgggagtacaaacaggtagcgtataaagtagagtagtacacatatacacacacgcagatggagtggttggatggatggatggatcatgagcagtgatgagagacgtactacgcattagcacttgcagtgtcaacgtaaagttgatggcactggcgccttgcaatttccctgtcctgatggactctctgattctacgcttcaacgactttatgcttgatgtggttatccattattataactaaatgttgttgcaacgcctgtgttaatttgtttgcctgtcatacatacatacatacatacatacatacatacatacatacatacatacatacatacatacatgcatatatttttacacttacaccaccgaatactgatcgcgttgatccatttcatggatgattctgagcacacgcctttaaactgtacaactagctaattgaatcagatcgagaacaggccatccaatgattacatttatacaggagatgataataataacatgagtaataagagtagaggctgaaaatttgggagaatatatgtgccaaactgctcaattaagctagctatgagatctgaatttgatagcagtgccaactgcccatgcatatataatactagtagaaaacagtaataatttaaaacagtcttggtttatgcatggtttgatgtgctgaacatcaaggaagcaccatgtagatagtagaattaatatgaggtaggatatatatggaggaggggagaagacaggatgagcaagaaagaagaagatagagattacagagggcagggcagacgaactgcagaaatgaagaaactaaagaagaagtaaaaattaatcggtggtgatgtgtactccgatgacgatgacaaagagggtgatgagggcgaagtagatgatggagtggacgacgatggacatggcgctggtgtgcaggttgccgaactcgacgaagtggtgcctcccggggagctggatgagcagccccggcgagagcagcacgaacagcaccaccgcgatcaccaccggcccccagtctgacatccttcctaatttcctttaattaatgcttgctttgctttcgatcattaatccttcttcctcctatttctttcccgatagagcttccttgttgttgttgtagttgttgttgttgttgttaggagcaggagggtagtaagtaagcgaggcgagcagtagtaggagcaggtaaggtagggtatgcagatgcaaatgactcactcactgtcctagtattggcaa

SEQ ID NO: 7920 - DNA, 22207 bp, Oryza sativa
aagatatgggccgtgtttatatgggcccaagccctaagaggagagtttaggcgacgggacggaaggcttcctcctcctcctcctactcgagactcgacgccgccacctccacctcccgtctcgtctccagaagcttctggaacacccttccggcttcaattcccccctgctcgggtcgggtagctcccttccatcatccatggccgacgccaccgccgccctctcaggtacagtaccatcttccaactcaactgttgacctagtactagtactgaggtctgaggtctgaggtcgcttcgaattcattggctgcagctcggagcaaggtgcaagctttcctcgaagcggctcgtgccggtgatctcgactccctcaagagtaggtgcccccatgccttcctctctctctcctttgctttccttgcgtttcttctcatctcctctcctcatgcgccattgcagagctcgctgcggcgctcgacgaggagggcaagggcgtcgccgccgtcgctgctgccgtcaaggacgccaacaagcgcaccgccctgcacttcgccgcccgcgagggccgcacccacgtctgtcacttcctcatctccgacctcgccctccccgtcgaccccaaggacgacgatggtactactaactatcactatctcttactctcatctgatttcttcacaatctctcatccatcagtttacatccactccaccaggtgaaactccactcatccatgctacgcgccaagcccatctccaaactgtaacctatctgcttcaccatggagcagatccttccgttgcttcttccctcggagccacgccattgcaccatgctgccggcataggtaaaattcatcatctatttgccatttcacttcattctttccatggattgatggtctatactcttttcttttttctcccattttgattgtgccaacgcctctataaatgcgtccaacaccactctccttttttttttgtttgcatctgcagggaacctggaccttatgaaactatttctctccaagggggttgatgttgaatcagaaagcgatgccggcacacccctcatatgggctgctggtcatggacagcaagaggcagtcaaacttttgcttcaacacgatgctaaggttgctcctcaataaatccactatctcctatctcacttcatatctcactgatttaacgaacctgagcttctagtcattctgttcagaaatcttcattatgctgaaattttaatatgtcgccttttaatattgtcaaatactagtagcaactgacactttaacagtaaccaccaagggttctcaagcttgctattgttaagaagatgctatcttttggttctaatagcatctgtatctattatgtttctttgaattggacaggcttctctttgtttagcactcaaccacctttcaatcagccgttcatgtggcctttccttaacttttttactgaagctagttattgcttggcagccaaatactgaaaacgatgatggtattacgcctttgttgtctgctgttgcagcgggttccctcccatgcttggatattctaattcaggtacacaaatctaatttcaagagtaaaataccaaaatctgttgcttttactttaggatattatccacttcgatgccattcattggtcatatggtttctgtatgctatatttccttgtttagtaatctggcttgtgcaatgggggttcagacaagctcatttttcgtgttattgattagattgctgcatggcaaatcatagtatgtcacgttcttatatgtgtgctacctatatcaaaagattttgataagaggatcaaagtgtctgttcttacttttgtcatatgctgtttctgttcttggttttgtttgatgctctgttgcttctacaccccttacatctatgattcgtataaaaaaccgatcatataatctgctacacaggcaggtgcacatccgaatatcagagctggtggagcaaccccattacatattgctgcagatggtggaaacatggaaataataaattgtttacttaaagctggaagtgaccccaatgcatgtgatgatgtaagttgtacattaatcagaattccagtgtatcattaaatatttaaatgtcaatagccaggttcatgtgcattgattggtcaaaatgattcgtaagagggtgtcaagcgtttgctgtttgttccacaccatgtatgataatgaatatccctttcttggtcagcatgtgttactctgaaaatttccaccgtttcattatgcagtgaataactattgtaaccctgtagtgtattgtttagctggattggcaactgcttttgcaattccatcatctgtcctttcttgcattattattgagcaaacagcactgggctgcataatttcactgaaggacatgactgttgattttggtgtagcagtagagctaagtaatgctaatggttgaataactattatattcttctacaggatggactaaagccaatacaggttgctgctttgaggaataaccgtgaagttgtggaacttcttttacctttgacatcaccaattccaggtgtttcgagttggagtattgatggaattatagaatacactaaatcagtcgaggaaaaggtgcaacttcaatcttctcatgatctattactagttgcaagttctttgtcgatcccaatggttgaataaattttgcaggcacaggtaaaggaagctacaactcagaaagcagacagattacaagtaccacaacttgttgaggtgcattgcaatttactttatagttttattcatcttcaaggctccaactatttaataactgtaagactcaagatctaactattgctgcaaatggtgctttcctgacactgtacaggtgtcatctgaggcaaaagagagatcattggaggcaaaatcgagaggtgatgatgccttcagaaataaagactacctagtagcagtagatgcctacacacaggtaagaaccaaaccgcaagacagcgtgtatttttagaaaaggcgcataagtttatcatatgaactcaaattcaaagagtagaatggaatggaactacatttcaggctattgagttaaatccaaacgacgccacgttgcattcaaacagaagcctttgctggctacgggcagggcaagctgaacgtgctctggaggatgcaagagcatgtcgagcgctgaggccagactgggcgaaagcttgctacagggaaggcgcggcactgcgcctgctgcaggtctgttgatttcagtgataagtttgggaactgataggcagttgtgattacctacctatatatttgttgctgaagttgttccggtgataccaacagaggttcgaagaagccgcgaatgccttctatgagggggtgcagcttgagccagagaacggcgagcttgtgagcgcgttcaggtagtaaagccttcctctgtgagcaaagaaaagcaatgaattcctccgttgtttagcaattaacatagacatatatagggtgtcgttatgattggtttggaactcatgtgtgtatgtgtttgttattccatgcgacaagtgaagttgattacttaaactgattgacagggaggcggttgaagccgggaggaaattccatgggacggacaagaagcaaaaggcagatgcatcaacgtgatgtgtttttggaatggcttagacctatacaaggaggaatcactgaatctgtaccactagattagtattagtttggcttggccaagaaacggagcagctgaaatctgaacacctcttttgatgttgctacaaatttattatattagtatcaattactatcagattgaattctgtttgtgtcgtggctggttctagattcgagtggctaaactgtacccatgttcttcagcatttctttaatctacggtattgagaaattcatatcttcctcatcataggatgattgattacctaaggagctcccgcgtccctctgaactcttggcatgtcaagagacaatggaattgatggcatcacgcatggcattaatcaaagaaaatatcatgagtgaatacacagtactatgacgacgataaggttggggggggggaaatgtttttagagaaaaaaaaactccataacaaagatgttggaaggaagaaaaaaaaatgttgggaggaagaaaagaaaaggtctcagtctatatatatatatatatatatatatatatatatatatatatatatatatatatatatatatatatatatatatatatatatatatagagagagagagagagagagagagagagagagagagagagagagagagacgcaatggcccaaagaagaaaaaagcccaataatagtaagtagaaagcccgacacagagacagggcagaggaagaggaaaagctgttcgtctccccaaccccaaccgcgacgaactagggcgacgggccatcgccgtcgtcgccgccgccgccgcagctcgcgctcgctctcctcctctggcgccgttcctctttctcctgcgtcgccccatcgacctcgaccgctcaggtaagcatccgctcgatcccctcgccaactatcccttcaattacctactttttaggacgttaggatttgccatcggaatcgcggtgttgccgcgaatccggtaattgatctctcgcccaccttcctgcacatgcactttttatgcaaagaatcctcctaatagccaattgtctaggcagatctggcagccgaagaaacaaagatagatgatcttgaattaggggatgactcctccttttaaaataaaaaaaatcaagataaatgccactacactgtttgctctgatttaacttggcacacagtcatgcctagtttacagcttcttcttctatgctccatactctctgtcagtatcaaccaagctgtataaatgtttctcatcttccttcacatacaaccagcacaatgtgcttcattgtattatgctaacatatatgatgaacatgcgctttttacgactgcatttcaatacctcctgtgtatgtgcttgctgcattgtgttactacttaagtaaacttcatgctgatgcctcaacctggtttccttttggttacttctattgcagcgtctgtttgtaactttctgttatgggtgactacaccatccagattagcaccaagctaatcgaccagcttgctcgtgatgacgagaagatcaaaaagaaaaccaggaaacccaagcctaagaagactgtcaaacaacatcaacaagagccccaggacaactcaagggaactcccagcttctgaacccaaggctcctcctggctggccactgcagcctcccatgtatctccccgtaacccctgctcctccaccacccccacctgctttttcagagctggaagccatccgtgccgttctggaagagagcgaaaaggttcaggagaagctggataagcagcatgctgggatgcgtgatgaactcatcaagaaatcaaaagacctgcgtgacaaggagttcaagctgccgtaccaaaaccccacgccatgcactgaggagaggtcaaactgccgccagtgttacgtgagcaatgcacaggacccactcaagtgtgctgaggcagtcaagagatttgaagcatgtgttcgcctggcgaggcaaaggggcaacacaaaagttgctcagtagccctggaagatttgtgatgaggaaagaactgatatacgattttgctttgctgtgatgatttaataacctggaattttgatgagacctaagacatatttctacaattctaatggcatcgcaccaggctaggtgaggaagctacagatccttgagtttagggattctgtattgcaaatattgggtaaaaatgaaacatgaattctgggtgtttttctctgattggtatcatgagtgaaagcgttatccatacataatctatgctgttgccatttgcgttttgcaaaacccttattactcgtctgctttttactccctggtttctgttgtggtttagctatgctactgcagcatggttcttcttgtggtatcaatccctgattaaaacccaaccattgatagtcatcttgtgggattgagcattttttttcttactggtaaccgagcaaggcgagcatgcattagtaactgtttagtactgcattgttggcttctccaacaagatgtcttggtgtaaagataagatgtcgaagaactttatggtgtagtagtttcagaagtagatatctgatatcataatgcactattacagtcagtcttaagcattcatggatgtttaagatgttagtctttcagaaatcagaatcacctggatggagtaccttaatttgcctggcttacaatctagaatagtgtttttgcttgtgaaatggtaggtaattatggagacctaagagatggattccatctgtgtaggagttggaacttggatttcttttttgctataatactgtctatgttgctgctaaaaataatccactgcgtgtaatagctacggagtacaaaagcaagcccaatatttttttcagcttgatcaactaggtacaagatggaaagctagtgcatgtgctgtttgcagctaatgtttaagtaatgtatactccattttacacttgtgaaggtctttttaagtgaaatatctgcggctgtcgtgatgcccgtatatacggtcaaatgtattgaatatcagaaagcgaagggtataaagaaatggaggaaaaaagaaggcaagaaagagatgttgcataaacgctctccattaaataattcagctttcatccgtgacgtttcagatgaaagggcagggaaccaaaaggcaggcaaaggtgtgagtgaggctgactagcatttcgcttgctcttatcatcttaagatgatggccggtaaacgttcctgaccagacaaggccccgtgcgaaaattcgatcaatcaatctatgagtggtaacaggaatctatctgatagtatggtatctgtcaagagattagttacttgttgtgcttgtcagcttcatcctctaggtaaagcctgtggtgcattgcatatgtacaaaacctcagcttgaagcttcagttgggaaaacagaatggtataaaacttcagttcagctgggagtacaaacaggtagcgtataaagtagagtagtacacatatacacacacgcagatggagtggttggatggatggatggatcatgagcagtgatgagagacgtactacgcattagcacttgcagtgtcaacgtaaagttgatggcactggcgccttgcaatttccctgtcctgatggactctctgattctacgcttcaacgactttatgcttgatgtggttatccattattataactaaatgttgttgcaacgcctgtgttaatttgtttgcctgtcatacatacatacatacatacatacatacatacatacatacatacatacatacatacatacatgcatatatttttacacttacaccaccgaatactgatcgcgttgatccatttcatggatgattctgagcacacgcctttaaactgtacaactagctaattgaatcagatcgagaacaggccatccaatgattacatttatacaggagatgataataataacatgagtaataagagtagaggctgaaaatttgggagaatatatgtgccaaactgctcaattaagctagctatgagatctgaatttgatagcagtgccaactgcccatgcatatataatactagtagaaaacagtaataatttaaaacagtcttggtttatgcatggtttgatgtgctgaacatcaaggaagcaccatgtagatagtagaattaatatgaggtaggatatatatggaggaggggagaagacaggatgagcaagaaagaagaagatagagattacagagggcagggcagacgaactgcagaaatgaagaaactaaagaagaagtaaaaattaatcggtggtgatgtgtactccgatgacgatgacaaagagggtgatgagggcgaagtagatgatggagtggacgacgatggacatggcgctggtgtgcaggttgccgaactcgacgaagtggtgcctcccggggagctggatgagcagccccggcgagagcagcacgaacagcaccaccgcgatcaccaccggcccccagtctgacatccttcctaatttcctttaattaatgcttgctttgctttccttccttaatccttcttcctcctatttctttcccgatagagcttccttgttgttgttgttgttgttgttgttgttgttaggagcaggagggtagtaagtaagcgaggcgagcagtagtaggagcaggtaaggtagggtatgcagatgcaaatgactcactcactgtactagtattggcaacgtacgtacagtacagagagaatgaaagagaaagaaggtgaggtgcggttcgtgggagtggatggatggaaagcacagcagagaagagaagagaagcgcaggttattaggctcgaattcgaccggtgcctgctctacactgcaactgcaactgcacttgttgatcatgctttcattgccattccatatttctttctgtaccggttgtatgcggttggtgcggcttcgctttctgttgcacatgctgcttgcgactcattgctaccgtttcctctttctccacataatactcgcagcaaccatctactgctgttacttactatactacttctctattcacatcccatctattaatctatagtattattactatatgtgtatgtattatctgcttatatatctcgttgattgatttcatcctgcacttgcagcgattactttggtcgtcaaagtcatcattttgctgattacccggaattaaggacggactcctgtctatatagcatatatactcctgtcacaataggcagcagtaccatcgctcgtctttatttatttatttttacatttattgataacggacacacaatgaatgaatatatataatttcatgctgagctcaactagcaaactaaactagtaaaaaattaaatgcttcttgcatgcctgagcctgactcagctagtgctcacctaatgacactcgatcttcttttcctttctgaacaagctcaaacgcatttgaagagagcactactgctaattgcgtagtaattgcgtgtgctaattagttgctagtaatagagaggagcacagactgttcgatggtgctatctagctagctgcagcagcaggagctcctccctttttgatgcttggacggattagatagagggaactattacaaccaatctcaagcttgtggctctagtaagtgcttgtgtttcatgtctcgctttcagccttttctttctatggccggaccaaaattgcagcgcaacaggatatacagatcaaacaaatttttttttcttttctttacttttgtgcgttgaaaaagaaaaagaagccgatcaaggtcggatacgaaaccaaaagccacaagtatgtctggaacatatggattgagctatcaagttaagttgtagctggtccaggaggaggagatgaccaaatacaatcgatggagtgacctggatatgctgctgccattcaaaagcagtacctcaatcaataatgcatggacattttcataccagtgcaaaacatagtattcatcatccatatatttttgtcctttatatatatatatatatatatatatatatatatatatatatatatatatatatatatggtgtgttccatttcattaatcccccccttttatgacgcattcgtggtgatcgacgggtctgtgttgcttcatctgaatgaaatcataactacttaacctttgctctggaaattaagatgaaaattattaagccagttcttaaaccaaatcatcagatagatgaattgatgagagtaaagcaaggaatctttttttggtgcctaggctgcttgcacaagaagatatatatctccatcagcctctccaactaaccattaatttaagagatgatataatccaactgcatttgtgagatgagtagagacaacagtagtacattcattatcgatatcaggatggaaaatgtgcagctcagtgacgcatgcaatcagccgagatgtcgtgtcagtgtgctaatctcaggccacctttcgtctggatcgatcgcctgcctaattcacttacgtttctccaacctgttgttttccctcttaactgtaatccgcgtaagcatactgcagaggtcaagcaaagcggctggcagtagcaggcttgagcatttagtttttggttagaatctaacaacatgattaacaaatcgattaactttcttcagctgaaactctgattaagatggaccgagcagctgagttcagtttgttcagatgctacgttatgctgccagtacctttctggttatttaatcattattatgctaggcagataccaaatttaattcagttccgggtggagctagcaacgccacaccacaccacaccacacggataaaattcttggagatttgttcaatatagattgtgaaatactacactctatagatgtgtgatatatcctgaagcttggttgcaggaatagaataggatggatatatggatggtcagtcggttgtactgtgcacataatgtgtagcttttgttttgtagctcaacttaatttgacatccatccagttccaggtccaggtccagggcagtcgctgtgaatggcgatggggcaactacttcatgctttccattaccattgtgccacgcaaaatgccaccaaaattcttcctccttgggaccctgctgctactgtactgatgctgccctgcactcccaatggttttggttgcacttgcagcaattaattaaactgcctctgctgactatatgttattagtatctccctattatagtacgagataactcttgaggtttacaaactaccacattaacaattatattgtgttgatgtagattaattgacacagttttatacaaaatataattgtatctattgaaaaacaaggtaagagttgtgtatgaaatctaaaacatattcttaaaaatctattgtacgcaaaatacaattggacgtatagacatagaagctagtggttgtatatcaaatgtaattctactttcaaagatctattgtatacaaaatacaaatatctatggaaacaaaatatatgtgtatgccaaatccagctcttactaaaaagaaaaagaaaaaaattggcttcgcctaattttgcgtgggaaatttgctagttgtaatttacttgaaatgctatgaatggtgcacttttgattttgctacatatatatgtggaggaagaaactaagtaatgagtaactctgaaatcaattcctttgagtcacaatattatgccaagaattggaaggaacacacaaatagtagtacaaattaacgagctaaggtgagtagagatgatggatggaggtgcatatatactgctatacatatgcaattgagattacctagaagaaacaaagagagagaatcagggagaggagccaaggttgatctggacgccgatggcgacgaggaagatggcgtcgagggcgaagaagaggatggtgtggacgaggatggagacgacgctggtctggaacttgccgaactcgatcaacctgcacttgcctggtatctggaacagaagccccggcgacagcaggatgaacagcacccaagatatcagcaccggaccccagtcctgcatcttcttctccttgctttcttcttcttcctcttcttgcttgcttcttcctgttgctcttcttcttcttcttcttcttcttcttcctactgatgatgatgctcgaggctttcctccttgtgaacgaaccaaccaaccaaggattggatatgatgatgatataggagaggagaggatgctgcctactggagcagtattacattcttctctacatacaagtatggatatgcagctgaccacaaggtccactcgatgaggaatgtgcggtggagatatatatatctacccaccataatgtttactatactacactagtacttgctgcctatagtcccatcacttgaattgcatataagaaaaagattggatataaactcccctattttttttactagtaattattatagcccagtttcctgattaaaaattgtagtattattaacccagattaagctgtgttgttgcaagtcaagtcacagcaacactagcaacagccccgttcgaatgtcctgaaaacggtggattaaattttggattaaagtggcatgcttttcaaactgctaaacggtgtgattcgtgcgaaaactttttatatgaaaattgttctaaaatatcagattaatccatttttaagtttataataattaaaacttaattaatcacacgttattatcctctcattttacgtgaaacacttaatctttaatctttaggagattcaaacaccaccaaattcatcggttatttcctcatcagctgcaagcctgcaatgtagtacttaggtagcatcagctagttctttctacctagtgcagtgcccagtataaggccaaaaccagaggatgtacaaagagcaactgaggggtaaagttttacgtgtcacatcaggaattatataggatgtcgcatggggtgtttggacactaataaaaaaactaattacagaatccatcaataaaccacgagacgaattattaagcttatttaatccatcattagcaaatgtttactatagcaccacattgtcaaatcatagagcaattagtcgcaatctgtgcaattagctattttttaacatatatttaatacttcatgtttgtgttcaaacgtttgatgtgataggatgaattttagggtgagatgtaaacagggccttagtaaatactccctccgtcccaaaaaaaaaaaaggcaaaccctgagtttccgtgtccaactttgactgtccgtcttatatgatttttttttataatttgtattttcattgttgttagatgataaaacatgattaatattttatgcgtgacttgtctttttaatttttttcataattttttcaaataagacggacggtcaaactttgagcacggaaaccagggtttgttttttttaggacagagagagtatgcagcaacaaaaggtattgggaaaggagtaactttagtctgcgtatgcacgaaaagacagacatttgatctttcatgaaccacaacattatttcctgaccctcgacaggtaagaacgttttattccagccgaacaatagaggattcttctcaacttagaaatcttggcctcaactcagcatgatctctgactgcgcggagaacatgcgataagttcacagcttactatgaaaccaaaaacagcaaagtctccgggggaagaagattagccctctggcacctattagaccactggaagctccccacactcactgatgaccaccttcttcttcgggcggtcccctctgtcagtctcctgcgattcgatcatcttaacgatgtccatgccttcaataacctgcccaaacacgacgtgcctcccatccaaccaaggtgtctgcattcgcaggtagcagtcagcgcaatgtaattttgagtgagtttcgacactagtacacagtgaacatatcagtacagtgttaccttgacagtgcagatgaagaactggctgccattggtgtttggcccagcattggccatgctgaccactccaggtccagtatgaaccactacaaacattacaagacatataatcagcacaaccacaagataagaagcagaaagaacgatcagattaggtcatttgtcagacgtacatttgaagttctcgtctttgaaggtccggccatatatgcttttccctccagtaccctgaaatattcattttttgaaacctactttatccacatgcagaagttgaaagctgaatgatttgatgtaggctaggtcaaaaattcataattcatgaaaccaggcagctgcatgatttaatttaggccatcaatttaaagaaaaaggatttggtgctaatctccttgtaatctagccatgaagtcaataatcactgcatacacattatgctgatcacaaactaccaattcatactcataatgtacatgatgcaaagcagtataatgatctaaaacaccatagggcaagcactgaagtgcataacacaaagttgtataatgatccaaaacacatatataggtcagctttctatccaaaacagcataaagcgctaacattgataaaacaaatcaaacttttttttttttggagaaatagttggctcaatggtgatagatagaaacaaacacatgagctcattcagtgttgtgagtaatgttacactatgtgactttttccaatagagtttgtcagatgaaacagaggaacaagtgcaacataggagtagattataaagaaagtaaataatgaagacatacgttgcccttgtcaaagtctcctccctgaatcatgaagtccttaatgacacggtggaaactggaccccttgtaaccaaaccctttttctcctgaaaaggaaaagggcaatggtatgtgtatcatgcaccaaatctgggtaatcctgtaaagtagtagatgacagaagagaagaaaagcaagaagccctttgtaccagtgcaaagagcacggaagttctctgcggtctggggaacatcatccccgtataggccaataacgaccctcccaacgttcttcccaacagggtttccgatgcttatgtcaaagtacaccttgtttgtgattttggactggaggtccacttcctgcaatgtatgggagaagtttagcaaaactgaaagaataaatttgaagcgtggtatccagttctcccacatagggtaagaataatcgatacttgcgctgttcttttatgtatgatgttaattgaactaaccaacgtcatatattaaaggaaggaggtagtatatcgtaagttaacatctagtggaggaaaacatgaaagcgcatagtgcacatgggaaaggaaaacccagctttcagtagtacagaagggcacacgtgtttcctcacaatgttgcaggcagtcactgatgatgaataacgtgtttacattcggtgcacatacaaggtaagacctgtaagtagcagaaccctatggtcgaggcaactaaaattattaatcagagcaggtgaatacataataaagcattggtgatgataagcctgaaactgcaattttggtagcataaatttcacctggtgatttaaaaatctgataacaaaatttgacatacaaaggcattactagtattagttttaatttaatggtgttggaaggtcgaggtcatctgtgctaacccaatatctcttcctccaaagaggcaacaaacaggggccggtattgcggaggctgattgcataataatagtccagtaaggtggagtagtaaatttgactgatatactactagacaggattacaagaatggatgcggtgcggcaatagaaagatatatgtagggcagataaaagaagaagatccggggacacagtaccttggggtcagcggtggcggaggagacgaagcgcgcgcggctgtgagcagcggaaagcgcaggagtgaaacctccaaagacggccgatgaggggaggcgtgcggtgccggtgccggtgcggatggagaggagcggcgagggggttttggaggcgaggagggcccgctccgccgccggccgcgcgatggcctgcagtgcaaacacaagagaagaaagagcgacgataataagattgagagctcggtggggaagaagaggagagcagaggccatggatgagtgagcttacgagtgtggcgaaggaggttgcgaccgccattgttgatgttgaggaggagaccctttctctctctctcgctcaggtggattgggattggataggtagatagggcattgcactgggatgaatggatggcatttttgcatatgtgtgcacaggaaatacaataatcacacacaccttcttcattgggggaagtactatattttatttttgggaccaaaagcatctgttaaatcaactctatttgtcccaatccaactatttaaaatttatttatttacagtgtctctttctataatatatcggtaagttatcaattattatacaatataccatcggactatactattttcaaaaatacctaaaatacaccatataaggttaatatttgatttatcctaccataagtttcagaagaaaaaaaatgctagtttatgcactagttttaagattttacatttttatatttttttaaaaaaaattatttatccattatatactgcaagaattttttttttgctgtttttaatgtaacttttttcgagaacatacctcatttctaatgtaaattatcttttgcgtaagtaatttctctctcataaaaaactcaaaaatattttttttaaaaaagtgaaaacttgaaatttatatataaactttcatgttgggtaagtaagctacataaacaattcatatttttaaacccttagatgaataaattaattgttaaccttatatgtattttgagtattttttaaaactaggacctgagtaaatatttttcttgagttttaggttataagacttcacattcatatatgtctagatctattaacacatatataaatatggacaatgctaaaaaataagaataggaggtggtattattttttttttggtagagaggggagggggccgcataggaggcaggaggtagtaaaatgggctgatgggcatagtattcacgggggcccatgtaatagatgggatgggcttgaacacacatgtaatgtaacaatagcctcggtcgaggtgaggtggaagaagcaaagcaatctccgtgagcggtgatggcgcagcagtggcgatctctcctcttcctcctcctcctcctcctcgtgcccttcgccgccgccgccgggcaggatgcgccgttcgtggtagcacagaagaaggttgcgctgtcccgcccgggtccaggcgtggagcgcctcgccgtcaccctcaacctctacaaccagggttccgcgtcagtcccctccccatctcatctccctcttcccccagatttagatccacatctctctctccctctcttcactttgttaacctattattgctctatccgcctttccttattgattaattcgcataggtcaaaaacaacgggaattcctactgttagctagacttgatagatagccgcgagcccatgtttccctttctctgtgtaataatgtcaagctgactcacttgttgataacacaaattatcacgctactattgtgcatatatactactcctacatgacatgacatgattgatagtcacatacacacacatcaatcgctaatccatttctccatctatctaaccacactgctattttagggaaggggaaccggaatcctcattatgggggtgtttacatccagggttgtaaagttttggcgtttccgggtattatatagggtgtcgcattgggtgttcggcactaataaaaaaactaattacagtaaaccgcgagacgaatttattaagcctaattaatccatcattaccatatgtttactgtagcaccacattgtcaaatcttagagcaattaggcttaaaagatttcgtctcgcaaagtagtcgcaatctgtgcaattggttatttttttagcctatatttaatacttcatacaggtgttcaaacgttcgatgtgatagggtgtaaaattttagggtgggatctaaacaggccctatattcttcactgccagtgccatcaaccattcatcttctattcttctatcatgttgtttactactctctctctctctctctctcattttttacaggaccgcctatgatgttagcttgaacgacgactcttggccacaggaggcttttcaacttatctctggaaccacatcaaagattgtggaaaaacttgatccgttagtaacaacacttactagttacttatgctttctcacaccaatatttgccctttgacaatcctttttacctcttgtgctttcagtggtgctactgcttcccacaacttcatcttggagaccaaagtgcagggcaagtttcagggctctcctgccattatcacataccgtgttcccacaaaggccgcacttcaggtacatcaaaattttcatacttacacttcaggtactcatgcaatttgatgcttgtcatatgctttgtttcacaagttaaacttgaattttcgtttcgtgatgctttgtttcacatgccatcacaatcgagtgagtatacctttagtattgagcaccggatgagccttttctaaggactgcagtgtgatcgatctcattattccatggatcatagtgaaaggggctaactttgctcagcttaaatagctcattacgaccctagtacttggtgttctaattatcattttcaccatactattcctgcactattctcttcttgagtttaaactgccaattatttttctcaaggaggcttactcaacgcccatgtttccacttgatattcttgctgagagacctccccaacagaagtttgaattggttagttatctcataccatttgctttcattaagagtaaaacctttcctgattcttatgtctcaacgccttacttttttggtgctggtactcaacttatggatatgcaacttttgcacttgacctttccaggctaaggtactgccattgccctctgttttatgtaaacttatgtgttttatctaagtaggaaataggcgataagaaaagaaaaccatatggctagacattgtgatctaatgtgttaacaaacgtcatctgcagagacttgtggggaaatatgggtcgctggtctccgttgtttcctttgtcggtgtgtttatctacctggttgcaagcccgtcaaaatccactgctgcaaaaggaagcaagaagaggcgctaaatctgttttgttgccttttttttgttgtatttggttttacaagaatgtactctctcaggttttataaggttctcctatgtactctaagggattaactagactaaggcatcatctgtcattttggccttctgtagttgagcatctcgggtgaggcctgagctgactgacttaaaatcagaggtgtagatttgatacatcttaaatcattttagtacattcaaccttttgtgcctggttctcatttcatctcccgtcatgggtcaagggtaagagtgttgtctattgtgattcggatagggcttgaacctagcttcaagcgatgttctcggggagattttgtttgattgctactgtaagcggtaagataatagtgtatgatatggtaagcttagccgtttcttttttttccctgaggagcaggtgaattgtacaaggagcagatgatggattgagaggcgaattcacagggtaatatgtttccctgtctcctgaattgctagttcagatcctattctacgatgtactgcggaaagggaccacatgatgcatgttattgaaaattgacactggtgcatcttgtgttctgcatatctgagccttgatggaaagaaattataattctttgagttagaactaaactgaggtatgaatggctttttttttttggtttttcacggtggggcagcgctcaggtgtgtgttggggggaggagcaaggggatgtaaggaggactctgtttttacaaccgtagagataagtactggtaagtatgaatcaatcatcgtcctatttgtgtgctaaagcttggaaagacaagatgatgcagatgcagtacaaaccgcttactactccaaataacatgatgctggggcaggagccttgtggaagttggcccacccaattaactgcacagaattctagcctatctgcccactatcagtcacataggagtaaatataagcagcagctaggggggctaaagaaggaagaaaagcagatagagacctgaatcctcaactcaactgcaaacaactctttcttacacatagcacatactaggcacataggagttactagagatactactaggagtagtagcaatagagcatcaacataggaggcagcataccaatggagagcttgtgtgggcagcttgagcatgaacatgagcagcagctgcaccaatcctcctcatcttcacttctcccctactgcttcctttctgctccagagcctcttcctgtcccaggcttccctgccggctgcagcaaccttgaagagaaggcagcagcagccatggcggcctatgagtatgagagcagcagctgcagctcccttgaccccacctcaatgccaatggtgtactcaccaatagtgctgcagccacaggagtgccctctttcctttgtctttgacaatgccgctgccgctgccggcgacaacaaatgggtgcctggcattcaaggaagttgcccttgttcattgggctcaactcaagatatggtaattaagctcctactacatgtgctatctttgctcgcactttgccatgaaaatgtatatatacaactagatgaaactgcaaaattcagttatatatatattttttttcacaaagtgtttcagcatacatatgttttttttttacctcaaaggtttagcttcttcccacatgatgcatgatatattgaagagttatttgcttggtgatcatctttatctgaaaaaaatgcggcttcgtcctactagtaccaagtggaaatctacccaaaacctggaactaagtgcatatacatatgtaaatgtagcagtgactgctttctgatgcaagtagaattatcattgatgtttaagttgttaacccctttggtaagtgtccaaatatgtatgatgggcccattttatgttgtgttcatgtaatgatctaccttatgtggtcttgccatttaggatgcaagttggggcaagagtagaaagcacaagaggagcaatgtgggcttgaagggacttgaggagaaaaaggcaagaagggtggtactacatcaacatgatgatgatgtgaagaagaaggccaaggaggcagcaggtggggagccaccagctgggtacattcatgtgagggcaaggagaggccaagcaacagacagccacagccttgctgagagggtcactcactcaccagtcttttgttctcttatctgaatcgttgttatcttaattagtagtaacagctgtttgttagtgcccttcacttaactacaggagtagtaacatctgttgatttgttacttataggtgagaagggagaagatcagtgagaggatgaagatgctgcaaagcctggttcctggttgtgacaaggtcacagggaaagccctcatgctagatgagatcatcagctatgtgcaatctctgcagaaccaagttgaggtgctgctatatgtcactcagataagaattgaaatagcgtaattgagcacgtagtatcatcgatggctcttctgctctgtatatgaagaactgattcattcttttgtgctcattcagtttctgtccatgaagcttgcctcccttagccctttgatgtatgagtttggaccgggcattgatatgcacccagatgttcttcgacaggtaaagtaaaatagggaacaatgacagcatcaatccaaacgcaagcaagcatctctgaagaattctgtgattccagttttgcttctgccatgcatgcgatcaatatctctgactctcttagtacttagtattaccttccttgtttgattaagcttgcaaagatgccacatgagatggtgcagtgcatgggccaaatggggagtacaggcatttcactccaaggactaggaggaggacccacaggctttgctcaggtcaagatgataaccatagtctctctgaatctgaacccaatctgcatgactgcatcagatgtgatgtcgcttctcctgtgttgaacacaaattattccaccaagcactcatcaagagtagtaggagtagcagataaggaaggcaatgtgacactgatcatgcatgcgctgtctgtgcttcacctttgcattgcaggatggcagcagccccattaacatggtggtgatgcaagttggaaagcaaggccagcaccagggctctcttcaccagg

SEQ ID NO: 7921 - DNA, 63406 bp, Oryza sativa
catctccaatgatgatcttctccaaatgctcagtgtttatggtgatgtaaaggaggtagctatactgccataattgagtaattgactacaaaactgaaatccacacactatggtaatcatttgttgtttatagatttccagctctcctataagctgcaccaagaagtttgtagagttctatgatgttagagcagcagaagaagcactacatgaccttaataagggtggaatttcaggcccaaagttcaaggttgaacttaaccaacatggagaggcaggatcttggtaatttgcttggctgaatttttttctacccgtttttggtattatcttttcatactcgtgctagctatcaatgccttccttcatactataggtttagtatgttagttacctttgggagatgggataatatcataataaaatatgttcactgttttcttaggtaaaattatgcaaatactcctagatgcaaggaatgtatctcaagttctcattcacggtttttctcatagctttgcagccactaacacacctattggtcgttctttcattttgtggaacagccatatatcaactctatgtcaatcacttgaaccttttaaattttcattaaggacaaaccaactgggcgtgtaacttttttttaagcgttatttgattagtgtggtgaagattttatttatgtacttaacagcttgaggcagcaacattctagagaatggaagcaagacagtttgcctcaccaacctaaaaactcttcacctgggaccattggtacaatatattacttggatatattttggaaattgttgatcattacttattttgccctttttcatgccaaaacaggaaagttgggcaccaaatgtcaggacaacagcactgttcataatttattttctccagttaaccaacaattggagagcccaacccagtgcatctctacgactggtcctcaaattttatcttcacctatcagaattaaatctacacttcagcacaataatcaagcctctgttggcgatcttagtggacctcttggtcaaggaaactttggacgtggaatacaaaccctccacccacgctcattgccagagcatcacaaccgcatttgtaataactctaagtccatgacagtaagtggtaggaatgctagctctagacaagacggagtggatcacaatatccaaaaagtgggccctgctggtttttgcggtcattcttttgatcaaaataatgaaggtaacagttctcagcttcaactgctcattgttggctttactaacctatgtttttattatcataacaacataatggtgaacctttttggaaatattggatgatgtagttgatgaattgaccagcttaatgattttttttgttagaatttcatcagcacagaaattgttttttgcagcatttggctttactgaaattggaagttgcccccttcatggatatcactacacctggaaccacacaaatgtttttccacaaagtccctcagctccaatactgtggtcgaacttgcagcacccaatgcacgtgcatagttatcctggtgtgccgcctcacatgctgaacacaggttcttatcccatggaccagcatcacttgggttcagctcctgacaatggaggcagttttggaaatgtgcactcttttcatccaggatctctcggaagcataggtttgcatggtagccctcagatatatccatcagaattatctgcctttgcatccagcagaggaaattttagggttttcttgttctccccagttggcgggggatttcaatcccttcagcaaatgtgcaatgcaatcaatggtcggaatcctatgatccatgtttccacttcatacgatgctactaatgatcggatgaggagtcgcagacatgatggaaatcctgcacagtctgaaaacaaacggcaatttgagcttgacattgatcgcatagcaaagggtgaagattcacgcaccaccctgatgatcaagaacataccaaacaagtaggttctgcacatcttgccaccggttgccagctgtcttgcacattactcaggtatcttttttttcttctgttgactcaagtcatacttgatgtgatccacaggtacaactgtaagctgcttttggctgtcattgatgagaaccaccgtggaacctacgatttcatctatctcccaattgattttaaggtctactttttttttcttagtgtaaaagattgcaactgtgagtacaatttcaggactgacttttgcaatgttcacttttctcagaacaaatgtaatgtggggtatgcttttatcaatatgactgatccgcagcacataatcccattctataaggtatacatatcatgcatgcattactagttaagcttctccgtttttaatgtaccttccaagatctaagcatagcatatgatataacagtatttttattattgtgttgcattcttttttgtgggaggaagattttttaaaaagtatttctgccctgtagagtactgccagttttcccctggcattttctaattgaaagtatgcataggattaattggacttgacatttgctgcagacatttaatggcaagaaatgggagaaattcaatagtgaaaaggtggcgtcgctcgcatacgcccggattcaaggaaggagtgctttgattgctcattttcagaattctagcctgatgaatgaagacaaatggtgtcgacctatgcttttccacaaagatggtccaaatgcaggagatcaggtgtgaatatctctagtgcttattgtatacactaaatataccatatgagtgaccacttctgactgaccctattcgcacaaaatgattgacatggcggttttatacatattattattttctgataaagatacatattattattgcaggagccttttcctgtggggaacaatgtccggtctagggctgggagaaataggtcgctcatcagcttggacactaaagatgcaagtccatcaagctccccagaccaagaaagcaattctgtcggcaccgcgaactcaacttgccgtacgaccttggagcaaacctaatcactaactggagggcacaagaagctgtaatgataaactagggaattcccagttttgctaagtatttatttgactatcagggagccaaagtttgtgacctgtgagtgtaatgatgaatgaaaggctctgccaggcaaggcatcacctccactaaaattatgagagggatcatcagttttgccctgtgtatggatggagctgtgaactggttggtattgtaacggtactactacttcagtagagcaacaagtgtgtgcgtgtgaatgtgattgactctctgagagatgagaactggaagctgtacagttgatgagttgagtagtcgagtctttggttgagattgaccaccgaaagtacattcattctcttctcagattgactgcgccttgattcattcatttcatgtactactagtacatgtgtctctgactcttgtgccccttcttcaccccttgcacatcacacaactgcatggggaaatagtacacgagctgttggagttcattgcacatcaatctcaaaacctgcaaaaaagagtgctgtgcagacctagctaggcaaacttacaagtctaagggcaagttttatagtagtggtgaatacaacctctaatttaaatatatcatctactcattaattaaaaggtaacaagtgcaatatatcacatataatacacaacctctaatattaattcactctcacaccatcttacacttgttttgaaaattgtggagattacccaatgctcattctctcctaacttctctcattcacctcatcccatcccttaatcttatgtggcaaatttaagagctaacatataggagctctaagcagcagattagatgagatggtttacaagacattgcagcaagaaacaaggcaaacaatgatagtgctaggaaaaggagtagcatgagaatccaaggcaaaccatgccagtaattggaattggaaagttgtatgaggaacatccatcatacatccatacaggtaaaggtaaagcaaccactgtatataagtatatattccttcaactaacaacccaacccaagccatcccaaaagcacaccgcggcagttccagttcaccccttgtggatcaaaagagctagagcaacagcacaaggcaaacggcctaaattactaaatagatagaatatacgaatacgaccccaaaatggctccagtctccgtcttcttcccctctacagccagccaaccagccattcatccatcttcattcaggcttcagcgcgggtagccctcctggtccttgtcgcagggctaccatcagcttcaccgctagccttggcattgctcctcgtcaccctgcgagggctgctcacaacaggactaccgccaccgcctttggcatcaacctcactactcttcctgctgttgcgcttcacaggagttccgccgctcaggggagcatcctcttccgctgctgtctccatagcatcaccacctgttttcatccttttaccatcatttgtggcaacagcatcccccttgcgcttccttgcctgcttcttctcagccttctcagaagcccgcttcgtcgcctgtttcttttcaactgcaatgtccaccacatcagcactgtccatcttcttgtcaccttgttctttctcatcttctcctttgctcttcttaggctgcaggtcctcttccttgattacaaccacagccttgaccactttgccatcatccttcaagctgccatcatccttcaagctgctatcatcctctcccttctctaaagcttcgttgtttccatcatctccagatgactcagcaccattgctaacatctgagcttgtcttggtatctccttcttcaacagcctttctttgcaaggactcaatcaaatccatcatctctcgattgatctgaaagaagcaaacaaagccaagcatgagcaagaaaattacatgtaatagcatgcttcaacaaacataaacttgttgtacctgtggattctctaggaagtcacaaatatcagttggacatgaagggcacttcttcacaatcttctgtgcccttagagtccgcccaccccggcttctctccctcatagacgattgactaccatatgtcccaaccaaacacaacttgcagaagttatgagcacatggagtagtgagtggttccttcatcacttgcttgcaaatggaacatccaaactctgcaggaaacataaaccaatatagagtgagcaatttagtgcttcgaagctacgaacacaagttgtaatagtacatatctaaataacaagcatgcaacagaaagaacctttcagcagcctttcagtcacagacatctgggcacgccttgcaaccctccggatttccttgtcagttgcaggatcccctgataggttaggctttctgctgattggtggaggcttcacccacttccagccttctttctcctgttatgaaccaatagaaatcagaggttagcggtagcatagtatggtgacatggagccaaaataaagcattatatgatgatattgcatcacatagaaacaggcacatacatcaaagtcccatgaaggagttcctttcctctctgatatgtctgttgcacctttcagctcatcaactttggggagtggcctcggacggtcaccataaatatcacttaaaaccaaataacataatgtcagtatgaacaaaatgtgttgctcaaatgaataatgaacaatatgcatgtctcaagtcaaaagtaagcatttcaacgaacctagtccaaggagctggttcattgtcacaacgtacaaagagatacctgcaaaccttgaatttaccctaagagacaagacagcaaaatatccattatgtttccaataaaaagaattatcaactgatgaactgcagagcacaaaactacaaagcaacattcacaaagctgtgtacaagagaatggcgttacctgaacactaatcttcctccaacatttttcaatcctgtaaactccatcatacctcacaccagcttcaggagcatatgaagaacgcttctctttgtgggacctttttttaagggaatgtaatgagttaggggggcatgacaaactataaatcatttgaatagtgaaaaggatatatatttggatcatcaataacagacagacaaacaaaagagaacaaatatatacactaaacagtagtactccatagagcgacagtagtagtcctacaaaaattatctgtttcaagagccaacaaatatctacataactataacagcggcagatcagaattatctttctacagcaagattttaccaattataataataatggaaaggcacagattacaaaggtatgacaatttactcaggcataacattatctccttaagattaaactgctaagtgtaatcatggcagaaagaacataccgcacaaccctgacagggtaacccttgaggcaactaatacgaagagcagcattcagcttctcaaatttctggtctgaggactgctccttgtttgtacgcttgttcccacttagatctcttccaccactgtacaagtataaattatattatagagtgtattagcaattgctcatatcagagatcactgagaaaaactgaatgatggcaaatggtcaagtttgctaaccttccagtatatagaaaccattccccatggtcctcatcatcgacatacccacccgagagggctaccgactgagcaccatgtgtggattggccagcaataccagccacgtgaggaaaatgggcaccccattgcctgcactcaagtctgtcttcccatgtatccccaactagaacaccaatgcttctcttggggtcattctctgcaagaatggggccaaaatggtcgggtgggatagtaacaaagatctggccacttgaagcattagcttttccagccctcttagccctttcagttgtaaaagccttgtcaggtctatcatcatttcgtatgtaatgatacgcagctgcagagacagctgagttggcattctttgaaaccttagccatacggataacagaaactaatgctgagttgattcttggctgctctgccatttttgctggtatttgtgcccggcatttaccacatgtcctttttccgctgtggatccatttctggaagcacttcaagcaaaagttatggccacatggtgtctgcccaagacaaaagtagaatctgatggttagaaacgctacccaaaaaaaaaagggtccaatgaattgacagaatagcaagaacttttacctacctacaatgcatggatcaaaataagaattatgtgcagaaactggaaggttaaaccaataccccaaaagaacaagacagcacttttaacaatgcaaggtattgcatcaatccagaagaacaagcatgtgatggcaatagaagctagctgtaccacatacaaatgtctagtgactgattaggcagccgcttgggtgatgtaatgagctaggctggcaaggcaggacggtgtaagcctaatcctagagcctaggcaggttacgtggattgcctttttagaatactgtttgcattatcagaattgtacggtggatttggtatgagctaaaacaaacatatctaggcatagtaaatgtgtgcatgtggtgaaaattaggagtgacataccagttggcattaccaaagcaaacaattatcatctagaaagggcatgcaatcgatgtgttcaacaagttaaacttgaattgtaacaagcattgcagtctcaattaatagaaataaagaaatgtaagcatcactctacgaggtgcgtaacatcgatgatctggttcatgataatcagttaagagtggtctggtgggaggatgtaagcctagcacctaagcaggttatgtgggtgcctttttagaagacttgttccgttattggaattcaaatggtagcgtaaataagaaatataagaaatgagtagcaaaagcaaacaatatcatgtagaaatggtacatggtcatttcaactagttagaaaccttaaacgataacaggaaatgcaaattgaaccaacagaaaagaataaatggcagcgtcaactcaaaataagattgacggataatcagggatgatacaactctaatgtaagtaatgaatataaatgtgtgaagagaggggataggatagcccccatcatcaccctagcgttaagataaatcatcgtacatataagcaaagcaagtagtaagaggaagaatgggggaaaggccccgcaagagtactgacggtgacggggcgttcgggcagcttcatgcagaaggcgcagctgaagttcttgccgatgacctcgaggacgtcgtccccctcgtcatcatcggcgtcggcaccggcgggcgcggcgccgccgagaagctcctggcggcggcgtgccttttcctggtcggagagggtggcgtcgcactcgatggcgcggatggcggcgacgagttggccggcactcccaggggcgagcggtgccggggccgggggcggggcgtcggtggagtccccggagcagtcggggcaactccattgggcggcgtcggcaagggcggggggcttggagaggcagggggagtgccacggggtggcgcaggtggagcaacggaggagatcgacctcgggaggggaggcgacgcggcagaccatgcagacgccatcgccgtcgcaggggagatcaggcatggcggcggcggcggctagggtttttgggggcgaggaagggagggaatggaggaggttttgaaatctcaaaaattttcgatctcaaaacccaacccgacagcggagtggggtggtctcctcctcttcactcgtccttgctatttgtagccccccagccccagcccaggcgtctctatctatctgtggatcgccggagggagacgatgatggaccccacgcgtcagctgccgtggcttggtgtgaacgcgtcccccgccccgcactcactgccaaccggaccccacacgccacgccacgctaccaaaatgaaatgaaaaggatcccttctttttttggatgggaactgggagaagcgcgcgcgcccccgcacccgcccgctcccgcgcccgccgatggaaattgggaaggaaggggaaatcaaacaagcaagaaaggaaggaaggaaaacgcgcggcaggttgaaatgaccaatatgccccccaccttcctctctagtctctccatttgccagttgtccacaccccaccacccacgtctttcccccttcagcggcgtgacccaccgtcacaacactactccaccccccctctctctctctcctctctgtcacaacttccgcaaacaaacatccatccatcaactcctcacatttttttataataatagattaaaccgccctttacacctaaaaagaatatccctcaccctcacgttttctaaagtcttcttttaacaaaagctaaaccggaccatataaaccaatatatagttttcctttttctggcccatggttataaactttgcttttaaaatatagaaacaatcaaaatatagcataagaggctctacatctttgaacgacacaagataaacatgcatacagccactgtcatggtagctaaccaatctcaacacagcaaaaaacatatgaacaaacacccgtcaacatttttattcttcccatacaacattgacccgatgttatcgaataaatcggaaaccaaggtcctaagtcaacaccgcaaatataattatcgacgacctaatagagaagtcttcccaaattttccatatatagccttacgaatggaatacccaccaccaaagggataaaaagcaaaagactttagagaagccaaagtcccatcaacatctaatcgatctaacctcgtacaagatttattgaaaacctaccgaagacgaacgaggaacttgttctcttcctccttatctccggcgataacgcacggagatgacatggaggggaggggacgaggtggcggcggagtcactcctaacagtcgagttgtgagttccttctgtttgggtagggcggatgcatttatatgcaaccagatgggggacatcttcatccctccttgtctccaatgaggacgcgaggagatgaaaataggggaggggccgatgaggtagcggcggagtcactccagacgagtcgtgagttcttctgctgggggagaggatgtattcatatacaaccaaatgagaggcatgctccattcatccttatctccagcgagaacgcatggagatgaaaggaggggaggggatgaggtggcggcggagtcgctctagacaatcgagtcatgagttccttatgctcgggggggggagagggtgtatttatatacaaccaaacgagggataggctcccttcatccttatctccagtgagaacgcgtggagatgaaagggaggggacgaggtggcggcggagtcgctccagacagtcgagtcatgagttccttatgcttgggggggagggggtgtatttatatacaaccaaaggagggacaggctcccttcatccttatctctagcaagaacgcgcggagatgaaaagggggagggacaatgtggcggcggaatcactccaaacagtcgtaattcacgatattagatccatgcctctaataacgcctcgtccatgcacactgactctttggataccatttcacttacctctattggtctctttataacaatacgtttgcgtattatcccaaaactatccttttatagtatatctagcatgccccgattttacacaagctaagttgcttttagaaagacatcttacttgaatcacatgcttttttttcacgttttagactaatgaaatgggattgatgacagtatccatgttggatatattcgtaacggtaccgatacggagggtactattgacatcaagacaaaagcgcttgcgtcttaggaagaaaataatatagtttggaacaaaacgacatgccattgttgtcatgccaaatcaaacatgttgtgcttgtggtattttatcttctataatattcccatcctatgttccattttttttaaaaaacttcaattcaattatatagagaaggtaaggctgcagcaagacaatagatataaaaaatcaatacaaatattccaataacacgtaggggtgtagagtaaatttgataaaacttatggttataagatgtgaatatctgaaatgtatttgggttaggctttgtttatgaaaccctagccttagagacggacgtctactttcatcgtcgtctcatttcaatgtatccttgtttctatcatcaatttttataaggctgatggaaacacatcctatctccttagtcagaggtgttgctcacgttagacgtctctcttcaaggagtgactatgacgcatcttatatacctcgaggacattaattagtgtcactcttattgatatactcttttgtacagagactaatagtagcatgatatatctcttgagcccgataatgagataggataacaaacatggttttgattgatgtatctcttctagagaccaacaattagattagaattaaatgatagaagtggtaatctttaccgttgatattttagaggcaaccaatatagaattcgatcacaacggatataaggaatgataaaacgatggtgtaaatggtgccttttttttaatcttagcagaactgttgtaaaagtatttgataaactttctccgatctgatctaataaaatgagcgtaacgtaaggaggatgaatcgtgtggtggttaagcacgtttgtttgtgcaaaagctgagagagagagatggttggatttggggcaagacagaaccggactgaagtggagatgagagacggtgtcttacacggactccgaacggaggctgcttggcttgtgggggatgagatgagatgggatggggggtctgacgtgtggggcatggtcccacgcgtcatacagacagggggcccacccctaataaatgccggggcgggggtctctcctctcctcccaagtcccaacccaacaaacaaacagcgacggagaaattattttctatttttttgtttttgtttccggttcgcatccgcatcgcggtcgcagtggtggtgtgccggcggcggtggaagaggaagaggaagacgaagaagcagcagccagcagcaggtatgcccgcgccaagaccatccatcccctaggccctagctaccccgtccatccccctcgcctgaaacttccttcgccgatctatctccgtccatcctccgctcgccgtcgccgtccttgtgcctccgcatcctcgcccaccggtgagcactcaccccaccccgccccaccccgtccctacatctcctctcttttgcgcccccctaaccctatcttctcttccagatctgcaacttattttgccctaataaccttctccactcttatgttctaccactaacgacactagtttcttcccaaaaaaaaattggggcttcaggtccgctctgatgagatccgccgctatcctcctttgtttatttttttattattatttcagtattttttttacctaataacccaacgcccttatacatgcgatttccaatttctttatactactccactacaataatttcgatgctgtttactaccgcccactagtattagtttatattatcgggtagtgaatcaaagattgagttgtgaaatcatcatgcgccttcctcttctcttgtttcaggtctctgctacacactacactcaagagagcgagaggcatggaacactactcgaccaagttcagcaatggaggagggagactagtagaccccatgcccgaccgaaggtcaagattttggcagatggattcccaacccaccgagctcatctgtcccatgcctcgccgcccgtcaccccgccctcctttcctatccgactccatcaacaggtccacccccaaaccctaatcaaaccatattgagcatgggtctcctttttttagctgcaatttaatttagcacatatctactccaggctgtacacttggatgcaatgcattccttccaacaaaggagctgaggctcaccaaaatttatgcacatatggtaccaataaccataccacaacactgcccataattttaattcaattcaataattgtcaaaagattctttcatgcgaaatattattctactatatgcgcacaatagtgcctaggctctagtaacgacagcgagcatgtagcgacaaattcagcaatgggcatcacacggttcacatgtgacgacaaaatatacgtttcacataatgacttagggttattgctgacctgtgcgcgctttttaattatttgcaggacattaccggtgtacagagctgactctgcttctgatgtcctcgacctcatcctcagtaaggtgctttacctgtagcttcttgcggctgtctgtaaactgtcaatttacgctagctatctatgctgcctccatacatattctgaatttataattctccaattgtctcgttttgtttcagaatgaccctgatgttgatactgattcgagcacccaggtgggctttttctgtggctcacctcctgtgcgcgctaacaaccccattgtccatgatccacagtttggtaaaaacataccttccttttctcctttagggagttctttcggcaaaaagtctgctggaagagctgaagtaggttctccatcttgcggggcaagcagcccaaaagttagaattgaaggttttgcttgtgggaacaaggagccccactgtgcagtcacctttgcctgagcattctcattgaccctaacgctatcctgccaccaaaacttgtaaattttccgtgtgctgaggagggcataaattagtttattttgggcttctttttgtcgagttgagttggcattgcccttctgattgtggcttttgaaactgcacaatcgcagagagctttcggatgtacataaatgaagtctcccgtctgtagctatatcatcttgtgtgtgtacaaaaggtagtaacatccaggtccatggtgtcggtcagtctgtaaatatgtgtcggtcagtctgtaaatactgtagtgtactggcatgtaagatgcaatcaatcgatcaattaatgtgaaaaatcctcattagtctgctcgtgcccagttccatcaattgtgtgtttgtgaatgatatgagcctgtgtactggtgttgtaaaaagggaaggtcacctgtgaatccatctagcttactgaaatgttgtactgttgctgagctatatgtgcaacgagatgaataagttgtaaaaagggcaagagtttgttggttcatttcatccaattcaattggcatgcatactgagtgttgtgtgatcaggcagagtcatgttggtgttggcatgcatatatatggttgccttaggtgtaggccaaatttaagatttagtgtgtgttgttgtgcctgacgattggcaccgtgtgttgatgtaactggtattgttgaggctggctaagccctactgaatttgtgactggggagacaaaaggaaggccaaatcagctcagccaggaggcttcagaaagaatgtttgcaacttgaagttaatggatgtattgtttacaattagacaagacaagacttgtacagagggagggaggaagtgtatatacagtagagaattacagacatatatagaatacaattgacgaagaagaatgaactaaaccccaatggatggagcaatgaaagagtgagtgagttagcagcaaagcaaagggctatctgaggatggtcctggagtgcctgaggatcatgtggaagcatggcttgggcgtggtggttgctgccttgggcctgattttgccgccgctgccctgccgctgcttccttttactaggcgtcacattgacaagagacgacgacgatggctcctcttggtggttgctcctcttcctggtgatggatccggcggcggaggagtgcagcatgcccgggggaagggtggactcgagcagcaggagggtggcgcagcgcttgagcacctccaggttcatgcgggcgtcgtcaaggctcctgtggctctgcttgccgatgccgaagtaggaggcgagggtggccatcttgaggtcgccggcgcggcgcccaaagtcgtgggccagcacgttgagggagtcgacgatggccacgggctccggcgctgcccgcccgatggccgcgaacgcctcgcggatgcggtggcagtcgaagcgctggatgttgtgccccgcccacacccgcccgtccagcacgccgaagatgcgctccgccacctgatcgaagctcggcgccgacgccacgtccacatccaccatagcggcgaacctcttggacaccgccgacatgtcgcccggccggatcaccgtgtggtagctgtccacctccaccagcctccgggggcacaccacgatggccccgaactccagcacactacgctgcccctcatccgccgacgccgccgtcgtctccacgtcgaagaacaccatctccggccgccgcatcgtcgtcctcatattattcatatactctagctatctatccgcctcctctcgcctaccctaccctataagatcacagacacagagtcgatcgttaatttgttagtttcccgccccgcgctcatcgatgataaatgtatggggacgattcatccatatatattggctagccttaccaacaaattaacaaagatcgatgatggatcttccaacagtgcaagcaagcaacaaacccagccgccctgcctgcctgcctgcctgaaagaaaaaggtaaatcttaagcttattctactatagctcatttcttcttcagctgcagctaagatatagctagcgtgcatgcctgcattttatgcacaagattattccatgtttatttcacaagcaacctaaaaactaacaagcctaagcgtgcgtctacgtgcatgcagatatgtgcaaggaatcgccagcatgcatgcatcaagcgcaattgcatttggaagggaattaggagcaagatgaattacgcacgcctactgcctctgcatagctctcatctcacccaaaaaaaaaaaaactgcatctgcatacaccaccaatatactactactagtactatgtattagccagcaaactgctggtcaagtaatttaaccggcctcaagtaacaagtgtttgcttgtgtgtctgggtcaccgtttcacgcacgcaccctcccactgcaggcaaagccaaacacacacacacatattctcttcgctctatgttattcttctttctccaattctcctccaaactgcttgtacggtgcttaccaaactctgacgctaactaactatacacaccaccagagcttccaatccttcctcaaaccaatccacacaaaacaaaattaatttaacccctccaatccactctcatttctagtggagttaccaacagtcaggatactacctcatcttaactgcagagttctaaccacatactgcctacttaattaataccagcacctaaattaaacagcacatccaactacccctaatctcccatccatcaacacaataacgcccatcagttacaacagcaagcttacgcacagaattttgcaactaatctttcctgaaaagaatgatcaactgaatgctttcttcattttagtagactcctcacagttccaacatacacaccaccttccttacccacaatactcttgagataaaccaaaaaaaaagctaacccagatctcagcgctttaattcagctggtgaatgtgcgagatcaacttcagcatatatttgtagcaaacaatcaacaggcgtccaaacttcactcctgcatacggcaaaattcccaaacaatatataacactcattaacacaactcatatctcttgtgttcgacaagactctatagaggcgaatttcaccacacgtacctttgtagttacatcagcatcttccaggcaagtgaggcagctcaagagccctgacgatcctgcacctgcatgttccagacaaccaggcaatcagcattctcacccctttcactggatgaaatcaacattactagacaatgacaataacacaaggcaaacacctctgttttctgcatgaagccaatcttgtgagcacatcaaggcctccagtgtatcaggtaaaagcttgctacgctgtggactcaaaacccttccagcaatgctaaacgccgattcagaaactacccttgagacaggaaccgctaaaatgtctcttgctaacatctgcagagttggaaacctcttccccataatcttccaccaatctattatgtcaaagtctactgctctagggataacaggctcgtccaagtatttgtctagttctgacttgacatctgcactggagaacttgaaagcgatatatagatcgaagctagataactgatctggaccctcttcctcccccccacaaggctgcattgcaccgacttttgattggggaccctgatactgtttgatcaaatcataacagagctgccggactctatttatctcattgtatgcctcatcaccaaaaattgaggggaaataaaactgcagtagctcaagcttatatctggggtctaggacagttgccacagccatgagatcatgaacttcaacgcaatatttctcaaacaattcggctatttcatttctcatccttcctatcagttcatcctcacacccaggccatctcctcatggccatccgaattccacaaatcttggggaagtacatattagcagtaacatacttagcctctgaaattagttctgcaatgtcagaaaacagtttcaacttactgcagacctcttttgctaatttccagtcatcatcatcaggagcacaaatatactgttcctctatttgccttaagtgatcaaagacttgcttgtagcttatggcaacatttaacatggataaggtagagtaccatctattattacaatcaagagtcaacttcttgtcgagattaacattcaaaccacgagcaacatcagcaaacactacatctctttcagttgttgctgtccagaaatcaacactggcgcggatcctatcaacagcacctcccatcacacccaggcaactattggcaattctacttagcacataggcgcagcatctcatgttcagcaaagacccacctaacaaaagttgttcggtatccagcctttgctttaagagccccgtaaccgtatcatctgtagaacaatcatcagccatcaccattgataccctccttccaagattccattcgttcaaacaagaagacagagtttcagaaattgcttgagctgtatgcggccatggcacatgtataaagctgcatgtggcaatcaaagcacaataagtttttacattaaaatagtctgaatagaactttggaccgagaaaactgcaactatatttgaaaatatacatacacacatctatgcgctcgaaaaataatgaaaaaggaacacacctcagtagacggcactggaatgtccaggattggtcgataaaatgagctctgacagccacataacctctattttgatcatctgatgtccatatatctgctgttattgcaatccgacctttagcctcccacaaaatttccctggttctgaccctctccgtctcataaatgctgataacatccttcttaagactactgttgggaaccagctggaacaatggttgaagagccctaacaaacctttggaaaccgtaatgctccataatagacaaaggatattcatgcaagataatcattctcgcaagctccatcctggcaacatcctggctaaaggtggagctttctaaagaagcaacagtgggttcctgatcaatatcctttgtacatttggagggagttggcttgctgactttattactcctgcgacgaggacatttgctgagatgatcgtgcaaatgtttggtgccattcttagtgtcccctccgagcctcttatggcaccataggcactcggctttccacttgctgtcgattttcttcctcttgaattctttccacacactcgatgtcagctttctcttactaacatattcttcttcaacagcatgactggaatcaggagcagcagttgagtttttggcagctccaagacccagagggatgtcatctttcataaccaactctgaattctgcaaagtagaacaggcaacaggggtagtgagaaacaaatggcagtagaaagatgataattctccctggattttctttttcacttgggctaatttctcatctctatctctactattataaaaattcaagatgtttttgcggtactttggtacgtcatccgtgtatgagtcggtttttaagttcgtttgcttttggaaatacatattcgtatttgaataggtttttaagttcgttcgcttttggaaatacagaaggagtcgtataagaaatccttttttttaaaaaaatcgcatgctaacttacacggttggactcctaactacagctcatgatttttgtaaaatacatatattcaagcgaatttctacagtgaatttcacctgacttaaaacatataataataataagattaaaatagtcttttcccgttgcaacgcacgggcattttttctagtcatcccttaattgaaaaactagatacaactcatagctcacactctcaaaacaggataaatcttgtccccgtttgacatggttttgagcagcataggaggtgaggtccacttgtcattgaggataaatggtgggcccacacgacaaacgatgatcaagcaggtcccatctccagtttgggtaaaacccctgttaaacaggttggaggtacatgtttttacccggtttcaagagttaagggactgatcatatatgtatattacgcctagtctaaaaggaaggagaaacataaattttcttataatcttattgagcaattgagcaaagctgatgaattttctactagctgtatcgaactagaatgaatacagggaggcgcgagaattcagaatgtgtaggggcggagaggaggagggaccttggacttggagttggagcgagcaagatagtcttggatggacttcattgttgaaaccctagctagctacatgcctctgccgccgcccatcaaacggacagaaagggagcgccgtagctagggggttggatctggccggaggagcgtcggcgtcgggcgatgggcgcggggcggcggcggcggcggcggcaagggaggccgggagggagggagaagcttcggtgcggtgcggtgcggatgaacaactcgatccggtcagttcagtgcaggtggggcggaatgggttgggctgcccggcccaccatgtaagcccataaaccgcattccggccctgtgctgtgtccctttcttttctctttatctttatctttatctttatccttaccaatctaatctaacctaacctatttaaaaaatacttaatttttcgccgcgctttcctccgcaggttcacaattccgacgaaaaccggtcgaattctatgaaatttcgacgtttcgacacggctcggaattaagtttcgattagaatttcaaaggttaaataatagatttggtcaaaatttatcgaaaaccgatcgaaatttatagaaaaccgtgataacaatggaggtcaaaatttagtggtcaaccggtaataaaccatgttcctccgtcgccggcatccgccctctcggtattcttctgtcgtgtgcgcatagagacaaatgagaaggccaccatggagcagctttgctgcccggggtatgtgtctcacacatcctcgacactaagttcgtggtctctttggttccaccgaaaataataaaataatatctcgggagtccaacagctaattaccatatttttaccgtgtctacgagaagatacacgttctttgaatgtttcacaataaagaaattttaccatataataaaaatagaaccccatatttagaaacacgtgatgccccgttttgacagtaatggatccccccaaatccactcacctccaacagttggttccccatctccatcatctgtggggagagagcccgagaaatttagggttgagaggtgagtggcggcggaaggaatccacaagttgcaagggtgtggaggcggaggagtggcctcgattggggatcggaggtggtgaatctcggtggagaggcacaatccaaggcgataagcgtcgatttgcaagggtggttcgtgggcgaatggcgaatcaagggcatccaggcggagggtggcgtcggcgtccagccgtggtgaggaaggtcgccctcccgcagtggcgcaccaggggggctcctcgcaagctgggagtgagcaatccaccaaggctggaggtggagagatgaggggccagatgaacaaaggggggaagctgcagcaatatcgtccagttcagaaggagaagaatcaaactgaagagaagattgcgacatctgcagtgactcctcagactgcaacccagcaaccaactccaccacccaattctcgcactggtatgcaaactaacccacagagaattttctgccacagatgcaaaggttttggccacatggctagggattgtagcaatgttgtcttctgtataaattgtgccaaacccacacataggacagaggattgcatctatgacaagcagccgaggcctatggcaaagctagtagggtatggtgctccaggtttaggttgcatcttaattcaaaacactaagcctgacccacctaaggagcataataatcctctggctatgatctctactgtctttggtggagaattgacagaagctcaacttgagcaaggtttcacgcaacaatttaagtggaattgggtttggaaagctaaagcaatgcctaatggaagctttcagatgagatttcgtaacaagataaagtttgatgagcttgcaaactttgattatttcaatgtcaagggcactgatgtgcaagttaatgtgaaagaatggacccagaaatctgaagcagttgggaagttgcatattgtctgggtcaaaatcactggaattcctgaggaaatgaagggttaccaagctttgtatgaaattgggtcaaatctagggcctgtcttggaggttgatatggctactttcagagctagcaatgtgatcagggcaaaagttggaatgatggagctgggtgttctgcctttgaaactagtgttaacttctcccaagggacttttgttccaagctcatttcagtctagaggaggtggtggaactggggtggtttagtgatcagctagatgacacttttgagaaaattgagatacaagaaaatactctggagggtagcagtcagagagagggtaagcaagttgtggtggtggatcccatgacagaagatcaccatgtcagtaagacgggtaacgggctattgaagtttgtcagaagcaagtcctggtgccagaattgatgctgggagaacataagatcaaatgtgcacagatcttgagagacatggagttggcaatgcaactgcagaaaggagactgtattctgactcagtgctgtgaaggaaggaaagaggttgggaaaaaggaaatgtcacaggagcaggttgatactctgcagcaaccgatgaatcaaaagttggctgaagaattagaaagctcttagacagatgttccaggggataaggagaatagagtcagttttgatatgggtttgaatcaagaagacaaggacaaagtagatccgggggacagtgaagattacatggattctcaggagtctaagggaagttttgctaagaggttggggattaatctaactgaagaagctcttggaagtcaagatgaagagatgaggagaagcaagagactgaaagacaaggaagataagaggtcccaagagatggcaatggaaaggaaagaagcacaaaatgctttcatcaataaaaattccctccttcatacatgaatcaaatgtctctttaattgatattgctagtgttttaggggtcaatctgggttgtgctgttgatgatatagcctctaatattaatctgattagagacttagagatggccagaattaacctctttctgaaagagggaacaaattctgaaggtcaacattgtcttgattcctttgagaattcaaatcctgatttaaatgttttttctgatgatttggattctgaaactaatgatgaggattttaaagaaattgagcatgtgcttaaacagattcaatcttcagctagaaaaatgaaacagagaaaggggaaccttgagattttcaaggtaacccccaaagttgtcaggaaaagaaaaaagaaaactaaagattaatgaagggcctcttttggaatattagagggatgggaaatccagaaaaaataggtcatcttcaagaccttgttaaagatttaaaattagattttgtaggtattttagaaaccataaagcagaactttactgctagtatgttacagagcttgagtggtaagagaaatatgaagtggacttggcttccaccttgtggtagatctggaggtatcctggtgggagtaaatgaggataagttctctatttgaagggagtcaatgggtgacttccacatcagactgcagttgcaaaatgtttgcaacaagaaaatctgggatcttctagtggtgtatggagtagctcaaactgaacataaagctgcctttcttgctgagctgtctaaggaattccaagcctctaggagacccatagtgataggtggtgattttaatatcctgaggaaagagagtgagaaaaataaagctggaggttataacaaatggagtttcctttttaatgcaattcttgaacaaaacagcatgagagacatccaaatgggagtgagacaattcacttggtgtaacaatcaggaaaatcctaccttagagaagttggacagagttttcataaacaatgagtgggaagctgattacccccttacttctgttcactctttggttagggcactttctgaccataaccccatactattagatactggaaatcctgacaaaagaggagacattttcagatttgaacttagttggtttttgagggaggacttagatagcattgtgcaggaagtctggaatgattcttactcaggcagcactattgaaaggtggcagaagagatttggctgtctgaggagaaagctgaaaggctggaacaaaaactgggagggtgaatacaagagaaggaaatatgaaattttgagtaagattgatgttatagactctaaaattgaaacctgtggcatgaattggagggatagagaggaaagaagagagttggagcttaatctgaaattcactattagggaagaaaaaacaaagtggtttcagaggagcaaagagaaagaaactttggaaggggattgcaacaccaaatactaccatgcaaaagcaaatggtaggaagaggaagagtagaagtttttctttatctcaggatgaaggcctttgaaggtcaagctgagctgttgagatacatcactgctttctacaaggatctttttggtcattcaaaactgaacaacataaaattagatatgggaggtgctaccaagataacagaggaagatgcagctttgctgattaaacctttttctctggaggaagtgaaaaaagtggttttttatttgaaacaaaacaaagcccctggtcctgatgggttccctggggacttttacaggaagttttgggacttgattaaaacagattttcttgaacttcttaatgattttcataagggtgttttggacattgagaggcttaattttggtatcatcactttggtcccaaaatcaaaagatgcagcacaaatccaaaagttcagacctatatgtcttctgaatgtaagctttaagatcataacataagtgctgatgaataggctggacaacgttataaattatataatcgcaagaaaccagactgcatttctcaaaaacagatttattatggaggggatagtaatacttcatgaagtatggaatacttctcacaaaaagaaacaaagtgggattcttttcaaagtggattttgaaaaagcttatgataaggttgattggacctttgtgtatagaatgctaattgcaaaaggtttccccacattatggtgtgattggattatgaaagtggtgagagggggcaaagttgcagtgagagttaatgatgagttgggtccttattttaacacacatgaggggcttagacaaggggacccactttctcctctgcttttcaacctggcagcagaagctttgactgttttgatacaaagagctgaagataataagttgattgaaggtctgaatgtgagcaataacaacaaagtgactatccttcaatatgcagatgacaccatctttctgctgtcagatgacttagaacaagccaaacatctgaaattcattctctgcttgtttgaacaactatctggactcaaaataaatttcaacaagagtgaggtgttttgtctaggtgaggcaagagagaaacagggcctctacagtcaaattttcacttgtaaaataggtgctttgcctatgagatatttgggggttcctattgataaaaaaagattgcataatagtgattggaaggctgctgaaaacaagatggaacataaactgagatgttggcaaggtagattacaatcaattggagggagactgattctcatcaactcaagtctcagtattgtccctttgtacatgatctctttttatagattattaccatagggtgttaaggaaaaaatggatttctttcgaagaagacttttgtggtaggaagaacaggggaaaaaagatatcacttggttcagtggcccatactttgttctccaaaagatcatggaggtttaggcattctagatttagatacaatgaacattgctcttctttgcaaatggatatggaaaattgaaaatgaatcaggttggtggcaagatatactaagagataagtatctcaaaaacaaaaatcttgctggtatctctgtcaaagctggtgattcacacttctggcaagggctcatggaagttaaaaacatcttctacaagttctgttcgaagaaagttggtgatggggaaaatacatgcttttgggaagacaattggattggtggtagaccattaaacattcaattcccttctctgtatgacataacttttacaaagtaagtttctcttgctaaggtcaaaaaagagggctgggggattttcaaatttagaagaactctacatggtgacaaaatggactggaacactttaaaaaactcttgtggggaggttcacttgattgaggggtgtcctgataaaatctggtggaatttaaccaagaatggaatctttactgtcaagtcactatatagtgctttgaaaactcaacattatgctttccctcataaaaaagtttggaagttcaagattcctctcaaaatcgaagtctttctttggttatttctaaaaaacaagattctcaccaaagataacttatataagagaggttggaagaaaaaagacaaattgtgccaattttgcagcaataccgaatcacttcaacacctgttttttgaatgtcctttagctcattttttatggaatgtgattgggtgtgctctaaacctgaaaccaattctcaataaagaacaactttttgggagttggttgtcaaattttaacaaacacatgaaatatttggtgatggttggagtagctgctgtcatctgggctttatggagaacacgaaacagagcttgttttgaacatgttttgccatatgatcctatagaaactgtgttcctggcttgcaattggactgaaaactgggttgtcttgcagaagttggaagcaaatcgaagaagattggtactgggagccagactcataaagcaggtggcaagtgaggtctttagttcaagacacagctggagaccaggtgccagaagactgaagatgtgaagaaggaggagttgttgatgtccctgcttcaaagactaaagttgatctagcagtacctttctaccgtagtgatttgtttatcaatctgtcagcagttcttctgtttcttttaaaaactgttacttccggtaggaggtggtttccctaggctattctgaatagcttctgtctcaatctagttccatccttttttttcttttgctgtaatggcttcctgtagagaccttttatcatttctcttaatggaaatgggggcttcaagccctagttctaaaaagaaaaagctagttgtataagaattatgtcaaaaccaaaagaagaaaaaaagagagtgttatctcaatctaccttgattaacaaaactgaatttcatgatcgtggatcaaacataattgaagcaaaaagtgtaagacgcattggaatgattaacctagctataaggctcaaggttcctataaacctcacaaattaaaaggcaaaagaggataagggaaatactccgtattcaaaccttgggataggaggaacaaagaaatacgtgccagaatgcatattacaaaagaaactcctgcatgcggtgtgatcagaatggaattggtggggaaccaactagtggcaatcgcaacagctcatgaaagaaaaataattcaaggtaacacctgaaaagttctcaaaaaaaaaagttacacctgaaaaggggcatgatatatataattgcattgaataaacttacaattcagtacaacgttataagatttttctttctttgacatatatatatatacgcaaagagcaaattaaagaaatcttcccagtcttaagtaaatgaatttgtataataactgctatatactgtacgttgcttaactcgtggtgctgctcgatcaattttaatttaaacctcaagaaacagggaggcaagaaactgtacctgtccatatagaagtattatcgatcctccctaaagaacgtactgatccacccgtggcggtggactgcacgccagctaattgtccacaacgtaccagtaccaataccataattaagcagctagcggtcgaggaggacacgacgaagccgccagcttagcagccggagggagcatccatcgtggtggcccgggcgtccttccagttccagcgaggatcctcatctcgatcgcgcgatccacagccacacgtacacctactatatacgcacgcactctgcaaagtactagctagctaggagtagatcgatcgatatagtatgtcgttccttaattttctgcacccacacccagctggccatgccatattgccatgcaactattgaaggaagctaggatccacctacactgcacgcgcaccttgagcgaacaacctcgtatgtgcgtatgttaattattgtcctccatatatgcatggatgccactgccacccgcaccagcatctatcgcactcacggaccacaatcgtctcctctcctagctagcttgctaccacaatcatgcatataccagtttgcctcattttttttctggggaaataaattagttgtccttgaattatcatcttatctgtcttgcttgctttccaacaaatagattcatgttcttgcgtggcttgtctctcgtcggatgacggtcggagcgcacgtgatgcccggagtacagagcgagaatggagagatttttgctccatctgataaccgacccgttttctgttttttctgagaggaccaaccaggacctagaaccaacctgatggacagtagagacgcgacaaacacattgaacctgaaaccgatcgcatccacaagaagacggacgatagaaaccttacagtacaggtattttaagtaggttaagattaaaattaaaataagataaagataaaggagcaaagtatacttttagttaattaaatttagtagttgccatgtcaacggttagcaaaatatgatattgactaccaagagctgccgccggatccacgctggagggaggcggtggagcctgactgccaaggttgcccagccagccgccgccacctttgctcgcccggccgcctaccgccgacctagaggacgataagagaggagaggagagtaggggtgaaaataatagagtggataggagatgtgaataatgtgaggagagagagagaggagaggaggtgaaaatttgaagtgccttaaagagaaaagagagaggagaggtccctgtctacttcatcgcaaggcatctccagtctcacccacggcttggttaggtctttccattcattccacaacaatcgcaaccgcaaggtcctcatgaacttatccaagtttagaacccccaggcctccctgactggtcggcaagcacgtctttgtccaattgaccttgcattttcctccaataatatctcccgtgctagcccagaggaagcggcgtcgctgtttgtctagctgctccaaggattccttcgtgatttccagggcggccaggaggtagattggttgtgctgaaagtacagatttgacgagtgtggttctcccagctgaccccatgtttttttccctccagcctactaccctccccgagattttgtcgaaaacaggctgcaagtctgtcttccacaacctcccaagtactaggggaagccctaggtattttagagggaaatttgccctcaccgctggaacaccatcaaggacacctgccaagtcaatgctatcacatctaatggccgccacttgggatttctgaaggttggtgacgaagcagtccagaatgtccacgaaagcttttacattgcctcgggtgggattaatgaagatgatggcatcgtctgcatacatcgagatccgtagttgagtcgttctacaccgtagtttcgaaattgcgcccagctctattgccttggaaaggattcgttggaggaagctaaatatttatagctttgactagaaaaaatgtccgtgccttgcaataggtaaagatgttttctcgatgatacaacaactattagaagttgggcaataaattgaaacattacgatcgctatacattataattgaaaaaattgatgaaaatcctaacattaggatcgctatacattatgattaaaaaagttaatgaaaattctttcttagatttgggccagaagctcattccttcattcctctttagtcctacgctaatccgctacctccctctactcggcctgcctccttctgcccatctcgaatagctgcctaccatcttcaacctcccgaagatagtcccataaccatacgatgctggagctgatcttccccgtcaaatccggccgaatgtttctcgatatccaaaattaattgagggcttttgatccaccgatcatttctttcccttttccaaaaaatagagcgtaaaactcggaagaccgggaagatcatggagattaaatccgacgaattaaagccgaatcgaaagggaaaatcatgtagaaaatgatggaaaatcatgtagaaaatgatgagcgagtaatgagaaatcgatttttgtaatcaactggaggaggaaacgcacgattgatacaaccgcggcgggaaggcgcgtggtgcaacagatcggttgatcgggaaaaaacagatagaagtaaaaaaagttgcaacagatcggttaggatcggaaaaaaccagtggcaaaaaaaaaccaagctgcgtatttttttaggttcggcccgggcggcggcggggagacgcgaggtgcatcaatttggatcgggaaaaaccaaggacataaaaacagatagaaacaaaaaaaagtgcaacagattcagtttggaaaaaaaccagctagcaaaaaggaccaaaattaacccgaggcgcctaccaagtagatcggaattgtttcactaagtagataaaaaatgtttcaatcgtttaaaaagctgaaacgcaaccaaatcacctcatgaaacattttgctaaaacgtatgaaacaatggtttttgaagctctttcaacatatataaaacaatgtttcagcaaatagcgaaaggacctttcactacaacatttaatctatatatatagtgaaatatcatgagtatacttgctgaaacattgttggtggaaaaaaaatgaaacggatttccttaataaagcgttatcgtaatatgtgggtgatttgttgcaacgacgcatgtggtggcactacgccagatcctcacagctctgacgggatacctgtgacgggcaaatgatttggtcactgatgaccatcacctttgacgggtcatacgggatgccgtcatcagtgaggcatccggccgcggcccgtcacgggtatcccctcacctgtgacgggctgaaaggcaaagccgtcacaggtgagacagtgatgggttttccaacccgtcactggtatcccctcacctgtgacgggccgcggcattataagccgtcacaggtgatgggccgccacctgtgacggatttgttttccggcccatcacaggtaggtcgataccttcgacgggaaactcaattgaagcccgtcaaagttatgaccaacacctttgacgggtttttttacctaacctgtttgaggtgtgttgggtctataaataccccctaaaccgtcaactgctttccatcccgacaagttcactgttcacaaatcgttgggagggcagggggcgaatttttgctaaaattgaaggtaaaacccacattattctccattcattctcgatcgatcatcatatatttttcttcctatgttgttgatttcagatggattgtagttggatgtaccatgttcatcgttcgtctacagagtatagagagggggtcactgaatttgtcacatttgcagagaatgacagaaaaagtaggatgagcatgtacatattgtgtccatgtagggactataagaatgaaaagatgaaccttgatagttcagaagcgcattctcatttgataacgaatggattcatgaagaaatatacatgctggaccaagcatggagagcaagaggcgcctgatgccgcaactgaagaagtgttggatcaggatgtagagaacaccgccgcagctcgagaaggcatgttcgtatcttctccgttaggtggagagaccatagatttggacactcaatgtctatctacaatgttgcatgacattggagacacagaggacaacgacagagattttgagaagtttagtaagttgatggaagattgttagatgcccttgtatgatggatgcaagtcgaagcacaacaagttgtcatgcgtgttggaactcatgaagcttaaggctagtaatggctggtccgacaagagttttacataacttcttgagttgttaaaggacctgttgccagaggggaataaattaccgcatacgacatatgaagcgaagcaagtattatgtccgttgggcctggaggtcagaagaattcatgcttgtccaaacgactgcattttgtattacaagcaatacgcagacttggatgtctaccctgtctgtgggggcatctagatacaaacgagtaaagattgaaggtgaaggaagtaattcaaagaggggaggccccgttaaggtggtatggtatctcccaattgcggagcgcatgaagagaatgtttgcgaataaggaacaagctaagctagtgcgctggcatgccgaagaacggaaagtcgatagtgagctgaggcacccagcagattcagtacagtggaggacaatcgataggatttaccaggaattctcaaaggacctaagaaacatgcgtttcgccatgtgtacggacgtcattaatccatttggtgatttgagcagtcgtcatagtacatggccagttctgcttgttaactataaccttcctccctggttgggcttcaaaagaaagtatattatgcttgccatgctcattcaatgactgagacaacctggcaacgatatcgatgtgttccttgaacgaggtcaatttacgctagagcttcactgatgtggttgactatgtcaatcggtgtttatgggcccactaagacaaggagtacatcatgtgcgcacacaaccaggagtaagaggacaatacccttcgtgtatattgtttttgaagttaaggttcttattactaacgctacataaccaccgcgtaagcaacattggattctcttagccattgtacctaagtggagtagggttacctaccttaaatccaataagacgaaatattatgatttcattgaaatcaccaaggtcttaaatatggcttggggcccatatgtggaaaagggtggtaggcacaaggagggcaaggacgaactttatcataaccccaagtttgcatgcgcacaacatatcggagaccagtgtggtttccacgtgtgccacaacatgttaacacttctaagagaggtgaaagattttgaccctgaggttgttgttaatggcaaataaactcatttcaataccaacattactattctatacgtgctaacctctgatttattaaacagaaaggtagagatggcttgaagatttcacccatcaatccccttgctatcagaggtgaagtgtacgccttcattcttgcagaaataatgaacaagaaaggacgttttcacgtcaaatagactcgtgaactgggctagatgtgatgtcgtgaacaatacagttatataatttcttgtgatgtaaaaaaagttgttttttatgattctacattatgagtgcaatgtaatttacttttatatgtgcaatatttatggtagtttgctaaattgtcatcaaatttgatcaactacgatttacgttgtactattcatttgttttctcctttttttttctaaatgacaggtcgtggaggtcgaggatattatggctttaatccatttggtaagtatatatgcggttctatgagcaatgaccgaaattgtggcattcaagggtatgaatttgctgtgcaaaattgtggcatttgaactgcatatgtgaatgatgtcaaatcttgagatggacctgtgatgttggggtctgtgatgtttgagatggatctgtgatgttatattaggggggtgactggaatttacctgtgatgtttctatgtttcagagggcatggctagcaaatcctgaggctagctaatatttagcatttatttttttctagaattaacacatcagtgacgggtcgtaaaaaaaatccatcaaaagtaacctcacctctgacgtctgacggactcgcaaacataggcccgtcagaggtgacccacctgtgacgggcctttacttttgggcccatcacaggtgtgccacctgtcacagcttctatctaccggagaccatcacctgtgacggcctttatttggaggtccgtcagagatgtgtcacctgtgacgggtcctaattggtcctaggctagcggagaccaatacgtctgacggccttctagtaacttgtccgtcaaaggtaggtgtcatctctgacggccagccacccgtcaaaggtgactggacacaccagtgaccactgatcactgaccaagcccaaagccgtcaaaggtgagggtttgggcccgtcacaggtgaccttgtccagtgtagtgtggggcgcgtggtgggaacagcgcaggaggcatgggaagcagcgggcgcccgatttttctgtcgctgatcgggcgcccaatcgctggcattttccaaattaactggaagatttgccaaatttttttttattattaggtaggtatagatatagattaattggattggatcataccattaaacttgaggcagcaagtctctactattataaaaattaaagatgtttttgccagtattttgatacgtcagtaggtttttaagtttgttcgcttttagaaatacaaatccgtgtttgagttgtattttaagctcgttcgcttttggaaatacaaaaggagtcgtataaaaaatatcattaaaaaaacccgcacgctaacttgagatgaaatacagactcttgcagttatgattttcgaaaaaaaatatctaagtgaattcccacagtgaattttaccctagctaaaccgtataacaacaataaaattaaaataatatatacccattgcaatgcacggatattgtttttatagtaacacatacgtttttggacctagtccgatcgaggtagccagtaccgttctcacgagttaattattgtcttcatgggccaaccatagaaaaaacatggcaacacaggggatctagtctcgatcgatcatcgtacgtgtttcttaattcgtacttatatgaggagcagaattcagagggcaaggacgccacatgctgattgtgtgaatgcaatgcaatagtacatgcatcaacacgagcaaaatttggtatatgtggtgcactattgttgtgaacaattagtttcatgtgcctgaaagcaccagcatatactacgacgtacacctaattaatttactagcttgactttatatatccttggtatatatagaggctggattattaaaaatccattatctaaaaaaataatttactagcagacgtgaaaagggaaactcttttctttccttaacaagatatatcccttatttttatatgacattctcagataattataatttttcttaaaaaaaactagcatgatagatcaatatgagatatgttacttcacaaacacatgtaaatttaaattcaatctacacatatagaaacaaaataacaaatttcagtatgaatagtacacacttcacagttaattttttttctacttatacaagttaaatttgcatgtatatagagtgatatatcacatattgatctatattgttattttttgttttttttgatgattttataggtgatatctactacaaatatatatgcttggtaggggcatgcccaagtgtccattttatgatgggaatactccgaattcttgatttaaacatcgctcatcatacggctctcaaacttaattaacggaggacacaaagaaaaatccatggagataggtacatagagggagctatttgctagaagtagacaccacccgccctatgaagaaaaagtgacatattcaatcctacgtttttgttttttttttcaacggatgaagtactgtactggtctgtatcgtatctgctcacaaaagttgggacaggggaatgaaaaagccatcggtggaatcggagaaattaattcaataagttaatatgcacatctatagaaaatttaagaaatgttatctatgaacgtttaatttcaagaaatgccatcgtgcaattgatatattttgtcaccgaaatgccactgccgttaggattccgtcctctcgcgccgttaaatactctattcatcataagtattttaagttattaattaattaagacgacacttgcgcacactcacccctatgaacgcacacacgcacaccctacccctatgagcacctccagaagactgggccggtatatcttgagattgacgaagtcaccacagacgcctcgctgtcgatgggtacgtcacctaccattgaaagaataattagccgtaaatgcgagcacccgtgtcaaatctaggatttgaacctgggtaggctggttccaccacaagaaacctaaccagttgagctatgctcacttcgcattgttcaaactataattaagaccccaaactgacgcatgttatatatatatatatattatttatttattaaaataataagaacaatagtccagtttacacctacagtggcgaagccaccgggggtgccggggtgggcctggcaccccccatccccatgcgctgcaaattaaccccccgatgattagccatctaatccatacaattaactcattagctagttgcaagttgagcctatacataactgaccaatagattttagctttatgtgattacctgagttaattaatgtaactaagcgatgtggttgcaagtctccaaaactaaaacggataaatagaaatgatgtcttgtcactcatgtattcagtaaatttggtgctatttagttgcctaattttaaaaaatgattcttttatgttatattaatgtgcattcggacatacaccttccatcctaaaataagttgttttagttttttacatgaatctagaagaatgtgttgaaatatatccaaagtcatatcaacaatcaatttatttacatattagtgcaaattaaccacaaaattcaaattattattatacgagggacgactacgtatattagagcgaacaagaggtgaggtgaggccaacatgccactcagcatgaactgagccatcaagatccacaccgttgtctatcgaagcgctggcgagttcttacatttcgtggctagcacccctattactaaattctggcttcgccaatgtacacctatatatatcttcgatacccaattaaagttaatttagttaagtggaagctaattaattaagtatgtactatgtaatttaacagtgaaataattaagtgtgataccggccatcaaagataaacagtaaactaattaatgctctagaaaaaatggtgtgattattatttaggccttgtttagttgggaaaaatttttgggtttggtcacatgggcggacacatatttgaagtattaaacgtagtctaataacaaaacaaaaactacagattccaccagaaaactgcgagacgaatttattaagcttaattaatacgttattagcaaatgtttactgtaacaccatattatcaaatcatggtgcaattaggcttaaaagatccgtcttgtaaattgctggcgcgtacgcgtgtgctaggatccccataatcctttactttgatttaggaagaacaaggtatacaggcagtcattattcctcaagagatttaaaatccattccagtcacaacagatttatatatgttaattacaacacaaacacaataaaaacgtatttataataagataggaggatcacatctagaagagaaattgtggcccgggccggcgtccttccacttccagttccagcgaggatcggccactcgcagctcgcgcgatccacagccacactacgcctacgcgcgccgagcaagcaccttgagcgaacaacctcgtatgtaccactgccacccgcaccagcatgcatcgcactcacggaccacaatcgtctcctcttctagctagcttgctaccacaatcatgcatataccagtttgcctctttttttttctggggaaataaattaattagttggccttgaattatcatcttatctgtcatgcttgctttccaacaaatagattcggacttggcgatgcatcttcttgcgtggcttgtctcccgtcggatgatggtcggagcgcacgtgatggccggagtacagagtgagaagggagagatttttgctccactgataaccgacccgttttctatttttttctgagaggaccaaccaggacctagaaccaacctgatggacggtagagacacggcaaacacgttgaacctgaaaccgatggcatccacgagatgacggacgatagaaaccttgcagtactgatattttaagtaggttaagattaagattaagataaagataaaagagcaaagtatacttttagttaattaaatttattagttgccatgtcaatggttagcaacacttgataatgactacaagagccgccaccggatccacgctagagggaggcggtgaaggaggtggagcctgactgccgaggttgcccagctagccgctgccaccgttgcccgctagaggagaggagagtaggggtgaaaataatagactggataggagaggtgtgagaagagcgggagagagagagaggagatgaggtgaaaaattcgaagtgccttagagggaaaagagataggagaggagaaaaaaaaaatctatagaggaggtattttcgcttgcggaccacttaagaagtctgcatgcaaaaatctatttttgcattcagttctttaagataattgcatgtgtaaataggcttatttttacatgcatccacttaataggtctgcatgcgaaaatcgatttttgcatgcatacctcttaaggagccacatgtgaaaatggaggtcgatttttgcatgtgaaaatggaggtagattggttgtgtcgaaagcacaaatttgacgagcgtggttctcccagctgacccaggttttttcccctcctgctaccctccctgagattttgtcgaaaacaggctgcaagttcatcttccgcaacctcccacgtactaggggaagccctaggtattttagagggaaatttgccctcatcgctggaacaccatcaaggacacccgtcaagtcaatgctatcacatctgatggccgctactgaggatttctgaaggttggttacaaagcggtccaaaatgtccgcgaaagcttttacatcgccttgggtgggattaatgaagatgacgacattgtccgcatacgtcaagatccgtagtcgagtcgttctaccccgtagcttcgaaattgcgcctagctctgtttccttggaaaggattctttggaggaagctaaatatttatagctttgactagaaaaaatgtccgtgcgttgcaatgagtaaagattacgatattagaactgagcaataaattgaaacattacgatcgctatacattataattgaaaaagttaatgaaaatcctatcttcctatatagttggtacccaccaaggagaatttactgctataaaacaaggcatgcaagaagccacatcatcaataactctaagccatcggatcgcattagtacatagttatcagtcgttggatcaagaagctactcatccatctaattaatcattgattactcatcctgtcacctccctttagatcataatcacgcgtgacattgttatccattctgcacataatactatgttttctcctcccaagtcttccaagataatgcaaacttatctcctttatttagtacaactcaaattattgtataagatgtgagttttgttttgttacaaacaattgaataacatagagtaattatgcatcattaacccaaaccaatttttgaaacaagcttgagataaagcaaagatgtgcaaactaccctaattatgacgatatccgaattgtgcatgataataactttcgtatatcataacaatataaaatgtcgttttttttaaaaaaataaaacatgaattgtattgtaatagcaaaggctatatatgaagccacattatcatttattttatatatatatacagattaacatctaattattcaaaacattaattttatttgacgataaaactagcaaatcccgcggcaaggcgcggggtgccaactagttctttcttagttttaggccagaagctcattctttcattcctttttaatcatacgctagttcgctactcctttttagtcctacgctagtccgctacctccctctgcttgaccttcctccttctgcccatctcgaatagccgactaccgccttcaacctcccgaagatagtcccgtacccatacgatgctggagctgatcttctccgtcaaatccggccgaatgtttcttgatatccaaaattagttgagagcttttgatccaccgatcgtttctttccctttttcaaaaaattagagcgtaaaacccgggataaaaaagactaggaagatcgtggagattaaatccgacgaattaaagccgaatcgaaagggaaaatcatgtagaaaatgataagcgagtaatgaggaattgattttttaatcaactgaaagaagaaacacgcgattgatatggtggcgaaggggaggcgcgctgtggaacagatcggttgatcggaaaaaaaacgggggggcgccagcagcgagcactccccctctccccttaagtcttaactactatactagttaatatagttaacactaatgatagtaactaggaaagattctggagatattttggagatttttttactaacagattgaaaatattttaagttagatttgaaaactttcgatttaagttttaaattttatagtcaaattttaaaaacttttagctcagatttaaaaactttcaacttgatatttgaaaactttcaactcgagaatcgagattcaaaaacattcaagtccagatttgaaaaatttgaaaactttcaaatcgaaatttgaaaattttcaaatcgagattcgaaaacttccaaatcgagatttgaaaattttgaaaactttcgactcgagatttgaaaactttcaagtcaagatttaaaaactttcaagttcagatttgaaaattttcaactcaaaatttataaactttcaaactcaaaacatgctaaagattaaaaaaagttagaaaaaagtgggaaagaaaaggaaaaaaaggttaaaaaagaaaaaaaaagtgcggagaaggcgcacgcgccggcgcagggtcttctgggcctgaaacgcgtgccgccggcgcgctcgctaactagcattctcgaaaaaacagattgacacaaaaaaaattgcaacaaatcggtttgaatcggaaaaaccagcggcaaaaaaaaccaggctgcgtttttttattaggttcggcccgagcggcggggagccggggaggcgcgcggtgcatcggtttggatcaggaaaaaccacggacataaaaaccggacagaaacaacaacggatcggttcgattggaaaaaaaaccagcgaaaaaaaggacggtaaaaaggacccagattaagaggaagctttgcagaaagtttttattatttttatttggtaggtatagatatagattaattgtattggaccataccattaaacctgaggcagcaagtatatatacgtttgtggactagtccgagctagccggccagtaccgttctcacgagttaattattttcttcatggataccatagaaaaaacttggtgacacaggggatatcgatcgatcatcgtacgtgtttgttactcctagtttctaaatgtttaacaccgttgacttttttaaatatatttgaccgttcattttatttaaaaacttttatgaaatgtgtaaaactatatgtatacatgaaagtatatttaacaataaatcaaatgatacgaaaagaattaataattacttaaattttttgaataagacgaacggtcaaacatttttaaaaaagtcaacggcgtcaaatattttgagatggagagaataattcgtatcaaattatatgtggagcagaattcagagggcaaggacgccacatgctgattgtgtgaataatgcaatgcaatagtacatgcatcaacacgagctcaatttggtatatgtggtgcactattgttgtgaacaattagtttcatgtgcctgaaagcaccagcacttccgttcaaaaaaaagaaagcaccagcacatactacgacgtacgtacacctaattaatttactagcttgactctatatatataataaaaattcattataaaaaaaataatccctccagtttttttatatgacattggctacttcaaatttatactagccaacgttatacatatatgcatggaagtagtaatttagaaatgtgaaactcttttctttcttaacaagatatatcccttatttttatatgccattcagataattataatttttttttgaaaaaactaacatgatagatcaatatgagatatgtcgttatttcataaccacatgcaaattcaaattcaacctacacaaataggaaaaaacaacaaatttcagtacgaatagtatacacttcagagttaattttttttatacttatacaagttgaatttgcatgtatgtagagtgataaatcacatattgatctatgttgttgattttttttccaaattttttgatgattttataggtggtatgcataaaacgagaagatatcccctcgaaatgaaaatccacctcccatgtgaatatctactacaaatatatatatatatatatatatatatatatatatatatatatatatatatatatatatatatatatatatatatatatatatatgcttggttggggcatgcccaagtgtccattttatgatgggaatactccgaattgctgtttctttcttgatttaaacatcgcccaatcatatcgctctcaaacttaattaacggaggaaacaaagagaggtccatcgagataggtacatagaggaagctgtttgctagaagtagacaccatccgtcctatgaagaaaatttgatatatcataatacaatgaatttgaatatgtttttatccagattcattgtattaggtttaatcacattcaatcctacattgtttttttacttgaatttgaatatgtttttattccgattcattgtattaggtttaatcacattcaatcctacattgtttttttacttgaatttgaatatgtttttattcagattaattgtattaggtttaatcacattcaatcctacattgtttttttactacggatgaattactagtctatatcatatcctcctcacaaaagttgggacagggaagtaaaaaagctgtcagtggaatcagagaaattaattcattaaattaatatgcacatctatatatttagagaaaatccaaagaaatgtcattggaagcgttcaatttcaagaaatgccatcaacaagtacatacatgttccatgaaatgttattgtacaagcgattttgtcctagaaatgtcaccgccgttaggttcccatgcatcccgcactattcatcctatatcatttaacggagggttgctaatagaaccctaacagcgatggcattttatggaactcacactggttgatggtatttttttggaattgggagcttgtcagtggtatttcttggattttcacatccatttaaattcaatttcaagaagagcacgtagtacgtttcgctaattattgaattcaaatttttggaattgataacttaagtattttaggttattaattaattataagacgacactccaatacatttaattacaactagggtgctatcctatatatctataaagttcatccccactaaatatagtagtgctaattttctcttctctcataaagccacatcacataaattgtttttagcctttggataattcatcaagggtgtaaattgcatctcttccctaaaaggcacaccatacaactcaaccgtttataacctatggataattgataaaaattaaaaaaaataaacatatgaaaaataattgtatattaagtaagaaagaaaaatttggaactcatatctactatgttctcacacaattctcctacagcaacgagcgaggtacccatctagttcattctaattttttgaattgttaaatatattgcgcaaaatataattaagactccaaattgacgcagtcttatatatattatttatttattaaaataataagaaaaatagtccagtttacacatatatatatatatagtaaatttgtttggtgctccatggtgcccggacaccattgttgaaattgagtatatacccaattcaaatgagtataaaactttttcaattacttaggtattaacattaactactttactaactagtttaaagcaagtttgaattgaatttgaacttgtttttgttagattttgattctaggtatatagcatccatacatataattagttaggtatgtaatcatggattgtgaaataaagttaaatttgagttgttttgttgataagtataggtatgaatcaaattattataactaggtatatactcacaatttaaaatatttgaaaaatttgagtgattttgtgcattagataccatggtgccatatatatatatatatatatatgttcgatacccaattaaagttaatttagttaagtggaagctaattaattaagtatctatgtaatttaacagtgaaataattaattgtgataccgccaatcaaagataaacagtaaattaattaatgctctagaaaaaaatcgtgtgattattatttacaaatgaagcagtcgtcacatttgttgtttgcaggtgacgtaacgtggatgtctctataagaattgacttgtcaaatttgtaagaaccacctgacacctgtctagcaacctgcatatcgtcgtggtcgtagtctaactacgcttgggcctagtgtatacatgtagggagatggattttcatcctcgggaggtgatatcatctcgttttcttatatgctatttataggttatgaaaaattattaacataattaatataaaatatatcatttcacaaaaatacaagacaaatacatttttttacaagttaaaaggaataaaataaattgaaaatagttaacacatatttataattatttttcttacaatatatgtatattatatccgtattaatagactattatttatatccgtattaataaactgaaaatagttaaatacatttagtggttaaatgtatttatttattaattaattgaaatattattgattaaaaattaatattaaaaattttggggaaaaaatatattttagcgcgaatatttttccaggtagctagactagcattttcgtaggcggcacatcatgctctcgttcacctaggaaaattgatcttcccaatcggatcggccggctgctgattgttttcgcatgtctttgcctacaggtggactggccgtccgcctaggaagaccgttttcatcagtgtagaaaaatggtgtcaaattttttgaaagaaaaatattgataaatgcatacgcagtccctatatggctatatatatggtggtaaactggcatgtacacatgctgttgtgagtagtgattagctaggcggctattagcagcagcaaccagttctttttgcgtatgatagatgatgcagagtgcagctggagcaatggagctgctggtggcgtcgcaagaagcaggcggcgttgtggtggtgggcatgaacagtggcgacgccggagagctgagctacgccaacaactcggacatgcagcggacgatcgctgcggcgacgaggaaggagcggcaggagatggcggcggccgttcggcgcggtcggcggcaggcgagagccatagccatcgccgacctcgggtgcgccacagggccgaacgcgctgctgatggccggcgacgccgttgaggccatgctgggcgacgcggagcggcagcaggaggcggcgcctgcagagttccacgtcttcctcaacgatctccccagcaacgacttcaacagcgtgttccggcagaagcagaagctggtggtgccgagcaataatgccaatagcagccggtgcctggtgtcggcgtggccggggtccttctacgggcgcgtgttcccggcggatagcctggactacgtggtgtcgtcgtcgagcctccacttcctgtctagggcacccgcagatgcggcgcccaacgaggggaggatgtacgtgtcggcgtcgtcgagctcgagctccagctccagggtgctgcacgcctacagggctcagttccaggccgacttccgcctcttcctctcctgccgcgccgaggaggtccgccgcggaggcgtcctcctcctcaccttcgtggccaggcgggaggcggtgccctcgccgcacgactgccacctctgggacctgctcgccgaggccgccgccgacgacaggaggctcgtcgactccttcgacgcgcccttctatgggccctgcccggaggagctgagggaggccatccgcgaggaggggtccttccaggtgacgaggatggagctcttcgaggtgagccgctcccgctcatgccaatcccaagcagatctagatcagctggcggctcagacaagcagcaccatcagggcggtggttgagcctatgcttggaccacacttcgggtgggacgccatggacgccctcttccggaggtacacccacctgctccacaattactaccgccacaacaacgaccagctcaccaacgtcttcctcgccttgcacaagatttgacttcattcatcccatccttccttccttcaaccatatatatataccacattccctacagtatcagtatgtattactgtatttccaaaacgtacctacaatatataccacgtgtcagttctacgatatatatatactacccggataaaatgatagtatcgtttctaaaatcgggataccaactgtttcatgtactagacaatatttaaattcaaaactatttaagtgtatttgtgtttatgtatcttcaaaatcaatcttaaataaaattattagaactagtgagtggctttctcttgacaaatgtctcttttcatgtactattctatttatttagaatggctatatatatttaatataaatattaaattaaacttaaaaaaataaaatattatatatcccgatactacgatgcgattaaacaatccgatactactcaccttctacatgttcaaagtgtatagtacaacttccattctagcagtatattatatactagtatatatctgttcaaagtgtatagtacaacttctcttctagatgtgatcctcctatcttattataaatatgtttttattgtgtttgtgttgtaattaacatatataaatctgttgtgactggaatggattttaaacctcttgagggataatgactgcttgtataccttgttcttcctaaatcaaagtaaaggattatgggggatcctagcacgcgcgtacgcaccagctggaccccgtccccgcatccctcttttttcgcacttttttgacgcgttttcttctctttttttcgcttcttcctttttttaatctttcgcatacctctttataaatgtagaattgaaaatttttaattttgacttgaaagtttttaaattttagttgaaagttttcaaatttgagttgaaagtttttcaaatttgaaataaaaagttgaaagtttttcaaatttgacttcaaaaaattcaaaattttgagttgaaagttttcaaatcactagttgaaagttttcaaatctgagtagaaagttttcaaatctcgagttgaaagttttcaaaactcgagttgaaagttttcaaattttatcttgcaaatttaaatttcaagttgaaaattttcaaagtttgagttgaaagatttcaaaatttgacttgaaagtttaaatcttaagttgaaagttttcaaatctgacttgaattttttcaatctattagtaaaaaaatcttcaaaaaaaggacaatcttatcttaattagtgtcattatctaaaactaacttagttagttaggcttaactactcccgtctctcgtgaaaacgctcgcgacttgctgatctcgcgcgtgcgcgcgaattagccatctcgacgtttgttactcctacttggttcctatactgatttgtatttcgaaaaggtttttttttggaaggacaaaacctagatattactgcggagagaattaagcagtttgtattagaggagaaaatcgttgtggctgatttggccacgtcttgcgatgcccacaaaaataggaacaaattgtggttcacatggatggtccgctagtagtatttctgcttgctttttgctcatggaaattattaaaggactaagcaactggacatttaaggggtggtaactagcaagcatgaagcatgggctaactcgaaggggcgcagctaattcgcgcataagcgcctctatgttaactcgcgcgcactaccacgtggcacatacagcgaatcctcccatcgcgcgattagcataacggtgattatagatctaattacggtgctacagtaatttctcaataaaaataattcatttaaaaaattcgagttgaaagttttcaaatattgactttaaatttttcaaaatacaatttgaaagttttcaaatctgagttgagagtatttcaattttgagttgaaagttttgaattttgagatgaaaattttgacttttgagtaaaagatcttaaaatttgagttgaaagttttgaattttgatatcaaagtttttatttttgagatgaaaattttgaattttgatttggaagttttcaaattttgagttgaatgtttcaacagtgagttgaaagctttaaattttgagatgaaatttttgaattttgagttggaagttttcaaatttttagtttaatgtttttcaaccgcaagttcaaagtttttaattttgagatgaaaattttgaattttgagttggaagttttcaaaatttaagttgaatatttttcaaccgaagttgaaagtttttaatttttgagttaaatgtttttaaatttcaggttaacaattttattttttttgggtatgacttctttttctagagagttttaaattttatgtatagatttttcaaatttgtagttgaaaaggaaataacctttatgtgaaaaagaaaaaagaatgattcagatcgtgattatcaaaatctaattacgctagacatgatcttatctgatatcatgcgtacgtgcgcgtgtttctaccttcccggtgttgcgtggtaggccgggccgaaacagctgtgtgaggtcgtaggccacaaaacgcgcgtgacttagcttgctaacgcgtttgcacgacacagcgacatctattgcggcaaaaaatcaagttcgaaatcaaacaacactttgagaaaaaaaagagaaactaacatttatttaaaaaaaatcataattatttgggtggtatttcaataaattaacgaggatcagaatagttccccttcctatcagttgttgtttttccttttaccttttgtcaaagtgtatactttatccgttataaatattacttatatttaaaaaaacatatataggaataatgaaatattactatgaaatccgtcattaaataacaggttcgtataattaaaggaggctctatccccgatatggaataagttcatctgaggtcccttaacttgttaacgaatctgattttcgtccttcaaccaataaaccagatacaacgggtccctcaactgtcaaaaccagtgcagattaggtctctcggcggttttggctgacatgacgtttatgtggataatttgactcagtcttcatctgacgtggcattaacgtggcgcttacgcgccaatttgatattgaaaaataataaaccccgtgggacccacatgtcagtttcacacataaattaattaaaaatgatggggcccacgtgggccccacatgtcattcccactcctcttcttcttcctcctctctccccatcccctctcctcgcatgacggagagtcagctactggggtgaatcggcaccaccaccaccacgcggctgcgagaaagcggcggcggcggcggcgctggtattcccgtgcggcggcgtcggcgacgagcccaacgtgtcgcggcgaggcccaccaagcgtcgcaccacgggaataccagccgacgcgcccctcgcgcccgcgcccccgggacggcagcctccgagcgcgcgccacctcgatatataccccactacccatgccgccaccgtttcaccgctctctctctctctctctctctctctctctctctctctctctctctctctctctctctctctctctctctctctctctccaccttggttaacctgagccgccgggtgcttctgcatcgcttgccgtactcaatcattcctgcgatggcatctcgaggcgccgtgttgctcgccttggtcgcggcggtggccctgatgtccgcgtcggtggcgtcggcgcaggtggacggaggcgtgccgccggcgccggcacggatcacgagcgcggccgcggggggcgcggcgtcggcggcgctggccgtggcgtgctatgaataaagatggatcatgtgtctcgtctcattcgtcactaatttctgtgtttcagatcttagctattaacgtcgacacaattccctttttgtgtttcaaatcaggctctcgatttcgaacacaattcgatttcacgtcagtgatgcactgatgcctcgtaacgcggcggatgagttcccattccgtctgtcccgaaggcgctgcgagcgccgagcggtgggtcctgggacgctgcggcgctgccgttcgggtcgtacctcacgccggcgacgacgagaacgacagcggcgggttgtaccgcacaccgggtccggctactcgtcgggatcgccgccgacgccgccgcaccggaataccagcgccgcctccgcctccgccgccgccgccttctcgccgtcgtgtggtggtggtggtgccgattcccccgggccgatgactctccgtcgggcctgcaaagaggaaaggggagatggggagagaggaggaaaaacaagagtgggaatgacatatggggtccacgtgggccccatcattttttattaatttgggtgtgaaactgacatgtgggtcgcatggagtttattagggcgttcccaacccaataactaggatagtgtccatagcattaaataagttgccacctatgacaaaaaattgatgtggcaagtgaataaatgagaaaagaaaagaaaaccatgtcttgcatgagacatggtttctatacaacatccaagacatcatgtgagataagtagcattaaattgaagtatggaatagtggtgtttacattggaagagtagtgtctagtactagtttcttgatgatatggagtttatggaaaccatgtctagtgttatgggttgggactgcccttatttttccggatcgacttgccacgtaagcgccatgtcagataaagaccgcgtccaattaaccacgtaagtgccacgttagacaaaaccgccgaggaacctaatctgtactggttttgatagctgagggacctattgtatctggttttttcggttgaaggacgaaaatcggattcgttgataagttaagggacctccgatgaacttattcccccacattgtggtgggatacaaaataaacattttccatgaattttgaccgtgttaatatctattgggccaaacggagaccccaagccttagcccatttctacgtccgccgcccgtatgtggacgcatcacgtctgatctactctctgttgttccattttaaatatagggtccgtttagattggtaccaaaataaacctttgataaattggtaacattgtcaaaattttaataggattatcttaataatgttgtcaaaattctatacatattgccaatatttggtaacaaactaaacgtagccatataattatcaattttaccaaataatggtatgattgaaaatgtcatcaatctgaacaggcccatagttgtatgtttatgtgtctaatatttcatcattcgtcttatttgaagaatttatataaaaatagaaaaagtcacgcataaaacactattcaggttttatatgctaataacaataaaaatattcatcatataaaaataaatgatatggacgatcaagtattagatataaaaagttataagcaccgcacaaaatgagatgaagagatgaggtagcacgaggcatcttcttgacatccgtcaatcctctttttcctccgacaggttgaggtggaagcctgcctgcctaccatcgacattggccatgcatggctgctgcggcaagctcaagtctatgtaaaaacattttagcacaaaataaatatatttaaaaaatacatcacgcacgtggcctacggggggcagagttaggcgcttggaatattgggagttcatctaattgtaaatttaatgaaactaattactttttttattgcagatattgttacgttctgtaaacttggtaaagtttaaaaagttggacttaaaaatataaaacaccgtacaatatgaagctaactaggagtagtaattagccataactcaatttatgcctccttttagaagtttaaaggatttgtggagggattgcaatatttctatatgaaaattttctatgtagtcttttgaaacatattctcaattcatatgacatttcataggaagggctcaacgagggtagattttttaggaaaaaaaacgagagttttgacctgttgaaaaaaattctctaaatctatctctggatggttatttatgtatttttgttgtatttttaattatctattttgcgtatacattagatataaaaactttgtgattttcctatttttaattaattgtcgcgtgcgaagggaccttagtggtaggatgatgatacatacccctccatttctaaatacttaacaccgttgattttttaaaatatgtttgactgttcgtcttattaaaaaaaattaagtaattattaatgtttttcctatcatttgatttattgttaaatatacttatatgtatacatatagttttacgtatgttgagattatagacatataatgatttaatctattccataaataaatcatgacattacagatgaaaactagcatgaacgcatcattagatctacacatgtaaactacacagtataacatgaacagatcaaatatgcgcaacatattgaacacgtaccaaggtgacgaaaagaccggctgcttggtcgaaacttttcgcaggtgtctacgaaggcacgaaacacgcgagcgaagaggaaggcgagccgtcgcgaacgaacagggagcagtcgcgcgaagcgcttcccaaaaaccttattgccgccttctcccggtgcaggacgtcaaagacagaggttccggagacctgctctcccgatcgctggtgcacgccggcgagcgggatggagtagtctacgagcgacggcgcagtacagagtaggaggcaaaccctagattgattttgcgtgtgctgcgtgaagacggcaggtcggtttatatagagaagggtcgcttgatcagggcgcccgcacgatctctactgcgcgtaaccgaaccggataagtcgcgcgtaacttatccggactccatgccgtttgcacgcaccggatttttcggaacgtttccaaaacaaaaacgaatccgaatttgcagcaaaacaaaactgcaaaaggaggctgcatctgcgcaagggtgaggagccaatttttcggaccattcgacgcgtacgtcgtgcacgcgcgccgcctgccaggccaggccaggcgaggcgaggcgaggcgaggcgagcgagcgcgcgcatgtgtttcccctcttctctccaccacacatgcttcaagtgactaggagggcatcctcccttttaataaggtccccctctcctagaataagcaaggtggtactaaactccacatgcatgccatcccatgaggtgggcttttgtgattttccaaagaattaatcttcgagtgggctaaggcccattcattaattccaacaatcccccaccaaatctcaaaatcccactgagatttgccttttccaatgtactgtttatataccagcggttcgatggagaccaattaaggttgaacatccacctagaattccaagctacacttactcacaacttgaacaatggactacgccttgaattacaagtcttgtgcaagcaagtttcactcaaagtcttatctggtactagaccgtctgtagactacccctcgggtggagcgtataagtcatactcctaggtctttagtaagcttcctagaagattcacccaaaatcttcatagactgcgaccaacagtcaagctcacaaaggtgagttctttcaagaatgctctgcaggacaacatctttgctaattaaagtcaacagaactcattaaggcatagccaacctgccttgcagctcacgagagtacatgcatcttcacttggagagggtatatatattgatactctcctctagtttactaatggtttgttcttctcaggatctaattcacgggatctccgatcacatagactgggttaccaccatagtataactcatatgggtctcaaacccatctccttcgatgcattgtctatcacatttcgtgatagtcccttcgtgaagggatctgccaggtttctcgctgtttggatgtaatccaacgttataactccggagtttcttaatttcctgacagacttcaatcgtcttttcacatgtctagacgatttcatattatccttagaactattcactttgacaattaccgtttgattgtcacagttcataaggatagccggcaccggtttttcaacaacaggcagatccattaatagatcacgcagccattctgcctcaacagtagcagtatccagtgccgttagctctgcttccatggttgacctcgtcaaaatggtctgtttgcaagacctccatgaaacagcaccaccacccagtgtgaaaacatatccactagtggctttgatctcatccacatcagagatccagttagaatcactataaccctccagtaccacaggatacccagtatagtgaagccccaattccacagtacctttcagatagcgcattactcgctcaagcgcacgccagtgatcatctcccggattagaggtaaatcggctcaacttgctcacagcaaaggagatatcaggcctagttgcactagccaggtacatcaacgagccaatgatttgggagtattccagttgattcctagcaattctcttgttcttgcgaagcaacaagctaggatcataaggtgttggagaaggcttactatcaatgtagccaaagcgattcaagatcttctccacataatgggactgcaagagcgtaatcccattctcacctctaattagcttaatgtttaagataacatcagctactcccaaatctttcatatcaaaattttgagacaagaatgatttaacctcatttatcacctcaaggtttgtcccaaatatcagtatgtcgtcaacttacaagcacaaaataactccctcacccccaccatggcgatagtacacacatttatttgccttattgactgcaaagcctgcagatgtcaatgttttgtcaaatttctcatgccattgcttaggagcttgtttcagaccatacaaagacttcaacaatttgcacactttgccttcttgaccttcaactacaaacccatcaggttgatccatatagatctcctcatccagctctccattaagaaaagctgtcttaacgtccatttgatgaacgagaagaccatgtgaggctgctaggaaagtagcacacgaattgtggtcaatctagcaacaggtgagtaagtgtcaaagaaatattcgccttctttctgagtatagcccttagcaacaagccgagccttgtacttttcaatagtaccgtcaggcctaagcttcttcttgaacacccacttgcaccccacaggtttacacccatagggtcgctctgtcacctcccaagtcccgttagcgataatggaatccatttcactacggacagcctccttccagtagtctgcatcaggagatgcatatgcttctgaaattgacttaggagtgtcatccacgaggtacacagtgaaatcatcaccaaaagacttagccgtcctttgtctcttactccttcgaggagcttcactgacatcctcctcagagacaagttcatgtgtatgttcagtttgttctggtggtgtgattgaactgggaattatttcagatggttggttcgaaccactatgtgtatccttcattgggaaaaagctctcaaagaagatagcatcacgagactccataattgtaccaacatgcatgtccgatacctcggatttaactactaaaaatctataggcaatgctatgatgagcatatcccagaaaaacacagtccacagtcttaggtccaagtttgcgcttcttcgttattggtacattgactttcgccaagcacccccatgtgcgcaaataagaaagtgatggttttctaccaatccatatctcatatggtgttttgtccttatttctgttaggaactctgtttaacacatgatttgaggtcaacaatgcctccccccaccatgccttaggcagtcccgcggtgtccaacatggcattcaccaagtcagtcagtgtgcgattcttcctttcagcaatcccattagactcgggagaatagggaggcgtcatctcatgtatgatgccatgttcctcacagaataagtcaaactcgttcgagaaaaactctccaccatgatcagacctaagcctttttatctttctgtcaagttgattttcaacttctgccttataaattttaaaatagtctagagcctcgtctttcgttttcaacaagtacacatagcaaaatctagtagcatcatcaatgaatgtcatgaaatatcgttttccacccttcgtcaacaccccattcatttcacaaagatctgaatgtaggagttctagtggtgccaagtttctctcctcggcagccttgtgaggcttgcgaggttgctttgattgcacacaactatggcacttagaacctttgacaatggaaaacttaggaattaaacacatgctggaaagccgagacatcaagccaaaattaatatgacataaacgtgaatgccaaacattagcctcatcatccacactgccacaaatatggttcacagacttattgcagaaatcagaaagggaaaagcggaacaggcctccgcactcataacctttaccaataaaatatccatgtttagacacgactactttattagactcaaaaaccaacttaaatccgtctctagtcagacgggagccactaacaagattcctgtcgatagaagggacatgctgcacgttcttcagctgcacgatctttcccgaagtaaacttcagatctaccgtgccaacaccatgaacagaagcatgtgacccattccccattaggacggtggaaccccgtgcgacctgataagaagaaaacaatgagatgtcagcacaaacatgtacattggccctagtatcaacccaccaattagtagattgattaactgaaaaaacagtaggtaaattaccatacccgcttccatctccagtgttgccaatggtcacattagcagacttagaagtctgccctgcaggtgccttcatccccttgcgctgtggacacttcctagccagatgaccaacttggccacacacaaagcaagtcctctcatcctgattaggattgttgttgttcttcttctgcttcttgaagttggtggtctgctgagctttgtatttccccttgctcttgttctgggccttgtgcacaacattggcactggactgcccaccatcgcccttagacgcggcatctttttcccgagctttctcctcaacattaagagacgcaatcaacccctcaacggagtattcctgtctcttgtgtttgagtgcagtaccgaaactcctccaagatggaggtagttttgcaataatgcacccggccacaaagttgtcgggtaagacacacttaaggagttcgagttccttagccatggtttgtatctcatgagcctgttcgactacagaacggttgtcagccattttgtagtcatgaaactgctccatgatatacagatcattgctagcatcagtagcaccgaatttagtattcagtgcatcccacaactccttagcgtcggtcatatgcatatacacctcgaccagacgatcgccaagaacgctaagaatgcatcccacaaagagagtagtggcttcctcgaattgcttctgctgttcagcagtaagaactccttcaggtttgccagtactcacccagaagcatttcatagctgtcagccacagagtgaccctgatctgccatctcttaaaatgcacaccggtgaatttatccggcctcagtgcatcgacaaaaccagccatagtaaaatcacagtgcctataataaggtttttggattgttgagattatagacatataatgatttaatctattccataaataaatcatgacattacagatgaaaactagcatgaacgcatcattagatctacacatgtaaactacacagtataacatgaacagatcaaatatgcgcaacatattgaacacgtaccaaggtgacgaaaagaccggctgcttggtcgaaacttttcgcaggtgtctacgaaggcacgaaacacgcgagcgaagaggaaggcgagccgtcgcgaacgaacagggagcagtcgcgcgaagcgcttcccaaaaaccttattgccgccttctcccggtgcaggacgtcaaagacagaggttccggagacctgctctcccgatcgctggtgcacgccggcgagcgggatggagtagtctacgagcgacggcgcagtacagagtaggaggcaaaccctagattgattttgcgtgtgctgcgtgaagacggcaggtcggtttatatagagaagggtcgcttgatcagggcgcccgcacgatctctactgcgcgtaaccgaaccggataagtcgcgcgtaacttatccggactccacgccgtttgcacgcaccggatttttcggaacgtttccaaaacaaaaacgaatccgaatttgcagcaaaacaaaactgcaaaaggaggctgcatctgcgcaagggtgaggagccaatttttcggaccattcgacgcgtacgtcgtgcacgcgcgccgcctgccctgccaggccaggccaggccaggcgagcgagtgcgcgcgtgtgtttcccctcttctctccaccacacatgcttcaagtgactaggagggcatcctcccttttaataaggtccccctctcctagaataagcaaggtggtactaaactccacatgcatgccatcccatgaggtgggcttttgtgattttccaaagaattaatcttcgagtgggctaagacccattcattaattccaataacatatttcataaaattttttgaataagacgagcagtcaaatatgttctactatagtagctaaatatttagaaacggtgggagtactactatagtagctatagtagctagagtagatgtgttgacaagggattgagtgagtgcgttgtaacggtgggcatggagtggccttgtagctaggcttatcatgatgattgatgatatcggagtagaatttatcatcaaggcccaattaaggggcagggctcgatcagctgtttgtgtagttggagcgcgcggtggaagatgaacaagctcagcaacctagctagctagtcgtataccgatcgatcgatcgatgaatatggagtccctggcagcaggagcatggtgggtggttgtgcttcttctactcgtccttacaattgtggcctcctggtaccggtcatggtggaagacgaccgaagcgggggggccgctgcttcctcctccggcagctggtgcaggtccatggtgggtgtgggtgtggcagtggcgggagacggcggccttcctggcctcccatggcagcgggcggggattctaccacttcgtgcaggagcgctacaagttgtacaagggggagggggagggggaggcaacctgctgcttccgcaccgcgctcatggggcgcgtccacgtgttcgtgtccgcctcccaccccgccgcctcccaactcctcaccgccgaacctccccacttgcccaagcgctacgcccgcaccgccgccgacctgctcggcccccacagcatcctctgctccacctcccacgcccaccaccgccacgcccgccgcgccctcgccaccaccctcttcgccaccccttccaccgccgctttcgccgccgccttcgaccgcctcgtcatccgccactggactacgcttcttccgcctcataatcaaaaccaagtcgtcgtggtgctggacgccgctctccacataagctaccgcgccatctgcgagatgctgctgggcgccggcggcggaaagctgaggccgctgcagagcgacgtgttcgccgtcacgcaggccatgctggcgctgccgctgcgctggctgcccggcacgcgcttccgcaggggcctgcacgccaggaagcgcatcatggcggcgctcagggaggagatggcggccagaaatcaccatcaccatcaccatcaccatcaccacgacttgctcagcgtgctcatgcagaggcggcagcttggccatcccgacgccctcactgaggaccagattctggacaacatgctcaccctcatcatcgccggccaggttaccacggccaccgccatcacctggatggtcaagtatctcagcgacaaccgcctaatccaggacaagctacgggtcaactatcttcttctttctttctttctttctttctttcttcaaattttcaattcaatcaatacacttacataacatataggagtacctcacatacatgggcataattaattaattaattgtactgtgcaggcagaagcatttcggctggagcttaagggtgattattctcttactatgcaacacctaaacgccatggactatgcgtacaaggtaggtactccttctcccctgcatccccttgctaattggagtagtactagcaagcttcttaattaattattcctacttcttactgtaaagcttaacttcagctgtgagtacataatatttcatcaggcagtgaaagagtcgctgaggatggccactatagtttcctggtttccaagggtggcgctcaaggactgccaggttgcaggtgactggagtagtatcttacagtatactattattaatgtcttgctcaatacgaattcaaggaaattaattaagcttatactactactctctccgtttcacaatgtaagttattctagcatttctcacattcatattgatattaatgtatctagacatatatatttatttagattcattaatattaatattaatattaatgtaggaaatactagaatgacttatattgtgaaacggagaaagtagtacacttgacatgctgagtaattttgacattgcatgtatgtatatacagggtttcacataaagaaggactggattgtaaatattgacgccaggtctctccactacgacccggatgttttcgacaacccaacggtgtttgatccttctaggttcgacgtacgtacgaatttctttacttgcttggttgcctctacatttttctactatctgaatctgaattaagcaactgttgtagtgtctgcaggaagagggagagggagatgatgcgaagcttgggcgtgcacaaccacagaagaggaggctgctggtatttggagcaggcgggaggacatgtctggggatgaaccacgccaagatcatgatgcttatcttcctacaccgccttctcaccaatttcaggtaggttaggtactggagtaccagaaaccagatgatgctctctatctcgtcgactcttgtaatcgattacaacaacactgctgtgctgatttcagatgggagatggcagatgacgatccaagccttgagaaatgggcaatgttccccaggttaaagaacggatgccccattctgctcacacccatccacaattcttgataatgttccagattaattagattcttcatgatgacttgtggaccgtggctgcctagctactttatctgtttaattagtaaggtagtattaacaaaaactgctgtcaatttattcgaaactagcggtattgtactgtaactaatagcctagagatggaattcggaggaaggatattcctttgttatttgtaataaataaaaaagacctgctatctggagtagatgtatcaagactattcatggtaaatttgcaatcggtgaggaagaagaaagaaacaaatagttggacacgtgacgatggtggcggaggagaagaggaagcatagcagggtgcgggacgcccatggccaaaataaacagaggattttcagtatttgccatccgattcagagcactttcatgatatgctatttaattcgtaccacttttgactttgctactaaaactgcaaatttcttcaatccatatcacttccatcatttagtgtcagttctctgttctcacacgccgacgagttcattcgtccaccacgaaaggagctcctctgacttaaagttagaaggatatgagtccttgacaggtgcggcccacctttataggcccacatgttagagatgcatgtccctttgacttaagttagaggagccttgtcggtccaccacacaccaacactggtaggacagacaacaatcctccacaccgcctgcgagagggtcctcttcctgtcttcctggccatcaaggaggagagaatcaactccacatcttctcgggtgacctctttgatagctccttcggcgagggatgggtgggcggaagtcaaggaggctgttcttgaagacggaaaagagaagtaggggcc

SEQ ID NO: 7922 - DNA, 49792 bp, Oryza sativa
  unsure (1)..(49792): unsure at all n locations
ctgtttttacctagtgctgtgcgacaattaacagtacccacaatgcaaacttagaggtgctgttataactgtaatttgttttctttcagagtaggaaagaaacatttcaaaaaatgaatgagcagtaatacagtacatctgtatgcaggttctcgactggcttcggtgtttctgggggaagtacgcttatccatgatttttactcaagagaagtacagagccccattcatctcactgttgacactgggttcacaaggggcgatgcttcaatcaaagcctatatctcatccaacctgtctcttggagataggcaccttgctgcgcagttccaagagattccccttgatctgaggatgcttgaagcaggaaaagttggatgtatgtctcacagtcatcattgctgacccatactttttcccccattaccttaaagttttctctacccaatttatatgttatacagtaagatcttaagttcttaggatgagaggtatacaacattgaattaacaggtttatatgttatcactagaaatctatatggggcctgcaaaacctgaagcaaaaaaaaaaagtcttcttttggcagctttgaagtccttatggcttgaatatttataatttccttttgttttagttatccaaatagtggagggtattagtattgtggaacatttatttcctgttggaggaaaactattctgtgttttttgcatttgtcttggttgtacattcatttatttcgtgttggtcattattattgcttttgtgacagttgacatcctgaaatctacaattgtggagaagctccccaatgatctggaaggaatggaatcctccatggaaaagctgtatgtccttattgacgagatctacaaatatgttgatgatgtcgtggtaagaaccttttggggcaaaattctcttatttcttatgtagtgcagtgttaaaaaggctttttccacccctatgtaggaggggcgtgtagcaccggacaataaaattgggagattcatctctgatgctgttgcttcaatgccaaaattgtcaccagctgcttttgacaagcttttcaatgacaggattcaggttagtgctttagcttgtcggtatgcgagtaaatgaatatcattttcaattttcttgtacataatcattgcaccatttggtgatgcaggataatcttgcactggtgtacctgtcaagcatcacaaggacacagattagcatagccgagaagttgaacaccgccgcccaaatcctgtaatttccatgtagttggagcatctgggagtctgacttaaaatgctgttttgtttgtttttcattcgcacgactgaaaaattgggatatgatggcagagtatgcatttttgtacttgttatctgaggcctaaagaaaagaaaccatcatgtttcagatgataatgtttgtgttggaggttgggtgcactcttggattagtatttcgatgtagtttaaatatttgtgttagcgctcttgcttgatttcctcgaggagcacttttggaaggtgcggtcaattttgttgtgccttcattttgaggcagagataaaccacccagatcatcattatatatcccggcgaatttgggctatcttttgggagtcacctgtagttaagttgtactcccactgtcctaaaacaacttaacctagaatgagatgtgattgtccagatagagtcacatcccatcctaggttgagttattttgtgacagagggagtaaatatgagatggagtttgtgaaataaggcatcattcaataacctatgaattgttgggacagaggtagtataaatatttgttctccaccaaactagaaatggagtatgctgaacacagttcagttgtatacatttcttatccactccacttccctctaaagtaccaatcaaagctcatccaaaaataacacaaaggctgtgtttaattccattcaaacttccaaaaattccatcacatcaaatgtttggagacatgcatagaacattaaatgtgaacgaaaaaaaaccaattgcacagtttgcatgtaaattgcgagacgaatcttttgagcgtaattacgccatgatttgacgatatggtgctacattaaatatttgctaatgacggattaattaggcttaataaattcgtctcgcagtttacaggtggaatctgcaatttgttttgttattattctatatttaatactttaaatgtgcgttcgtatatgtaaaaattttggaaaattttggaggaggaactaaacacgaccaaaatcccaatcaaagcactagtacttggcagtgatattttataaagattttgtaatcccatgtggttcaattaaagatagatcgtattctcaatcagcaagctcgattattggtggtgaatggcagggcgcaagcggaggtccacagaggcactcgttgtgctgcaggctgtacacgtacgtcgccgtcgaagctcgccacgcccgtcggcacctcgccgcagaggctgacgttgaacacctgcagcctgctcagcttcgtcgccgtagatgatgcatgttgtggctcacgtccacggtgaccacctgctccggcagctccaactccaactccaacgcgttgcgcgacacgtcgatggcctgcgcggccttccctcgcccgatcgaacagcgccgccggtgagctgacaggtcgatgcgcgccaagttgacggcggcgaactccgccgggatgctgatgctccgggagaggtggttgccgccctgtcgctggggtggcattgcttcgaggcggcggcgacgaggagagtggagagcatgaggaggagcatcttattcttagcaagcagcatttccatttccatggccatgggactggctatatattcatggggctagctaatctgatcgaattattgagtttggttaggaggattagcactgtcattggaaattaatttgcaaaagatcaaccaaagcacaagtgaggaggtcaaaattgaagtcaaatatagtatgctgcacctccatctgcatctgcatgcatgctgaccaaagatggactttgctttgccaccaggctggctgctcagctcaaagtatcagtatggacatacactcaaaagattgattgacactaaatttcactcatgttcatcaagaatggaccttaattattagcattagctggttgcttcttcattaatttatcctatagtttttggtattgctcagtgattattactacagtacagtagtggttacagtttcaaggtctggatcaaacatcaatggcaggcggcgagcggcgcaccgcagaggcacttgttgtgctgnaaccnnnnnnnnnnnnnnnnnnnnnnnnnnnnnnnngtgggcacctcgccgcacatcctgttgtagctgacgttgagcagctgcaggttgctcagattcgccacctgcgccgggatgccgccgcggatggcgttgtggctcacgtccaggaagctcagccgctccggcagccgcagctccgacatgtcgaagctcagcgcgttgcgcgacaggtagacgctgccgagctccttcttccccgacccgaacagcatcgacgcgtcgccggtgagctggtttcgcgacaggtcgatctgcacgaagttgacggcgccgaacgccgccgggatcctcccggacaggttgttgtgtgacagcgtcaggaacgcttgctgcccggccttgctcagcagcagccgcgggatgctcccggtgagctggttgcggctgaggtcgatggagatgagcttcgggggcttggcgaggctcgccgggatggcgccggtgagcgagttgaaggagaggtcgagagactggagcgcggtgaacttgtcgccgatgaaggaagggatggagccggagagggcggtgcgggagatggtgagctccctgagggcggtgagcgtggcgagcgcggcggggatggggccggtgacgccggggaccttgaagaacatgagctcctggaggcgggtgaggcgggcgatggcgtcgcctggtatgccgccggtgacgttgtcatcgcgtatgatggcgaggctgaggacgcggtcgccgtcggtggggtcgtagtcgtagtcgtcgccgccgcagtcgacgccgtaccagtggcagcaggcgatgtcgggcgtccaggactggaagtaggacgcgttgttgaaggccgccttcacggcgagtagcgcggcgcggtcgccggcgtcgcagcgtggccgtcgcacgggcgccgccgccgccgcaatggacaccacgaacacgagcacgtgggcgagcaggagcaggggcccgatggcgcgcaccatttcgacctccgatcgattttgtctcagcttatcttgaacgatgtgggtgtgggggtatatatatgtagacggagagggagtaatcagattggcgagttgttcagatggaaggagtttggcgccaaccgctttgaacaaaacaatcaaacgacgcattctacaatttgtgtcctcctgccccaagtgccttgttctacttctacctgcattatttgaacacaagtgcacgacaatccagcacacaagatatttagtccctgaaacaactcagcacacaagttctattactaattcatcccaaatgcttaaaaaactttttgacttctccaattctcttgtgtctatccccatatgtatcgatcgcacggtgaaatgaaacctcttggtgttgggttgggtggtcaaacaacaacacaaaacccccaaaagccactgacagtaaccggtaaacaagcgtacaatcaaatgtaaatctacacctgtaaaatcaacaatccataatcccatattaccttcgacaatacggttcatcaacagcaggactgcaaattgctgcgcatccaatagcagaacctgaaaaggatagccacagaagaaagatgacatttagtatcaccggataatcgaacaacacattacatttaattacgggcatgtatcctcttctgctagtcaaagaattcccaaagcagcactgcagcgccaacatgattattctcattaccagcatattgcaggcctgaggcctcctcgcctctgcctaataaaacactactacccttacaggattcctagtttcaaaccagcagcaaaactcaaagctgcaagcaagaatcacagaatctgcttttaattatttcgatgaacccacttattcgatcctcggtaacaacaatgctgactgctgagtgcatcgaaccagcaaggtttaagtatccaaaagagtccatagctccaagcttctgtcatcatatgaccatcaattaggtcccggtatgttacacaactgaaaaaacaaagtaaaattggatgtcatttggtacttcattcctagcaccagccaccaatgtactgaagttttcttgagttggaaacaggaacagaacagtgtattatagaatcaaagactcaggatatctaacacatatattgccatgccagacaaatgactcatagcacatacaaatcatgattaattagtagcataaatcactacgcatgccatttgatgaagacagcaatgttgaataaacagcggcagatagtaatttgatgaagatagcaatgttgaatgtaacagtggcatgtagtttcagttaacttgcagctcgctagggctgtattaaactgaaactgagttcagcaaggaaaaccttatgcttaagaactgaattcaagtctgctgtacctgcattatgaacaccattctctagcattctggaacatgcgcagccaggggctgggaccactcttctcaagctgccaatccttgggagaccatggatattgccacatcatgaagcaacgctctgggtgtggcatcatagcaagatgtcttccatcaggggagcaaagggctgcaatgccaagtggagagccattgggattgaatgggtagacttcagttatgttattagcatcgtcacagtaccgcacaggagccaggttagactttacaacactagctagaacattttcatctgggaagaaagctctcccctcaccgtgagcactccaaatgcccattgtagaaccttccattcctttgaacatgatagcaggagaggcccctatagagacactagtaaaccggcactcaaaacgaccagattcattgtgaataaatcttggctgggacatgtccccacctgaaccaagagaacctccaacgtctgatcctggtacccagccaagaagagccattagctgacaaccattgcacaccccaaggctgaaagtgtccggcctattgtagaaattctggaactgctgtatgaggggttggttaaacctgattgatgcagcccaacctttagctgaatcaagaacatctgcatagctaaaaccaccgacaaacgcaatcccacggtaatcctctagagaagacttcccagctaagaggtctgacattgtgatatcccatggttcgaatccagcagcatagaatgcagcagccatctccctatcaccattgctcccttcttcacgaaggatggcaacttttggctttgaggatgcagtcagcagtttttcatctgtaaatttgggagtgaaagacaaagaccatgatggtgatgttctgtgctttaatccttctttctcaagtctgacacaagatttcagacgttgtagcccctcaagctggaagcttgtttcctcccagatatccctgagatctgaagttttttccttaagatgcagcctgccatcaacaaccagctcaatatctggtgatgctgtaacttttccaattacattagcggaaatgcctcctgcttgaagcttttgtttcacaacactcagatctttcaaatgcacttcaagtagaaggccaagctcctcggcaaatagtgcttgaagaaggctagaatcttctgagtcaatgttcagcttaacaccgcaattaccagcaaatgccatctcaagaacactcacaataagacctccatcactaatgtcatggccagctgaaataagacgctcaccaagcaattcctgaacggcctcaaaggctttcttcaagtacaggacatcatcaatgtctgggcagtcatttccaatttgatcaaaagcctgtgcaagagcagaaccaccaagccggcgctttcctttgctgaggtcaatgtgcagcaaaactccatccttgccaagcttcaaatcaggagttaccgtcaatgttatatcaggacatgtcacataagcactgatgaccagatttccaggagccttgacgacctcaccatcacattgagctgccatggaaagactgtcctttcccccatcaattgcaataccaagttgaatcatgcagtcagccaatgcaacagcagcatcatacatatctgcaccttctccatcaagctttgcagcatacatccagttaccacttgctttgacatcagaaagtgatgaaactttagcccaaaccagattagtcaaggcttccccaatagcaagtcttgccatggccttgggattaagtaaacctttcgttggctgttctccaatggcacaggcaccacctgttagatcagtgtatgtctgtgcgatcacagccacatctgcaagaggaagttggagaggtccaactgtctgctgttgtgcaacaagacctgtcacacacctgtcaacttttgtggttaagaaacgcttagagcatacagatggaagactcaatactcgcttcagagcatccatgattgttactccacgggcaatatctaagggctcactgactacagagactcgcttgaattcaaaggtcttttggggcatatctcctagaaccttttcaagctcgagatcctcaacaggggttggaggaggaaggccatttaacttcgcatgctccacagcagcactgtcaatcaaaacaatctttccacatccattgattgtcccaatgacagccattgaaaccctttccctttcacaaagtgactctaaaaggcttctgctctcaggcttcaccagaagtgcatcttgttcctggtactcagcaccccatatctccaagacagacaatgtatgatcaccgacaacaattgatcgtatatcaatttcagcgcccttaggatagattatttccttcaccacattgcagtttcctccagcaccctggtcatgaatgctgatgatagggttgctctctcccatttccgcacatgccctgaccacacgatataatttctgtgccatttcagcatctccacgctgtactgcattgaaatcgagctctgcatcattttgtccactaaccatgctggaggcagcaccaccacccataccaattctgtatgctgggccaccaatcttcacaactagcatgccaatttctggatcccccttagatatatgtgcatggtcaatttgcccgattgccccactaaacattattggcttcagccactcgcgccgttccccattaagcaacctcgtcccaaaatttctagtaaatccctgaattagaggttcaccaaacttgttcccatagtcagaagcgccatcgctagcatcaataagaatttgcaaaggggaggccaaattcgacagatatgaaaaggatggatcctcccagggtgcatatgcaccttcaattcggagattaccaacacaatagccagcagtagaagcaacaacaaaagaaccctttccagtggcatgtgtgtcccttatgcgaccacctgcacctgtttcagctcctggataaggtgccacagcacatggaaaattatgggtttctgctgtgaataaaatatcaagctcacgcatcataacagataatggtgaagtggagcctggaactgttgggcgtagctgatttgctggatatccctttattgcacttgagttgtcattaaatccgatgactgagttattatcggggttagctttcaggggactcttcactaactgaaacaaggttctcggcatggtctctccatctatcacaagctttccattaaaaaaccaatgcctgctgtgctcactgttggattgtgcaatgtcgaaaagttcaacagtggttgggttccgtttgatgtcatctctgaagaggtgggtatagtacttgatatcttgttcatcaaaagcaagtcccatcttcacatttatttcttccagagcttctcttcccctttcaatgactggaacaatacggacaggttcaggaactacatctgaatgaaatgatgtgagcttcttaggataaacacactctgtcattctatcatgaaccaaagcagtaaagtcgttaagctggctttcatcaagtggaccatagccaggatccaagcataaaaggtatctccttgatctctccaagcgagttacttccatcaatgagagagatttacatattgagacggcattggttgagaacgctgttgaaaaagtcatccggggaccaacctcaacaatgacactataagggttcctagcgacttcctcctccagaaagctttgtgcttgtaacttatcaggttcataggtttctgctaagagccactgcagtgttgcaagcttctctgaagctaatgcattatccaattgaatgttgaagcattgttcggtctttatacccacaatattagaagaaacctttgcttgcacttgcctgagcagctcaattgtctcactgtcttgaagatatggtatacgatataattgaataactccagcttctgatgcattatcagatttgtgaaccaatgaactgtcaagtcccctggaaaccaaagcaccaggagttggcagcaatcggacattaggaactgaagctcttcgaacacctggccaacaaaggtgtctatggaagcactgctgagatcttctcagtccagaactccttgcagcaatgaaaccatttctttttccctacatagagagtagacacataagaaacacaacaatgttatggggaaaaaaaatccatccagtgttgtgcaaaggtcgcttaccagattacaaggaaagccttggaagcgtaatggattgcttactgacatttcacccggagatgccatgtttgaagaaatccaaggatcacttttgtgaagaaaaaaaaaggatgatctgcaatacatggtacaggaattagatattgactttgcatgatcccaaacttgcacttgcgatgttttttttgataaagtatagctaagctcaaataataccacgttgcttttgtccaaatttaaacactaaataatcaagaagggtgctagctatacccaattgattattcctgaaagatagtgatacaaaatctgcctttgaaattattgaaagacagagtttctatagcagatttaccacccatcaagctagaaatgagctgctatggccatacatagagcatggatagctaaaagaagatgagaaggatataggaagctaaagaaagcagtggacaatcgactgtggcgtactacaaattaactttgtacacatgaaacagtatataataaaagcagaggtagaggtgaattacttgatcgaacttgaagtctattggattcgattcttgacagcaagcaacgggagataatatataaagggggaccggggagataggaacggcggctgagcggttcgaggtgtacccgtgacgcagcgggaggtggacagaaagagtaagcggtgggagggctggcggtagcagcgcgcggaggaggtggtgggctagtgggatggcggcggcggcggcggcggcggcggtggcggcgcgggaaggggcgggcgacagcgagcgagaatgaaacgagtgacgggggtcgggggctccttccttttaatcgacggctctccatcttaaactcaagagggttctccaacaaattggcctttcccttccgctaatcgtggatgggccttgatatcctctttagatacaacagtgtttattaacgggttttctctattagcttataacaagaaataaatttggtgatgtgaaagagaaaaggaaaagaaaatatttttactacgcatgacaatgactcaaagggcgaagaaaagaaaagaaaagaaggatgataaatgttgtattaaaggaatttttgttgtacaagggtggagaaaagaaaagaagaaaaaaattattccggtgcattaatggttaaaagttcttgttatctcaaatagaatgttagtctctagtgttatgtatcaatacatacgacccataacagactctatctttgtatatgctattacatctgcccaacacaattcactaattctcgtcctgtttgtcagaatttcagatctcaaatcacgatatatttaaagtttttacgctaaattatagtgatttaactttttaaaaataaactcatctaaaatgaaaataaaatgatatattaaacgttatcaacgtaaacgtcgatctgcatccatagtttttgaacctaagaatacccagctttgacaaatcttgggatccaaatctatgccaaagatgtccatataaacgtagcttcatactcttagtatgaatcagacattatttcccgcaggcatctcaaccagggctgaaaatttcggactaaaatttccaaaatttcggtcattttgaacccctctaatacgatattatttcggctgaaaatttttagttttttgtgaattttggtaatatttgttcaaatttaactaaattttgttcaaaattttggtatatcagtgacttccgatcaaatcggttaattcgaaaaagcaaaacctgatcccaacctttaaaacatactccctccgttataaaaagaatcaaatcctatctatgaattaatctggataacactacgtctaaatttgtagctaggaattgatttatttttgaaacgaatggtgtacatactatgtgttggtggcctgagataggtactccatatcaagcacgaacaaaacattacatcacgcatgaacctgaaccgatcgaaggttcttatttatatactactcctagcttgctttgctttgctaggattattcgattactaattgcaagcagcaaattaagactgcattaattgtaggtggatgattatggtcctcatatcatataggagtatatcaatgggtgcagtgagaaagcggcgcgccgcagaggcacttgttgtgctggaagcagtaggcatcgaagctgggcatgttgccgccggtgggcaccacgccgcagagcctgttgtagctgacgttgagcagctgcatgtccgtcatgttggccatctgcgccgggatgctgccgtagatggagttgtggctcacgtccaggaaattcagctcttccggcagctgcagctgcgacatgttgaagctcagcgcgttgcgcgacaggtacgcgctgacgagctccttcttccccgacccgaacagcatcgacgcgtcgccggtgagctggttgcgcgacaggtcgatctgcacgaagttgacggcgccgaactccgccgggatcctccccgtcaggttgttgtgggacatcgtcaggaacgcttgctgcccggccttgctcagcagcagccgcgggatgctcccggtgaggcggttgcggctgaggtcgatggagttcagcttcgggggcttggcgaggctcgccgggatggcgccggtgagcgagttgaaggagagatcgaggattccgaggtcggtgaacttgtcgccgatgaaggacgggatggggccggagacggcggtgtgggagatggtgagcaccctgaggccggagatgttggcgagcgcggcggggatggggcccgtgatgcctgggaccttgaagaaggtgatgtaccggaggcgggtgaggccggcgatggcgtcgccggggatggtgccggtgatgttgtcgtcgcgtgtgatggcgaggttgatgacgcggtcgtcggaggggaggtagtcgtcgccgcagtcgacgccgtaccagtcgcagcaggggaattcgggcgtccagtactcgaaggaggcgttgttgaaggccgccttcacggccagcagagcggcgctgtcgtcggcgtggcagctcggccccgacgccgccgcactagtgcagctcaacgccgccaccgccagcaggagcaggacgacggcgcgcgccatttccatccaatataatcttaatctttcctttccttgctgagttaatttatatcctgagttggttgttggtacgtgtagtaagtatatatagtcagatggatcgagtatgcagttttggcgccaaccgctttgacttgaactcgttagtggaagactcacaactcacaagtgtgtgcgtgcttcctctcttctatctgcttgtttacttcgacgacgtcccccaggaatctcaagatgggccggattggcgcttcttcggcccaaaccgagtctactgccgccggagagaacttcaaggcccacgacctttcccgcttcagccgtctgggtctgggctggaggagcgcacttcaccctcgagtggcccagctttgcagcctggccagccactcagtgcttcagttgccgccgccatgtctgaggccgactccgccggcgacatccatccttgggaagaggcctcggcagccaagacaccgctctcgcccagctccctacacaccgccatgggcgcaacgcgtcgtgatgaaaagactcggcgtcgtcgacaacgagaacaaggttgaagagcaggacctcttgcggtacctggagctgtttaaatcacccctcgcgccgtctcatgtgcaggcacttgcggcgctgtgcagcgtggcgatccctgtctgcggggcggcctgattgctctgttttctggtggtggaagcccatgagtctctatgtcttgtagtcttttagtttggaatgttaggggcaaaaggtccctagtagctgatgttgttagaacttctagtgcgtccattttttgttgtcaagagtctaaattggctgttttggaccagcggttgcagaaccagtcttgtggtcctgtgttagactgtgcggatttcattcctgctgatggaactagagggggcctgttcacggcttggaggagtgatctcttctctgtttcttgcctgcataaaggaaggtggtcgctctctctctcagattttgtaatttggaaggcttaccaatgtctacgggccgcagtccgacggcgacaaaatcctttttctagaggagctgctggtggttggtgactttaacttgttggcctcggagggtgacaagaacaatggcaatgtgaatcgcagactgattaacaagtttagacaaactattgacgttctggagctccgtgaagtttatcagttcaggcgccggtatacttggagcagtgaacaagagcagccaaccttaaccaaaattgataaagtgttgattaatggggaatgggaggaaattttccaggatgcccatttgcaagctctcagttcgtccgcttccgaccactgccctctgcttttggcttgcgataacatgatgcaccgtccgagaaagtataagtttgagtctttctggaccaagctagatgggtttgaggaagtggtccggcaagcttgggcggctgcgccgtcgggctccaactctgtttcctccctccatctcaagttgaaatctactgccacatctcttcgttcgtggggggctaggcgaatcaacgaacttcggcagcagctcgcagtggctcatgaaattattcttcagctggacaaggcccaggacgaccggcttctctcggcagaggagcgatcgctgcgtgctaccttgaagggacgatgccttgctctcgcctccctggagcacattaggctccgtcagcgagccaggttgttattcctcaagcatagcggcacaacggcacaattttttcgccttaagatcaatgcacgtcgaagaaagaaagcaattcctaccctctgtcatgatggtgtctatgctaccactgaagaagataagctacaggctgcatacaactatttcctcaatattttggggacgcgtggagagcgaattcccagcacctacatctcgtcaacacagcttccatcatcctcctgcccaagaaagaggacccgaatcaactaactgacttttgcccaattagtttgattcacagtttcgccaagatcctgaccaaaattctagcacttcgtctcgccccgagaatggatgaattgatcgggcctgcacagtcagcctttattaggcgcagaagaatacaagagaacttcctctacgttcatggtgtagttaaaaagttgcatcggtccaaaacgcctgccatgctgttgaagattgacatcgcaaaagcttttgatacggtatcttgggaattccttttggagctgcttcgacatttgggcttcggcgctcgatggcgtgactgtgtttctgctttgcttttcacttcgtcaaccaccgtcaccatcaatggtagagacactcaaaggatcaagctagctcggggactcaggcaaggggatccactctcgccgttgcttttcgtcattgtgatggaggcatttgcggctctctgctccacggcagcgagccgtggcgtgctttccccacttgctacgggttccttgccacttcgcgcctcaatctatgcggatgatgccatcatcttcttccatccttctcggcgggacgcgctgatgatccacttcatactcaagttgatgggtgacgccaccggcttggtttccaacctagccaagagctcgttgaccctgatccattgcactgatgttcaaattgaagaggtcacagaggtgttgacatgcccaatcaagcaattgccgattgtttacttggggctgccgctttctgtgcgtaaaccgacgaaagtgcaaatccaactgatgatggataggcttgccaaaaatttggctggctggaagcccaagcttttatctccagatgcccgtctagccctgatcaagcatgtgttaatggcgctcccactctacttcatgtccgtcttggaactaccagcctgggcgatcaacgaaattgagaagaaatgctggggtttcatttggaagggtgatgaagatgctgcgggctcttgcagcttggtggcttgggagaagctttgcctctctatcgagcaggggggactagggatcagaaacctacgcctaatgggaattgcgcttcgcactcggtggatttggctgtgccgcgctgagccagagtgttcttggacgcgcattgcacctctagctgacagaaagtcactgcactgctttgccgctagtagcaaagtactgctggggaacggagcctctacctcgttttggtgcgatagcttgttgccagacggaggatcagtgcagtacagattcccaattcttttctccttcgtcaagctgagtgacatcacagtggctgccgctctctgcaacaactcctagattgcagatattaggggcggcctgtctgtccaagcgatggaggaataccttgcgctcgggtacgtgatcgccggtgacggagcgtggggctcctcaccgagagaccgcgcgggccccccttgccggttcggccgggggcgctaggtgaggttctaagcactcgatctgtggaatgtttcgcgagagagcaaatgcgcaagacacgggcgatgtagacaggttcgggccgctgagaagcgtaataccctactcctgtgttctggtggatctgtgtatgaaggagttacaaagagctggagagcaagagagttcaaactctagaaaccctcttcctctttctctcctctacgagctcaggtcttctcccccctctttccccagctcccccgttcttaagtgggcaaggtcctccttttatatctcaaggggatcccacctgcaccacttctacctactcttcttttgggtggggactcaccctatcttcccaaaaaagaaaaaactggcttgcgccttcgcctggaagctaaatcacagcttgtctttgagtgaggcccagcgtcatcactcgcctgacaccggggatctccctattactccctcattaatgggcggagatttgccatggctgttgtccgaatgaccctctgatgggatgggccatacctacctccactccgccggaagcaggcgcaacgtgggagcacggttgtctgccgatgacgtgaccggcgtcagaccagtcacaaaccggtcattcttgtctaccacgcgtcagtttagcatgccacacgtcagcccttcttcataaaatgacttccttgtaatggttgcgatgaagcctggtatgaatctagccgggactgacgtgctaactccaggagtcagcacgccggctccggctagggacgagtgcatagaggctctcatcattccgacgggacggggcgaggcgtgcgaaaggccgcctgttgccacctaacccgcgatctgaccggtatgtgaccggtcacacactgtgacctgtcacggaccgaacgagtgtgctgcgctgcattaaatgcggcgtggggcgctcgtccaacccgcaataaacgcggttaggtgagcgccgctgtgctcacctaacccacacacgtggcgccaaacccacagggggtcggggcgccccagccctcggggccgaaacgggagcggcccgacccctcggggagacagagggaggggcggccacatcaccctcgggcccgacccccccgagggggtcaggccacgtgggtgactgcagctgccccaaacctctagtcaagatacccccggtcccatgtcaccgacagtagcccccggcgttatgccagggcgatcgccctcctcgaggaaagcgctcgggcgtgacgccacttcttaggcctggtgacaggtggggccggtctctacaggcgggcaggaatccagtggtcgcaaatcgcgcgcatcggcaagggaaaaaccgaccgataataatgagcggctttcttcaagaccgctacattacttgagtagcgcgcgaattgggacgagccggttcgtttcgcctggagatgtgatgatggtgcatcggtcggcgagcgtagttaacgtgcgcacgatatatgccatctcgactgccacggccgcacatccgcctcgtgcgccgcaaacgggcgagcgggattagtggaggagtgggcgcgagaaacgagggggcgagatagtgggcgcgggaagcgaggagccgggcatagcgttggtaagggtataaagacgccgaggaagagattcgtttccttcctctcgccattattccccttgccttcgccgcttgcgttctaacttctcgtttcctgtgccctaccttcgccgcactcactcgctctcaagcccctcctccgccggtgtcatggcacggggctccgcaccgctcgacggtagcgtgctgccgccttctcgcatcgtgagcgagaggcaggccgggctgccgcgccgattcatgccggaatctgccaccggccgggaggtggtcgcgctgggtgagggacgcccggcaccacactacccggggcggtccgtattcttcctttccttcgcaatggcagggctggtcccgccattctcttctttcttcatggatgttctggagctttataatctccagatggcgcacctcacccccaacgcggtaatgacgttggccatcttcgcgcacctatgcgagatgttcatcggggtgcgcccatctctccggctgttccggtggttcttcaccgtacagccggtgtcgccaccgtcggtagtcggtggctgctacttccagccgcgggggccggtgctgaaccgctacattccctgcgtccttcgcaagaagtgggacgactggaagagcgactggttctacacccctctcgccgacgaagcgcgcctccgacttccgagccagcccccggcgcaggcctccagctggcgggcgccggtagatctgggagacggctacgacgccgttcttgaccgcctggctggtttgcgatcccaggggctcacgggggccatggtgtacggcgattaccttcgtcgccggatcgcgccgctccagcggtgcgcccggggcgcctgggagttttcactcacccgtttttcgtcttctggtttttcttctgcctcagcgagatcccgtcgcgcccttcccgccattccaagtccggccggtctgaggccgaggagacggcgaccgcggaggcccggaggcggggagctgaccggcgagaagccgcagaccgcctccgggaagccgaagaagctgcccaggaggccgtccgggctcgccaggctgaggaagccgcttgggaggaggccagactccgccgggccgaggagtccgtccgggagacggaggcggcgcgcgtacgcagggcggcctgccaagtccccgacccgactccgcccgaggcaacgacgacttccgaggccgcccacgacgaggccgcgggcgcgccactcgggcccgacccctcgggcgatgcttggggcgagccagcctcggggaacgcccccgagtccggcacgtccatcggcggaccgagccgcgcggcgcccacaccgaggcggctctcccctctaccttccgctgccccactgagcgcagaacccctcttgcaggccttggccgctgcgaacaccacggtgttggacgggttaagagcccagatggaggtcctgcaggcagagcgggcggaggtcgatgcggcgtgggcgcgcgtcgaagaggggcggcgctcggtggaagccatggtggaggcgggccgcaaggcacaccgccggcacgcctcagagctcgaggcccgtcgtagggacctggcggagatcgccagggaagtggaggacgagcgggagactgccctcatcgccaccgccgtgttcaacgcggtgcgggacgacctctgcctcctatacgggagccaggcggcggagctagagaagaagctcgacgcgtcccggcagcgcgaagaggcccttgaggctcgcgccacggtgctggaggagcgcgcccgcgccctggacacgaaggagagggaactggcgggtcgcgaggccgccgtcgccatccgggaggcaacgctggcggcgcacgaggccgcctgcgccgaagaggagtccgcactccgcctccgcgaggacgagctcactgagcaggagcgagctctcgaggaggccgaggctgcggcgcagcggcgggaggagctggcgcgcctcaatctggaaggcgcccgcgccgagagggccgcactggatcagcgggccgctgaattcgaggcgcgagcgaaggagctggacgcgagagcgtgcagcggtggggcggccgcgggcgacggcgacctagccgcccgcctcgcagccgccgaacacaccatcaccgagctgcagggcgcgctggactcgtccgccggggaggtcgaagccctccgcttggcgggcgaggtagggcctggcatgcttcgggacgccgtctcccgtctagaccgtgccgggcggcaggtgggcctctggggcgggcggaccatgaaatacgccgccaaccaggggggcctcgcccagcgcctctcagagatggccgggaccctccagcggctccccgaggagctcgaggaggcgatcaagtcatcctcgagggacctcgcccggggggcggtggagctcgcactggcaagctaccaggccaggaaccctgacttctccccgtgggcagcgctggaagagttccctcccggaaccgaggatggcgcacgtgcgagggtccgggacgccgccgaccacatcgtccacagcttcgagggtacagcccctcgactcgcgttcgcgctcgactccgacgaggagggcggtgacgacggcgcggacgacagcgacgacgaggccgacggcccgggggcgtcggagtgagcccccaggcccccgccaatcttaataacttttccttcttcttccgaggccttcgggcccccttcttgtatagactgatttaatctgtaatcaagtaaagaggaaatttctgcgtcagttaagtttgttgtgtgtatgagacgaggatggtccgtgccgcggtccttctgtgtcttggcttgaacgagggctcgtgcccaggtcccaacctcaagtggcgcgggtcggggctagtgcctggggagatccgcgtgtcgagactggccaggccgggagcgtggtgaccgagggttatggatgacccgattgtgggcctttgccgattccccccccccccggagttcaccacgccccggggcacggctcggttctgggccccgtttggcgattttagccggcccgggccaccgagggcagggtcgggcacgagcgtgctaattcaagccaagattcttcaaaaggaaacgatagcatagacacaatcctcaggaaatcgaaaatgcttttactgaaatacggaagagaaaaaagataaggatatgcatgtggtagcccccggccaaccctgcacgcccgggggggcgcggggttggcccgagcccgagacctgacaaccgacccccactaggggtagaagcgacgaaggtgttcgatgttccacggattaggcagctctgtgccgtcgcccgtggccagccgaacggagcccggccgggggacgccgatcactcgatacggaccctcccacattggtgagagcttgctcagtccagcacgcgtttggacgcggcgtaggacgaggtcgtcgacgcagagtgatcgggcccggacgtgacgctgatggtagcgccgcaggctctgctggtagcgcgcggctcgaagggccgcgcgccgccttcgttcttccaagtagtcgaggtcatctctgcgaagctgatcttgatcagcctcgcagtacatggtggcccgaggggacctcagggtgagctcggatgggagaaccgcctccgcgccgtagacgaggaagaaaggcgtttccccggttgctcggcttggcgtggttcggttcgcccaaagcaccgctggcaactcctcgatccacgagtcgccgtgcttcttgaggatgttgaaggttttggttttgaggcccttgaggatttccgcgttggcgcgctccacttggccattgcttctggggtgggcgggggaggtgaagcagagcttgatgcccatgtcttcgcagtagtcaccgaagagctcactagtgaactgggtgccgttatccgtaatgatacggttaggcaccccaaaccgagcagtgatgcccctgatgaatttaagcgcggagtgcttatcgatcttgatgaccggataagcctcgggccacttagtgaacttgtcgacagcgacatacagatactcgaacccgcccggggcccgcctgaacggacccaggatatcgagcccccagacagcaaacggccacgaaagaggtatggtctgcagggcctgggccggctgatgggtttgcttggcgtggaactggcacgccctgcaccgccggaccaggtcaaccgcatcgttgagagccgtcggccaatagaaaccctggcgaaaggccttgccaaccaaggtgcgtgaggcggagtgggctccgcactcgccttcatggatatcggcaagaagctcgacaccttgttcccgaggaatgcacttcaggaggactccgttagccgcgcgccgatagaaggtcccttccaccagcacgtagcgcttagagatgcgctggacgcgttcactcccttcgcggtgctcgggtagagtcttatctgcgaggtacgcctggatttcagtgatccaagcaatcaatctaggggaactgggagcgctcccctcgggtcccgaggcctggactccgacgggcctcgggggccgttcaggcgcgtccgtctcccctagggggtcgggtcgcgccgacgactgggcaagcctttcttcaaaggcgcccggtggggtctgggctcgcgaggaagcgagccttgagagttcgtcggcgtccgcgttatcccgtctgggcacgtgccgaagctctatcccgtcgaaatggcgctccatacgccgcacctggcgcacgtaagcgtccatctgcgggtcagagcaccggtactccttacagacctggttaacgaccaactgggagtcgcctaacaccaggaggcggcggatccccagtccagctgccactctgagtcccgcaaggagtccctcgtactccgccatattgttggtcgcccgaaagtcgaggcggaccaggtatctgaggacgtctccgcttggcgaggtcaacgtgacccccgcaccggcgccctaaagagatagggagccgtcgaactacatcacccagtaggcggtgtgaggcagctgcgaggggcccgagctggcctcggggacggagatgggctcaggggctggggtccactccgccacaaagtcggcgagggcctggctcttgatcgcgtggcgtggttcaaagcgcaaatcgaattcagagagttcgattgcccatttcaccacccgtccagtaccctctcggttatgcaagatttggccgagggggtaagacgtgaccaccgtgacccgatgcgcctggaaataatggcgcaacttcctcgaagccatcagaatagcgtaaagcatcttctgggcctgagggtatcgggtcttggtgtcccggagggcctcactaacgaagtagacgggccgctgcacctttcggcggggccgatcctcttcgccaggggccgcatctccagggcgttcttcgtccgagaggccacgcggggcgcactcggcttctgtgccgacgacctcggggtcagagggcgacaggcgcggccttcccgcagtggccccggggccatcctgggggtcgggggcgcctggcaccgtcggacaagcaggcggagggccagctccggccgtcgggggcctcgggccgccattcggctcgggggcctctcctgcctgctctctcccgggtcgagtcgacgcagggtggggatgcacggagtgagggttgtcctcgttgcgctccacgaccaacgccgcgctgaccccatgcggggttgccgccaggtagagtagcaacggctcatctggctccggggcgaccaggactgggggagaactgaggtacgccttcaactgagtgagggcccgctcagcctcctccgtccaggtaaacggcccggagcgtttgaggagcttaaataggggcagtgccttctctcccagcctcgatatgaaccgacttagggcggccatgcagccggtgacgcattgcacatccctaagcttgctgggggggcgcatccgctctatagctcgtatcttctcggggttggcctcgatgcctcgggcagagaccaagaacccgagaagcttgcccgcaggcacgccgaacacgcacttatcggggttcagctttatgcgggcggagcggagactttcgaaagtttccgctagatccgagagtaaggtctcttggttgcgcgtcttcacaaccaagtcatcaacataggcctcaacattgcgtcctatctggctacccaaagaaattcgagtagtacgttgaaaagtaggacccgcattctttaacccgaaaggcattgtcgtataacaataagttcctatgggggtaatgaaagcagttttttcctcatcctccctagccatgcgaatctgatgataaccagagtatgcatctagaaaacacaaaaggtcgcaccccgcggtggagtcgacaatctgatctatgcgtggcagggggtaagggtccttaggacatgccttgttaaggtcggtgtagtcgatgcacatccgaagcttgccgttcgctttgggaacgacgaccgggttcgccagccactcgggatggataacctctcggatgaatccggcctccagaagtcgcgccacctcctcgcggatgaagtcttgacgttccggggcctgccgccgcactttctgccggaccggccttgcgctcggccgcacggcgagacggtgctcaatcacctccctggggaccccgggcatgtccgccggtctccaggcgaagacgtcggcgtttgcccgcaggaaggagacaagcgcgtcttcctatttgccgtccagaagaccactgattcgtgtggtcttggacgggccgtcgcccagggcaacctccttgaccgggacctcgtcgcacgtgatcatccgctgcctcggggcggctgggacggaggtgctgagcctctcgttgccaccctcgggcttggacgcggcggcgaggtggtccgcgcgctgctccatacaagcaagcgcgactttgaggttgccatggacagagatggggccaccggggcccggcatcttcatctggaggtaggcgtagtggaccgccgccatgaacttcaccaacgcgggcctccccaggaccgcgttgtagggcagactgaggtccgccacatcgaagttcacccgctccgtgcggaagttggcggatccaccgaaggtgaccgggaggtcgatatgacctagcggccaagtgtgccccggcgtcacaccgataatcggctgggacggccgaagcaccatccccggggccttgatggcgtcaaaggctgcgggggaaaggatgttgagagctgcacccccgtctatgaggacacgccccaacttcacgttgcaaacggtgggggaaaccaccatcgcgatctgtcctccccgggcaacgcacggcgggtggtcggtctggtcgaaggtgagggcaacctccgaccaccgcgtctgccgcgtcgcctcatgggtaggggccgcggccagaagctctcgcttcatggccttgaggctccgacgagaagcgtgagcgcacgctcccccatcgacggtggcgatggtggcccccaggctcctggaaccctagatcatcgtcgccatcgtcgatgtcctcggcgggggccttctgcttggcctcacttcgccggttgccggagggagccgccggggccttgccctcacggcgttcctgcctcctctcctcctcccacttcctcgtccgcttagccaaacttttgaccgcgcggcagtccgcgaggtcgtggagggaggtgttgtgcacggcgcaccacttgccggtcgggcgctccctgctgggagcgccggcctccttctttttgtcgctcgcaggcctcccctttcgggtggcccgcgaagcgccctcgacggcgaggacgtgaccctcgtcgtcggaatgggccgacctctttttcctcctcctgtcccgccgccctaaccgagcggcggatccgggggcggccgaagctgccacaccggaaccggtggagttccaggtccaggcctcctccttgcgagccacacggtccgcgagctgaaaaagctctgcggtggtctggggctccttggaggcgatcttttcgagcatgcggttgtgccgcacgccccccctgaacgcgtagattaccgcgtgtgcggggatgcatggtatggtgttgcggacttgacagaaccgctgaatgtacgagcgaagagactcatcgtcccttcgctgtaccgcatgcaagtccgcttcttcacctgggcgcgcatatgtgccttggaagttcatggtgaactgctggcacaaatcctcccaagagtggaccgacgcgggcggcaagttcattagccaaccccgcgcctgtcccttcagggccatggggaagaaattcgccacgaccctgtcgtcacccccggtggcctcgatcccggtcgtgtagacctggagaaactcggcggggttgacgcttccgtcatatttttcggtgatggtgggccggaaccttgggggccaacggacgttccgaatgctcgccacaaaggctcgacagccgacaccaccaagcgggggcacggggggctggcccccgcgcccgaaccgaagtggcgctccggacgaggaagcgccttccgttgcgtgggcagcacgacgaccattgcgccggcgctcgatactgaggcgggcatccggccccctacgcacatcttcttgggtcggaggcgttgacgagggaatggcgcccctcgacgacacggagccggcggtagcagcgccagaggccttggcggcggaggaccgcccaccggcgcctaggcgctgctgcgccgtcatgaccaagtcggccacgtcatccagccaacgtcgggctggagtctctggatcggggacgacgggcgggtgacgcaagagcgcgcccgcagcttggagcgtgccctggggcgtgctgccatcgccgtagacgaggaggcgacgctccccgtctcgccgtccttcttcatcgctcgtgggcggcgaagtcgcggatctttcgaccccctcgagcgcctcctcccgcctaagacttcggcgagaggggggcggtggagtacgagctcgacggcgcgggttctgctccccgtcgtcaccgctagcgctcggagagaggttgtgcgccactgcccgttcggccattgggctgagcgggagaagcttggcgcacacgaaagaggacgagggcttagaaaaacacacgcgccccctacctggcgcgccagatgacggagcgtggggctcctcaccgggagaccgcgcgggcccccctttgccggttcggccgggggcgctaggtgaggttctaagcactcgatctatggaatgtttcgtgagagagcaaatgcgcaagacacgggcgatgtagacaggttcgggccgctgagaagcgtaataccctactcctgtgttctggtggatctgtgtatgaaggagttacaaagagctggagagcaagagagttcaaactctagaaaccctcttcctctttctctcctctacgagctcaggtcttctcccccctctttccccagctcccccgttcttaagtgggcaaggtcctccttttatatctcaaggggatcccacctgcaccacttctacctactcttcttttgggtggggactcaccctatcttcccaaaaaagaaaaaactagcttgcgccttcgcctggaagctaaatcacagcttgtctttgagtgaggcccagcgtcatcactcgcctgacaccggggatctccctgttactccctcattaatgggcggagatttgccatggctgttgtccgaatgaccctctgatgggatgggccatacctacctccactccgccggaagcaggcgcaacgtgggagcacggttgtctgccgatgacgtgaccggcgtcagaccagtcacaaaccggtcattcttgtctaccacgcgtcagtttagcatgccacacgtcagcccttcttcataaaatgacttccttgtaatggttgcgatgaagcctggtatgaatctagccgggactgacgtgctaactccaggagtcagcacgccggctccggctagggacgagtgcatagaggctctcatcattccgacgggacggggcgaggcgtgcgaaaggccgcctgttgccacctaacccgcgatctgaccggtctatgaccggtcacacactgtgacctgtcacggaccgaacgagtgtgctgcgctgcattaaatgcggcgtggggcgctcgtccaacccgcaataaacgcggttaggtgagcgccgctgtgctcacctaacccacacacgtggcgccaaacccacagggggtcggggcgccccagccctcggggccgaaacgggagcggcctgacccctcggggagacaaagggaggggcggccacatcaccctcgggcccgacccccccgagggggtcaggccacgtgggtgactgcagctgccccaaacctctagtcaagatacccccggtcccatgtcaccgacagccgggatttctctcgactccagaagtacggactctatgatatggaaggcggcacctaatggtgacttctcggtgcggtctgcctactctattctttcggccggtagaacatcctgcccgctcggcaagattatctggaaatcccacgcaccagcaagatgcaagttcttcatgttccttgcggtccgcaatgcctatttaacagctgataacctgcagcgccgaggctggaagcttgcaccaatttgtcacctttgttctaaggatggagagtcctgccaacacatcttccaagcctgcaccttctcgcagcaagtttgggtgcaggttcaggctcgtttgaccctctactgctcgccgccgtcctcggactttgccggctggtggctcgctgcccggcaaactgttgcgaagatcgatcgcaagacgtttgacgccggggtcatcctcgttacatggttgatttggaaagagcgcaacgcacgggttttcgagggaacggcctcgtcggtcacgcagttgtgtgcgaccatgtgtgatgaatgggaaacttggaaatcagcagggctagttacctcgttgaatgttgctgcagtgccagctttagaaagattacagattttgtaatttgctttttgttgtaaaggcggtgctctgacgtactgcatttgtacagtttttccccttttccttaatatacatcggtcagcattcttcgccgtcccggcgaaaaaaaagattgaagattaattgtcccagaaacaattgaacacagctttattaatcattccttccaaatgcatcaatctgtttttgacttattaaaatcattatacaaatatatatatatatatatatatatatatatatatttatttatttattttgcttgcattgctgatgtataatttcaccacatagctagtaattaagtaatgggagcttaattgcagggagtagggagcggcggtccgcagaggcacttgttgtggaagaaggagtactgatcgaacctcgcggcgccggcgggcagctcgccgcagaggcggttgtagctgacgttgaagtcctgcaggctgctcagcccggccacctgcgccggcacgccgccgtacagcatgttgtggctgaggtccagcgagctcaccccttcctgcagccgcagcccggtcatgtcgaagctcagcgcgttgcgcgacaggtccatcacctcgaacgccacgccgccgtactcggccgggatgccgccggtgaggttgttccgcgacagcctcaggtaggcgccgccctgctgcgtggtgttgagcttgctgaagagcgccggcggcagggggccggtgaggcggttgcggctgatgtcgatgccgctgaggaaggggagggcggcgagcgacggcgggatggcgccggtgagggagttgaaggagagatcgaggagggtgaggctcttgagcccgccgaggaaggaggggacggggccggagacggcggtccaggagatgatgaggagggagaggcggttgagcttggcgatcgccggcgggatggggccggagatctgggggaggtggtgccacgtgagggtgcggaggtgggtgaggccggcgacggcgtcggggatggtgccggtgaggttggcgtcctggaagacggagaggccgacgacgcggtcggtggtgtcgtcgcaggtgacgtcgtaccattcgcagcagaggttgtcgggcgtccaggaggcgaagtggtaggggtcgccgagggccttcttgatggccagcagtgcggccttgtcgccggcgttgcactccttcttcttcgtggtggcagcggcggcgccggccgcggcgagcacaagaacgacgaccatggcgcgcatcttgttcttgtaggatatcgtattaattaggtagtagcctccactccaatttagttgggcatttcagtgagtgagctagatgatgagatgtgttatatagagagaaagggggagagggagattaatttgatggttggtattaatcaactgttgttgttgacttgttgtatgaaattatttggaaaattaatcgcaaggaagaagaatcaagttgaaaaaaaaatccaacgcatgcaatagcgagtcaacaaaaaacattgaccaccgtacccatgcaagcgtgcatgcggatgagaagggtacagctctgctcatttaatgcacatgcatgtgagtgtgaggcgccgcagacgcagtttcttgaagccgccagggagccagccaagccaaagtaggagtaggagataaaatacaaatactgtagcaagcacgggaaagccagggagaatgaaatggtcaaagttggcagtgccaaattgccaaacttgtccaaatggagagtcaacccaggcctaccacgcctgtgcagggacagagcaccttattgatctaggacaaataatattcttctgcttgcttattgatcttcttgtcccacaaatatccagttttctattcttatcttgtgcatctactcgctccatccacaaaattaagctttatcatcttcgtttctcttctatgcttaagtagagaccatgcctccaattgtcagttgcaaatgtcccgtattagagcttggctatgccaaaagtttagccgagcgtcgaagcatagaaaacagtcttaatgaaaggcatgatcatcctttgacatctgaactaatctgtcagatattagctagcttcaaaaaatataatcttttaagatagtcagagtataagacttctataaatgctcatatttctagacaaagggagtatctatggtggagatgatgcgtatggtacaaatgacagaatgatcattttcccattatctaaaatttatactatcccgtttcatattacaagacactttgattttttttccccttagtttgttaactttacataagcacacgcatgtttagtgcgattcaggcattggggggggcctagttggggcgtgcgcgccccccacgcgcgtttcgggactaaagataggaggtatagttaactaatcaattaattagttttagataattatagcttaagataatgacagtagtagttaggattttctttttttcacaagattttttaactaacaaattgaaaagaaatctatttctgaagtcaaattttcaaaattttaaatccagatttgaaaattttaactcgaaatttgaatttttttttaagtcaaattttaaaaacttttaacttttcatctcacatttgaaaaactttcaactcgagattcgaaaattttcaagtccagatttgaaaattttgaaaactttcaactcgagatttgaaaactttgagctcagatttaaaaactttcaagtccagatttgaaaattttgaaaactttcaactcgagatttgaaaactttgagctcagatttaaaaactttcaagtccagatttgaaaatttttagctcgagatttgaaaactttcaagtccaaatttgaaaatttttaagttaagatttaaaaattactagtaaactaatcagtagtaaaaataggagactaatcattactccctccgtcccacaatataaggggttttgagtttttgcttgcaacatttgaccactcgtattattcaaattttttttgcaaatataaaaaatgaaaagttgtgcttaaaatactgtggataataaagtaagtcacaaataaaataaataataatttttaaaaaaattgaataagacgagtggtcaaacgttgcaagaaaaaacttaaaatctcttatattctaggacggagggagtagtaaactaattacgattttttctcccgtgtggcagaaaaaagaaaaaaaaaaggaaaaaagaagagacggcggtgcgccaaaagaaaaagaaaaaagagagagaggcgtgcgcgcgtgcgtgcatgggccgtgtgggccggagtatgcgccggcaacgcgcgcgcggggattagcttttccgggcatcgggtaccctaggccattgtccgaagcctggcatcccatggccttgtgggctgcttttttctaccatggattgacgactatcaaggcccaacccgtaatgggctggcccaggttatggcccaatcctagctcatataattagaaatagatttgctagaaaactttcagataagatctcagtactatgtaaccaaaccattgttgaattcaagttttattaataagttatatcgtaattacattgtagttagtacaatgtaattacacttcaattatactacagatacatctgaaagtttttgaaaaaaaaaaacttgcgacagttttttaagatactcccgttagaaaacttcgtatttgctggtacaatcagttttattgtgtgttgtaaattaagttgaatgaaacacatttatagtagcaatatccactccaatgttcatctttcaagtacatctggaactataatataaaagttggctgattgattgatcatattgcaagacgacatgaacattgttctcttcacttacactcgttctccgtacattaccagttttccagtcgtagctagcacagtacaatactcttaattactagtaggatttaacaaggagttcagataattaattttaagtagcgattagatgtagtttagttgaaagtttttatataaatgtttttgtagtattatttatcgacgacggcaggcggtggcgaggggagcgccgcagaggcatttgttgtgttggtagcagtaggcgtcgaacctgggcatggcgggcaccgcgccgcacatcttgttgtagctgacgttgaacgtctgcaggttggtgaggttggccacctgcgccgggatccccccgcggatggcgttgtggctcacgtccacgtagtacgtctcctccgcgaactccacgccggacatgttgaagacgaagccgtttcgcgacaggtccacgtaccttgcccgccggaacaccgccgacgcgtcgccggtcagcgcgttccgcgacaggtccaccagcgccaggttcgccgccgccagcaggtccgccgggacgctcccggacaggttgttgtgcgacagccggaggtacacctcgtcgtcgtcgtcctgcagctgcaggttggagaagaggcccggcgggatggggccggagaggcggttgcggctgaggttgatggcggagagattggtgagggcggcgagggagggcgggatgaggccggtgagggagttgaaggagagatcgagcatggtgagggaggtgaggttggcgaggaaggaggggacggggccggagacggcggtccaggagatggtgaggtgggtgaggtcggtgagggcggcgagggagtcggggatggggccggagaggctggggaggtggtggaggaggagggtgcggaggtgggtgaggttggcgatggcgtcggggatggcgccggtgaggttggtgtcctggaagacggagagggagacgacgcggccagagtcctggtcgcagtccacgtcgtaccagtcgcagcaggaggtgttgcgcgtccacgacgccaaattgtaggggttcccgagggcgtcgtcgatggccagaagcgccgcctcgtcgtcctcatggcattgcaccttctgctgctgctcatcgtcgtccttggccatggaggcagcagacaggaggaggacggacagcagcagcagcagcaggagcttcacatccatggtcatcatcatcatcatatatattggtcgtttaattttaccagcttgagctagctgcttaatcaattgccgactgatcgagtatgtatgtatgtatgtatgtttgtgcaattggagtgaggtcgcaagagatattgagatgcatatggtgcatgcaatgccgtgtatatatagcctcgcctgggccctgctctctctctcgactgaaaagagatcttctttttcaggtgttaaaaggttattaagttgggagcacctgcactactgagacagagataaagaagctaattaagatagataattttggattaaaatattgggaaaaagcgcaggcaagtgcgcgacaaagatacatggaggcaggccaggccatgcaacgccaatgcagtagcgacattcacttactaattgctcagatatttcacccagtagtagcatttgcattgcggacctaacctcatgtgatctgaatctgactgacatggatatgcatttactagtatttcgccggcctttccatcgatggatgcttacttgcgtggacagatagttgcagacggccaattgcaacaccagtattcacgcatgcttcacggattaacagcccttctagtgagggaggaggcactgaattctcatcactcagcacaggagtcaggaatcgtaatggccaaccaactggattgttattgcctgcagcacattaattgttccaacaggggcaaatgctctccatctttctttcttctattagacacaaaaggccttatgttttgtctacagtgtaaattaaatcctagcgatacctaaaattatgtagcccatcttatcctatcaaaacaaaacaacaatcctatggacaaaaaaacatcatggtttctggtcgaccaccggaagctacggtatcaccttccaggaccactgctctctctgcctccctccaatcgccatgatcaacgataatgcttcatttcagatggtttcagaccgtatcgctgctgaatgctccttcaaatgcaaaggggaggcttcaccaccaaattatatatgctctcctttcatgacgcatagcactgaaacagaggcacgcacatccatggtttccttgtcttgtaactttgttatctactaacgagccagctttgtttaaatataccacctttcctgaagttgcgtccatgtggagatgcagaatcaccttgatttcggtagcactgaaaaacacaatgttaaaatgtttagacgactttatgcgcatggtttttttaaaaacaaaagcagctgctagaaaaaaaataatagcacaagcagttccagctcatttctcaaagggttaggcaatccaagtaaaccatagatgtccaatatccaagttgctaagcacagctaatttgataatgctgcttttgtacgagagaattcacctgcaatgcattatcggataataatccagagtatgcatctaacaaccaatcacgttttcattcaaagaagtaaatagcaaaccaaacagcaaaattgttttgagttgacataccctgtagcatacaactgagtcatctgggtacatgacaaacagcttggtgccaaggcgagctcgacatgaatcacatatgctctcgtcagttagctgcacatgccttgacctctcctctaatctggtcaaccgtgcatcaaggttcgttgcgcgtgataaattatgaactacctatcaataggcatagagcgaaagagaaaatggtaagtcaaacttcacataaaagataagaccaacctgggagcaagtttgagttcaagagaaatattaacagtgcagaggcagaatagttcctcaaacagtcacatttcaatagaagacattggctgaaaaacaggaaatgattatgtttacctgcccttgacgatgatggtgcacccgggctctcagcattcgcaaaattgtatctgatgctagctgaagaggcatatcagcagataatctctggcaaaaataattatagctcaggcttcagaattcttgttctaataaaagtagcacaaaataggatgatcataccaatagcagcgataatataaacataaaagaacacggtgggatgcccctacaccagttttctattatccatgtattctttatttctttcaaagaccaatacacagagattaacaaacaggacatctcatttaccttttgttatatatcaactcctaaagagaaggatcacagcagacctctatagaccaggatgattaaggaatatcaggaacccaaaaaggtaataaatactaaatacaacattcaggcaatgaccatttgatggttcggaatcctgttctgaaggaacaagtgcacactcattttttctgggacaacacaaattgcttttctagactcactccccatgatcataaattaccaagggctagaaacactagcccccatgttaactagcatgcacatcacaaataacaaattaatatcatcaaatagattctgatcatacttctgtaagaaagtggtacctccaacacttgtattggatccaatgattccccatggttatggagaagtcgaacggctgctgtaaacatgggtcctttcccatttttggggtccagatacaaatccaacagcctgagttcacaggaagatgtagagaatatgaactaaggaccaaggtcatgatgcatgaaattatgctagtaatactaataagtcaacatagaaaagctaaaatcaaatcaaaacatagagaatgtaccaagaatactaacaagccaccatgtaataaatactgaagtgaggtaataacatactgaatataggcatcatctcgaccaatctctgcacagtactgctcagcagcttcactatcctccagtttccttcatcataaatgaagaagaaccaacaagaaagttagggaacagaacttgtaggggtgtacaagtccagttaaacaaaacattactgctgaaatttacaagtaacaacaaaccaataaaaaataaatgcagcacaggatcttacagcgctaatatctgaagtacaatgttctcttggcccatcttcctatacaaaatagcctgccagaaggaaagagatttttatgtcaaatatgtcagatataagcgatgaggactatcaagcaagcataaatttcaatgggtaggacacaaaatgagctggcatggaacgcgagaaggaagaaataaattgtataatcaccttttccagccatagctcagattctgaaatcacatatagcacttcttctgggtcatacaaatctgacgattgcaaaaaaaattgcaacctttccctcaatagataaatgaactgcatatcagaatcaaattctttattgtttctctcttcattgttggatcccaaacggactgcgtccatggcagatctggagagggacaatgcatatgacgtgtgatagtgaggctcatcacattcctgttcctcaatcaaccattgcaaatatctgcaaaacttagcatattcagatttcataaaagctgaggaatttattcagcaagagtacaaaaggcatagaacacatagagctttcaaagaaacatgcaaatggtaactatatttgattaagaactacctaatataatacgcatatgatacagtagcttcaagtcataatatgttatttcattgagcctcattatgtttccttcgtatatatttagaatacgcttaggtcctgtttgatttataccccaattcaaccatgccaaataattggcaacaccaagaaatttgtcacccatttggtttgcaacctaaagaactgccattgccaaattatttggcatcactcttatgcccatacaaattagaacccactcattcttgccaaaatttttggcaatagacaaatcttgtcattgcccaaaaaaattggtaacactaggaatggaattgatccaaacaggccccccttggttacaactattattgtcagcatttactcgaataatctggcatggaaagacaagatcatcaatcaatcgtatcaatgttcaggtcactctacagtggtgatggatcccaagataccaagtaattagtaagaagcctgacaaactgctattagttcattgtttatgatcatgcaattgtataatgaacaaacttgcacaacgtatacccataattcactctgttactatttaacatttttttaacaaggatcattggaggatcatcatggaatcttgagttctaacttgtaatgattttgtcgattcattatatgtacctttggtgaatgccaaccttctctggatcaatggcagcaacaaccttttctgtagaataacaatcatccagaataaatgttaacgcatgttagttacacccaaaaaagtttcctagcagccctaagtagcaaacacaattttctggatgcaatataggctgatatagtgaaaatattgttagttctaaaataggagaaagagagcccatcgatccatgattacatatgcctactaccatccacactatgttatatacacattcataagtcaaaaggagaaaaaaaactggaaattgtgttgatctgccatggataagccataaaaggcacactggtatagtggtttatctaaaacaaagcaattaccaggagaaagctgtttttccctcatttcagatgttaaaattgcagttgcaagctcttgatcaatgtctgccacctaaacgcaaatagtcagtagaagtacacaaagtggaacagatcattgatcatgaagtccttagtgtgaagtaaatacccatccaagatgctccagaacaaggtcctgatcagatgatgcttgaagtatcttggaggcttcaacggcagcaatttcctcaccagacattttaccaacagaagtttcaagagagtcagtttcaggtaggattgcatgatccttccacaaaccagtgctgtaattccttgctaagatacgccagataccaagggatttggagcacattcctttactgccatataagaatgcaagcgtccgcagatgtccagagtcatccaaaagtgattctagttcctcctgcaccaccatagtatttttattgtatcttttttttaatttgaacacataagaatatcactgaactatatgtagttatgtactgttctcaaatgaagagttaatgtcgatttaagtatcgtaggtgtgtaacagtcttaaacgcttcaaggttgcagatgtttaaaggatttacataccacaacacagctattctgagatgatgcaagcttctccatgtcatcaacaagattgagagctctataaagatacatcagaagagtatcaaccccttccatctctgaagaagataaatccttctctcgggatgcacacaggtacctagtttcatatagcattcagacatcagctggatggagcagcttatttgcaattcgtaatgaataaaaaatgtcgtgaatgagcaaacctgataatatttctgattgctacttccagcagatcagctctgcttggtggatttgaaaggaaatcatcatccacaactgtgtccacacctgcctttttgagaaacaatgcctgttgaagtgttactagcccatcatcaataacttcttcaagaggctttgggggagcatgcaagccccaataacgctttcttggcacctaaaatttacaaagttcacaatcagataaaaaactgctgaatacaaaaggcagccagtcatagtggaagatgagcagtttgtcttgagaacttaatcagtatgttaggtgatgaaaactacagattccatttgacaattacaaaaatatgttgacaaattaatctagcagatcaaaacttaacagatgtgcctaccaatataagctttacgctcaaatttgaaggaaccagctcatgttgatactcaagaggaacgggttcatatatcaagaaattaataaagtcttatccattgaaaaccacattaaagagataaaagaagttgcagcattcaacatgaacttttcacatacagaagaaaaggttaagagagtatcatgagaaaggttgtgcagttagtcagctcctcgagcacattacaggataaaacataaaacaaggaatgtgttaaaacagttgtcttatttatacccagtggccagtggattttacaaggcgtattttgatttcaaagagtctacagtgttaaaccttgagcatggattttttttgtcataaaatatattctaaatagaaccaaaattgtgtgaaaacattttgaactggtatttgtaacttgtctagtttttggtcaaaatctacaacgtttgactttttaaatcaaaatatgccttatagaaatcaacgaggagatacagcattacaattaacatgtggtaatgaggcataccagatctgaccaacgattagggtcccgcatgatgaatggaaatatttctgctggttgcatagtttccgagagcaagaaatgatttacagcatcctcgaaacgcaagtcgaaaaacaacaagaatccaagttgtgcatgcacaaaggaaatcatgtcatttgagatttccccatcggcctcgaactcttgtaacaaagaaatagcttctgcataactctttcttcgtagtagtgccttgatctgttccaccgctgatactttacggtagcaaaatacctggccaagccaataaatgtgtccataagtacagtgtgtgatacaaaatcgacatgataaaatggcgctgcacatttatgagagaatccattgtcagggtttcacttgagcatacaaaatcattgtcttgtcattggaaattgtaattattgagtattactaacaaacacagaacgcagctcagtagctaagcaatccggtagagcagattggaaattttgagtcaagttgcaccgatggatgagttgacatacctacgttaccttataagccgtagcaatcacaactacgtcgctgccaattccggcatcctcgctcgctacaattagtccacctgtaccaggccttgcaaaaggaatagcctgcaaatgtgcgccgttctttcttctgtagacatctaccttggagtccccggcaacaacaacataggggtacacctccgctatacaatccggcgtggtgttaaagacgaagctgcttccaacgggatgccccgatcggtccacgacgaccccgacattgtcgacgagcagcatgacctcgtcgcccccggacaggggcttcaccctgggtggcctggaggactcagggagcgtgaatatatcgccaccttgggcgttcgtggtggagaagagcgagtagcccgaggcagtgccgacgaagacggagtccccgacccaagcgagcgccttgacgccatcgacgagggcgatgtcacgcgtccgcacctccaactcgtcggcgtcgtgtagggtgaggtcaacgaggagcagcttcttcccgacggagaccgcgagggagcaggaggggcgatcatcgtcggattcggaggcgcgggcggcgacggcggcaacgttgcggacggagccgaggcggcggacggggcgggagaggagggggtccgcgaggaggaggaggccgtcggcgaggaggaggaggcgggcgacggcggggagggggaggatggcggagacggggcgggtggggccgatggggaggaggcggaggaagtcgggggagggggaatcgagggtgaagaggaggagcttgccgccgccggtgccgaggtagaggtatggggaggagatggcggcggagcggacggtgagcggggaggaggctgggaggccggcgagggcggcggggtcgagggtggcgaagggctcgagggcggcgcgggagggtggagtgttggatcccatgggtgagctagggttgggagcagggggacgccatagatagctggggaagactagagtgatcgatctcttcgagtcgaaggaagaagacgaccaaacaactactagtctcttctctcttgtaacagtgttaactccgattagattagaccaacaagtctaacaacttagttagttggtgactttgttgttggcgagagatatacaactctttatcccgaaattcattcaaatcttcacaattttcactctaaacttctccatttagcatactatctccgtctcaaaataaataaatctattatccgtagtaataaaaaaaatacctgtgcgttgcaacgggtaaaaacattttttatcatgtacattaagctcccttgattttggaccgaatgcttccttgtttttggaccgaacgttcattccttccttccttttcagctgctaccttcactgctcggcatatctctcttcggctcagcccacaagtgaagctgtaggctcagctcaaacagtctcgtgtctggcctacctcttttcagctcaacccacaagtattgttgtaggccctgctcgaacagtctcatgtccgtaccatgacgaagtcgatcctctccatcaaatgcggtcgaatctttctcaatctccaaaattgttgagatattttgatccactcgatcctcttttttgattttttttatcaaaatcgaagtgatcctctttttcgattttttatcaaaatcgaagcaatccataaaactcaggataaaaaatgacgaactgaaaagaaaattctgaactgaaaagaaaattcaaaagaaagtagtggagaatcgatttttgcaattaattggatgaggcaaatcgacgtggcggcggcgctaggcatacatagctgggcaagagtgatcgacacaaatcaaaggaagaagaagaccttctcttctctctctgtaacagtgttaactcccatcaaaggaagagttcaccagcaagtctttgctgttggtgatagacgccactacaactccttaacccgaaatccattcaaatctccaccatttacactctaaacttctccatttagcatattcccttcgtctcttaataaacaaatctaatactatatgagtaatatttgattattttagtacactttggtctaaaatattcgatattcgtgataagattttcaaatttcaaccataaaaaatctctaaatattcagtttaaaggtatacttggcacgggtatttattatcagaaaaactgtaaaagtttaatcagattctgttccaaacattaaatatttttttaccaggatagtccatttacatttcctatcatcaatatagttacctacctatagaaaacttcaccaattaaaccatgtctaattttgagcttattcatcccgctagagatgaagaacaagaaccaataaaccaccgctaagcattatcatcaaaatagacatacccaaggaatgataaaatagaaaagatccataccataccggtatgcttgctactagtagtactttatacaagaagatggagtacattacatacatatagttataggtgccattgattgtacgctaggaaacataatctccattcatatatgctacaaaattattagtaacaaagagatgagatgaccgtaacataacaaatatgccagcattgctgcagctcaaggcgttgtcattcccattggggcagccatattccagtctctacccatcatccagccgctgctcttcatctcctctccagcttctttacagattcggtccagcatggcaaggaactccctcacactgccaaaaactctcgccatgtgcccttcgtcgccgctgctcaattcaccatggaagtactcagtcacctccttcacacaagacaggcagatgctctcttgcgcctggagcttcaggatctcctcctctgcctgcctcaggaacatgctcattgtgttgtggaaccgcctcgcgctgtccgctgaggtcaccatgctgtttagcctcaacacgtcgtggatctttccaagccctacgccgagctctgaaacatctctgctgagcttcatcatatcgatggatgaagctttcttggtattgctcagctcagccgcaagttttgacacaacctgaagaccatgttttctgtattccacatcatactgctgagtagtatttgcattcgttttgcacaccggactgtggccttcaggtttcacaatttcatggacaacaaattgcaggagagcagccttgccatcagctcctttcacatcaacgatcttcagcagagtgttgggttccatggcatgtgaattcggagatcctgtatcgatactcatcaagttgccaaagttcaaaacagcctcaaggaccttgtggaacaacctgctgtttttcagctcctggcaagctgcctgtatgaaaaacgataagaaaccctcagagatgagtaatactataaacaaggaaacagtaagtgagggtctattccgttcacagattcaaatcatttgtgtaaatattgatatgcataatacccaattgcatatgaaagttttgttttgcttctttcaacaaagggtgcaaaacaatttgtacaaaatattcaaccaagggctcaactatacctcaagagtagcatatgacattctgagctgattgacctccaaatagaagttggcaacatagagcatagcatccattctcttgaacgcaaatggaatatccagcactgcctttagaaaagcttccacagggcaaagtttggtggatagatcatctttgaaatatttcagtttaagctcttcctcattggtgaggaccatttgcatgagcattcgcaaggcttcaactcccaaaccatgtgcattacctatatccagcaaacacaaattaaaccatgtcaactcccaaacggcaggaattaacagtgcaaaccgtacccatattgtattaaggcatagcatgaaaagtgaacaaataatgttatcaggctcaataactgattagctatgatgtttgtaacaacttgaatgcagatctacgttgctgaatcaaaatacagaagcccaccacagggaaacacatagtcaccaaaaaaagtctataccaatatggcaatattggaaaaatgtggccagtactatattgataccagaggatgcaaaatactgaaaacaagtgtttttccccctttacacaaagaggaggcaactacaaagaagagatcagacgatcacaagggaacaaggaaatttcatgtgcacctatgtcaaaagggcgggttgtgaaataaactatttcagtcagctaatcaggccatgtgggacaatcacagggcaagaaacaatcactgaaccaaattgtgcaatataactggtgaaaaggcaaccaaagttgaaaggacagaggcaccatgcatcatctattcatcgttgatggtgggcataataatgcatcgcaaatatggccaatggtaacagccacccattccaaaggcccccacaataggtgaacactagtttcattcagaaagatgacaactttagacagcataattcaagagcacaacattgcgcgccaaatccaattgctaggaagaagcagccacacataccttccaagatggcttcgcgcacttgctccttggaaatacccaatgctcccaccagcattccaatgccatggcacctcggagcgcccagtaagcacacctccctcggcatcgccgccgccatggagttgttcagatataggtggatcatctcatccttcatgctgcaaattaacaggaaaagcaacaggaagccatcaaatcgaaataattcttttaaaaaaaaagttagcaagttgagatcaaaattgagtggttgcattgggggtgcatcttactgcaaagacccgggctttagcttatccgagtgcaaaggccgcgacttgcgcatgctcttctcggacggcgagtgttcctcctcctcttccgaaggaggtgcttgaggcggcatggggacgaaggggttccaggcgtgcgctgccattggctccggaggctgcggcctccgcttggggggcgatggattgggggctcggccacgcggctgcgggatggagggcgggcggagatggacagggctggagccgagcgtgggggaggaggccgacggcgaggaaggggatagcgaggaggaggaggcctcggcggcggcgggtggcgcggtgctggggtcggaggcggagctccgggatgcgaactcgccggaaggtgggccgacgcgtgggagcggcgggagagggcggagctctggcgatcccggacggagatgggaggtggtcgggggcggctgttgcggcggggcggcgagggtgccgaggtagaggaactcggtgctggggttggaggaggaggtgggcattggcggcggcttgaggcggcgtccctcctcatcgccgtctccgtcgtcatcgtggtggtggttggtggctccggaacgggatgagggcgagcgagcgtttgggtgggagtgggaatggtggcggtggcgtaggcggcggaagaggtggagggagaggagggcggagaggaggaggaggcagagggaaaggaaggagaggaggagggcctggaggacagggaagcggcggggtgggcgctgggtggggtggacgagagtggagatgttggccgggaaagtgggtaggccgccgtcgccggatggctgctgctgctgctgctgggtagggggtggcggggcggcgaagttggggaagaaagggtagttggtgaaggggtaggcgtcggggggagaggggttggcggaggaggaggggaacttgggtgtgggtgtgggaggtggtgctggcgccgccggcgggggaagtgtcggtgcgggcgttgccgatatcgaagcgggtggcggtgtaggagtgggaaggagaggcggtggcggtggcggtatgcgatggtgacggcgaggaggccggggcgcagggggcggaggtggaggggtgggcgtggtgacagtgggggtggggagaggtggaggaggaggagagtcgggagagtggagctgctgcaaggtggtttgggttggggaggaggagcggtggtgggtgttgttgttggggacggagacggcgctgcagtagggtgcaagaagaagaagcagcagcatgagattgagcaaggagaagaagaggggtggggaagacgacggcattgccattgccatcgccatggaggtaggtttgccgttgcaagtgcaaaaacaaaggatgggttttggggaggtttctctactccctcctctcctcacagagactgtgcacaagtgcagtgatgatcctggccctggccagtgtaggggggccagctaagacggtggcaggaacggcagcggcagcatctttgcttggttattggattcttggtgagtgctcctcctcctcccttcctcttgctctgcctgcgcctccgtgtcttgttgtcttgggaatacaattaaagaggtcttctttctcactggtgatggattattaccagtgggaaatgcattttattagccactagtagtagtagcacctccactcttgaaaactggtgtccttttcctgtcagtgttgtctctctttagtttaaataaaatggacaaatgaaaccgaaaatgcaacctgctgtttcttcggctacagctttatttctgaatgagcactactacggctgtgtggatctaaacttcactacttttctatcacatcaacatgtcatacacataacttttcagtcacatcatatctaatttcaaccaaaacccaaactttggatccaactaaacacagcctacatctatttttttttacaaaactcttacaaataataatatcaaccgtttaacttaaatatataaaaattatagataacctgaatgtatttacagcgtgacatgtaaatggcccaagaataatttatattaaaactaatctactaatataatagatttgctgtaagattgttttcgacatgttagcttctccacagtagcataaaaggcggagcgaaccaacaactagggcctgtttggtacagctccaactcctaaatataactctaggagttaagtctggagtggaattgtggagctgtcaaaacccagctccacagctctaatacgttttgtgagagagctctactcctagttttggtagagctgaaattgtttgactgagctccaggagggtggagctggagctggagctgtgccaaacaagcccctactctcattatcttgtggcctggtgcattggcaagccatccttgatcgtatccgtagtggttaggaaagctggtgttgccactcgacatggaagaggaggtcaagcttgtatcgttgcatacctggggctgggactatcatcgctaagagcatcaacaccaacaatagtttgtggatgccatataccttcctaaaggtgatatcactgacatcccgtgtctcagtgtggactctctagctgaaaacttagttatggtttttaggatatttagaatagtgacgatgatactctagatgctatgatattttttgagatgtcgtattgtaggtttcatgttaatgggtgttctggataacttctgtcttcgacagatcggcttcgatggctatggcctatagcggctcagttactctctaacatcaatttttgttttggtttgatgcctgttctcgacaatgatgtgtgtggaattcgatcgacgcaacgatcaaagttgattttagacattctgatttttcaatatgagaaaaacacaaagactacatacaacttataaagcattgagaagaaaataatagttatgcgtattattgtcaattatagatagtaagtcactatctttaaggtattataagttgttttattggttttaatcaagcagtgatttaaaaaaacctaagtctactgtaaactgtaactaaatggtggtagaacatatatggcctcatcagatggccagatgctttggctgatcagccatttaagcaaaataagctaaccaatatacattgaaatttagctgaattagaggcagttttggctgatcagccaaaacatttggccatccgatgaggaccatattatacacctattataacacaaatcaaacacaatatcgttttgtctaagaaaaaccatattaatgtatactctcatagtagggtatgagtattggaaatatcaaaatcacttacctattcattcattttaaaatataaaaaaattttagttagatatgatgcatattagttgcgaatctgaaaaataaagagtatgtaataaatagtggtgtgtatcaggtggt

SEQ ID NO: 7923 - DNA, 19437 bp, Oryza sativa
agggcacaaagaatattacaaaatattctcggccaatgatttttaaaggaaatttttaattccctcaataattcacttggataaattgcttaactttttatttaatttctaggaaatgcattattaaatgatttttaatcccgaacgataatcggggcgttacatacctacatgatgatgaagatgccaggacctcgaggaatcatatctctgcggagcaacatcaagcaagccgttacctgcgacaaggaaagctgcgagatgcccagacacgtgagatcacgctcgctcgagaggagatccgactggctgcatcaacagcaaccgaaggagaagtgcctgcgcccaagatatcaaagagcggagaaagcgatgccaagactaagaaaattcctcttgatccctttgatcccactaagactgctgtaataggcgccgagttagattgtaaataggaaagcacgctcatcacctttcttcaaactaataaagatatttttgcgtggaaaccatctgatatgcctggtattcctagggaggtgattgagcactctttacatgttaaggaagacgctaaacccattaagcaacaactacgccattttgcacaggataggaaagatgcgatcaaggaggaattgaccaagctgttagcagctggcttcatcaaggaagtcctacatcccgactggctggcaaacccagtcctggttcggaagaagataggacaatggcgtatgtgtgttgattacaccgacctcaacaaatcttgtcctaaagatccctttgggttacctcacattgaccaggtagttgactcaacggccagctgcgagctactcagttttttggattgctactcaagttatcatcatatctgcttaaaagagtccgactgcttgaagacctcattcatcacgccttttggggcttactgctacatcactatgccttttggattgaagaacgccggagcaacttatcaacgcatgattcaaaggtgtttttcaactcagattggtcgcaacgttgaagcttatgttgatgacatagttgtcaagaccaagcagaaggatgatttgattacagatctagaagagacctttgcaagcattcgcgccttcaggatgaagttgaatcctgaaaaatgcatcttcggagtaccatcagggaagctgcttggctttatggtgtcccgtaggggtatacaagccaacccggagaagatcaacgccatcctcaacatgaaaccgccaagttctcagaaaagatgtccaaaaactaactggatgcatggcggcgcttagccgctttgtttcacgactcggcgagcgggggatgccctttttcaagttgctaaagaaaaccgacaatttccaatggggacctaaagcccagaaagcctttgaagactttaagaaacttcgcacaactccaccggtcctggcttcaccacatccgcaagagccgctgttgttatacgtgtcagcaacgtctcaagttgtgagcatggtcctggttgttgagcgtgaagaagatggccatattcaaaaagtccagcgaccaatttacttcgttagagaggttttggccgactccaagacgagatacccctaggtacaaaagctgttatatggcgttttaatcaccgtcaggaaattatcccattacttccaaggttactcggtcacggtggtcacatcgttaacactcagagacatacttcataatcgcgaagcaaacgaacggattgcgaagtgggccctagagttgatgtctttggatctatccttcaagccacgaacatcaatcaagtctctggccttggcagattttgtcgccaaatggactgaatgccaagaagacacgcctacggagaagatggagtactggactatgcattttgacgggtcaaagaggctttcaagtactggagcaggagtcgtcctgatttccccgactggagagaggttaagctacgtattatggatacatttctttgcatcccacaatgtggcagaatatgaggcacttcttcatggattaaggattgcggtatctttagggattcggcgtctgatagtttgtggagattctcagttggtcattaatcaagtcatgaaggaatggtcctgcctcgatgacaatatggctacttatcgacaagaggtacgcaagttggaagacaagtttgacgacttggagttaacccatgttctccggcatgataatgaagcagccgacagactagccaatttcggttcaaaacaagaaacagctccttccaacgtgttcgttgagcatctttatgaaccatctgtaccaagaaaagaaacgaccgaggcggtagatactcaagaagtaaatatgattgacgccgactggagagagcccttcatcaagtttttgaccaagcaagaactccctcaagataaagacgaagccgagcggatttccaggcgtagcaaactttatgtcatgcatgagaccgagctgtataagaagagcccatcaggaattctgcaacgctgtgtttctttggaggagggaaggcaattgctaaaagatatccacttaggcatttgtgggaatcacgctggcgcacgaaccattgttggcaaggcttatcggcagggttttttctggcccatcgcaatatccgacgccgacaaaattgtgcgaacatgcgaaggttgtcaattttttgccagacaaattcatttaccagctcaggagttgcaaactatcccattgtcctggccgttcgcggtctgggggctcgatatactcggccctttcaaaaaggctaccggtcgtcacaatcacagcagacaaggctagagacagctcatctttttgtggctgtggacaagttttccaagtggattgaagccaagccagtcgtcacaatcacagcagacaaggctagagacttcttcatcaacatcgtacactggttcggagtacccaaccgaattatcacagataacggtactcaattcactggtggtgtgtttaaagatttttgtgaagactttggcatcaaaatttgctatgcctccgtagcgcatcccatgagcaatgggcaagtcgaacgcgctaatggtatggtacttcaaggaatcaaagcatgagttttcgaccgactgcgtccctacgccggcaagtgggtagatcagctgccatctgtactttggtctctgcgcactacgcccagtcgggccacggggcaatcaccgtttttcttggtttatggtgcggaagccatgctgccgagtgaggtagaattcgaatccttgcgatttcgcaacttcaaggaggagcgctacgaagaagaccgagttgatgatctcgaccgactggaggaagctcgtgaagcagccttgattcagttggcacggtatttataagggttgcgacactatcacagccgaaacgttcgatcgcgggcattcttagtcggagacatgggcttgagaaagattcaatctacacgagatcggcacaagttatctcctttatgggagggaccgttcgtaatttctgaggtcactcggcccggttcttatcgactcaagcgcgaagacggtactcacgttgacaactcttggaatattgaacatcttcgtcgtttttatgttaggcattactcatgtacattcttttcctctttgactaccaacatcaagttatctcttgaagttaccagtcgggggctactataataacaatggagtgtgatttttatcaattcaatttgcttacttgatttatcattgccctgtctgattttttgacttagttaatgaggaatgaaagttttttgaggactttcgcgggttctaggctcagcaaggtttgatgagaacttttaagaaatcaaacactaagtttaaattatcaagcacagcataaatacatcagtattgtacaaattgtgcctccagcatcacaagtcacattatacaatgtcaattagactcagttctttcatcatcagatacatcagcctttgtcggaccaagattggtatcttggaatatttctatgacatctacagcaatcttatccgcggctttctgagcatcattaataagatcaaggacatcttcttcgcttgtcccgtccgcaaagccgtcgacagtgtcaacatcgatcttcgggtacaaagacttggtcatcgccaataccatgctcgctcccatacatccagcttctttgatatttttgaaacacacattcggagcagttatcagcttgtcaaagatttcaacagcgttgaatgaactcggaccgttgttgttaaaaaacatggcttggatgagtggtgtagcagcattggcgacctcatccctagctccctcaagtttcttgatcttgttgactagaacgtcgaattgagcttgagatttgatcttgcgatctgcatataagggctatatcaacacttgcatgcgaagacaggattgattttggggtttggattataattaccttcaacatccttcagagccgagtccctcttcttggttagttcacccttatctttttccagagctttgattcgcttttctagctcagtgatcttggcagcttgtattgtagtatatctcagcagttgattgaatacggatagtagcctggagtaagttaattaagagtacgggttacctttggatgatccactaagctcagcgattcgatccctgagatcgtgttcagtcttcctggctagctctctggtttcatggagctgggctcgggttgcctccagggttccaagatgaccgaccagtttctcaagggttgcagtttttgcttcattcctgagatgaattctctgcattacaaattcacccagttcagaaagttgaccgacaggatgagttaagctataagctggagacgtacatttacgagacgagtggcttgattaagtgtctttgtgagtagagacacttcttcgtcttctttctgcttatttattacaattctttgtggctacatttcgtcatcccaccatttgactaagatgggtgggcgagagtcttcagttgattgtatccgaagaatctcttcttcatcgccaattattgggtctatgcatttgtgtaaagagtgataaggcgattgaagagaacttttttaatataaatggattcagatgatcaattaattgttatgaccttcggaggagggcgagctggcccttgtactttgtcaaaagtactggtctctgaaccaacattggtgttattaaaaggagggctgcttgtttgtctctctgtctccgggatgtctttatttggttcaacacccggctggtctccaatcggacgctcttggtgagcatcggtctcaacttctgctgactgatttccagtcgggggcactttcccagtttctacattgtcggtcgccgactggctgccagtcgggtggttttcttcagtcggctcggtttccttggcagttgtagaaccagtctccttgtcagtcgactaagggtcttttccagatggatcgatgtcagatggtttcttgaggattcgagacgtgttatattgatgctacatgttaagacaacacaggagaaatgacaagttgattcatacctggtcgattttctgatttttggtattggacgactggatgttttcttcttcgggttagcctgtcttggctgttttccagtcacctctttgctgccagctttcccaacgttgtcaccttcgtcatcgctcagaactaacttccttttccgagagcctggctggttagttggctttgggctgcttggctgagcaacagtctggatttttggtccgccactggcctggccagcttgttggcggggagagcggcgttgagcgattggaggatcagatttcattagagaaaattcctatgcatgatatttcaagttttcagccaaacattacaaaagataaaagacatcataatgaaagccagaatatgtgatgcgtaccggtggaggagggttgaaggcattatatggcaccactggcaaaaggtacgaatagctaaccacaataccggttgagaaaattttgtacatcctctccttcatgatcttgaactcaagagactctggatcttcacggttggggtcattcttgccatcgaattcgaaggcagtgcgggatctctccttaataggtgccagctggctcttaatgaaatgccgagttatttgttccccttgaagaccttgctctttaagcttcagcatgcattccaacagggtaggcacctgagaagcttcatctctcattggaagcgagttcaaggtttcttggtatgttggagggaggcaagagtactcgggaagagctggctaagggttctgcacataaaaccagtttgcatgccagcctttgtttgatgttttgaagggcatagagaaatatttctggctcagggtcccccttaactgaaaaccggctcccccaacgacgcacgacttgctcttgtttggctgaggcttcaggaagaagatgcggcggaataaggcaaaatgcgacctaatccctagaaaagcctcgtaggcatggatgaaattagcgatgtgaactatggaattggggtttaggtgatgtaagctaatcccataaaactctagaattcccctgaagaactttgaagttgggagagaaaaaccaccataaaagaaatgggagaatacaacgacctcgtgtgtatccggggtcgggaatgcttcgtcacatgccggacgccagccgatgatttccttcgctggaagaacaccatgcgccaccatctcttttaggttctcctccgttacgtcggaaggagcccactgactctcgaagctttctctttcctctgccatggatgcaatatggatgatgcgatttgatgaggaaatggctaggaatggatgggagattgatgcggaggttgcgcggaagattttcgcaggagctgtaaagcctcggcaaagtggattggtgcggatttgagaaccctagtttttgccgtcgcagttttttcactgtagcgaggagtggggaaaatggaggagaccacggcagggaagacgaagtggcgctctgttttagcgattatttcgctagggtatcggaaggtactaatgggcctgggcctgcatagtactttcagcccaactttattattgacgtggttggttgtactccttagggacttaagcatatatttttgccttggtaaaaatttctcacaacagaatagcccaatgccgcaaaaatcctttttgatgcagctagatgattctttggaatctctacaatgcggaatgaaaatgtgctcgacagaaaagtgtaatgctaattttgttggtctttttaggcaacaaagttgtttggattttattgagatggctacttttttatggccattctctcagcatgttatatgcttattttgataacgacataagtcatggcttaggctattttgacttgtcatttgtcgttttctatacaacagtcgatgaatcctttaagagttttttactcgaattattatcgcatatgttggtttatggacctttagagtgttttttcactcgggtttctttttgggcgcattatagctaaagcagtcagcagaatgcgttttagatgtcgcctgagcttaattatacagtcaccttggtgattcggttgtaaaaccactcggatggatatttcatgtgccttgactatatgtttagtttttattcaactaatcacatagtcgggggctacacctaattaggtgtatctagtcgatgcacctgattttttattttcagcccttcatggtttttaatttcagtactcgggagaccaaggcaggagaaattaaagcacttggattattgttttagagattacaagaaaagactatttcatcgactataaaggtctcaggagatactgtgaagattatggataccccatacccacacagcatgtatatccgactgggtatgggggtaccatgtataaatagaatatctttaaagggtttcgggttaaattcataaacttgtatatcaaggaagcacccgggattttagtcggttacgattgtgttttatctataactgcttattccgttaggaatatgggctgtactttataatacggactccttcctctatataagaaggggtctgggtgcctcttggggcacgatttttctcccagattatacgatcaataatacactcggcggatcaatccctagacagaagtagggtattacttcttattaagaaggcctaaacctgtataaaatttcttgtctctaaacccatccacttttccagcttgatagccaccccttttagtattgccgaaatcttgtttcgacaataagacgagtggtcaaacagtacaagcaaaaaagtctgatgccacgtcagcgaaaccagataattatactgtcgacctacattgcacggttttgtataatttagaggtgaagatttctggtttagggatgttaaataaacttgatgtaaagttaagggacgagacaggtgaacttatccgcaagattacacacatgggcccaggacaagatgaatggacatcacttctctcgggctgccaatgcggatcctcgcgaggattctcgagaagcggccatacattcttggctatgatcttagggtggacgagtacgagtattgtcaaaactgaagatgtttgtggttgttgttctgggcctctggctgctagctgttgagacgaaaaagggaaggagagaaagaaaaagagcagtagtagccatgtttccacagagttagaaaggatccactgattgcaattagtggatcctttcttttttttatcttcactaattgcatcgaaagtaaactattaaaatcacaaaagcgaaattattgggttcacgcatcaataattgcatacacacattcttctagcaaattgcactttggatcatgttttattttattgttaaagttctactttggatcatcatatacctaatttttgtttagtttggatcatcatatacctataacctaatatttacacttaattagctaactttttgttacataatggaacaccctaactctcttcactagccatatctagcatcttctttgataaaaatatgaaatgtgtataggtagggtagttcaccagatgctcgggtagttgaagtgctgatgatgtgatttggggtgatctattgtaggggatcctaatgggtgtgcgcgtgctggctgcttaactagtgcaaccacgcgacccctctccctggccccgtgcgcgattagcgcaacacatccacgctaattatggttattaacattaattaccacaattagcattattttttaaaaaatacataaataatttaaaatttgagttaaaatttttgaattttgatattaaagttctcaactagatatgaaaattttaaattttgagttgaagttttgaattttgatatgaaagttttcaattttgagatgaaaatttttaattgtgagttcaaagtttttgaaatttaaattgaaagtttttaaattgagttgaaagttttcaattttgagttaaaagttttaaagttgggatataaaaattttaaattttgaatagagtttatgaaatctattatattattaaaacagccttgaaaggaggcaccatgttcgctgtgggggctagaaattcccacattaatcggagaaaaagaaaaaaaaagaaaaagagagtccaagtagaaatacaatctaaaaatatctgaaattcggaattaaaataagcaataatgaaataagtttccatataagaacccagtacgagattaatcaaaattcaaaataaaaataaaataaaatccaaaattagaaaaaaaaaggagaatccaaatagaaatacaatctaaaaatagctgaaattcggaattaaaaataaccaatattgaaaaaagtttccatataagaacccaatacgagattaatcaaaatttgaaataaaaataaaataaaatccaaaattaaaaaagaaaaggatagtccaagtaggaatacaattttaaaatagctaaaatttggaattaaaaataaggaatattaaaagaagagtccatataagaacccaacacgagattaattaaaattaggaataaaaataaaaataaatccaaaattagaaaaaaaaataaaagaagagttcaagtaggaatacaatttaaaattagctaaaattcggaattaaaaataagcaatattgaaagaagaatccatataagaacccaatacaagattaattaaaattcagaataaaaaaataaaataatatccaaaattagaaaaattaaaagagagttcaagtaggaatacaattttgaaacaactgaaattaaaaataaaaaaattaaaagaacacaatacgatattaattaaaatttgaaaaaaaataaattctgaaattaaaaaaataaaaataagatttcaattaggaatacaatttataaataacaaaaatttgggataaaaataaagactattgaaagaaaagaccgtctaaaacacatgacgagataaattaagcaacatgcctataaaacagtagagtggtggcagttgatacgtcatataaaattcataataaaacaccaaatagatcctaatgacgattaaaaggagggacggccagcagaccatgaagcaaacgagtaaagcggttgccaggacttctagaaagtaaaaaaaaacccattgattatcatattcgatttttaaaatctcaatgcctataaaaaggagaagcagcgagcggggtgtataggagtatagttgcagagccaccaacggttgacgagacttctagaaaataaaaaataaattccaacgataattatgtttgatttttagaatcacaatgacaataaagagtaggcggcggacatgccgtagagtagcatagtggcatcattttacggaatttctaaaaagtaaaaaaaaacaatgtgttcgattttaaaatctcaatgacaataaagaaggaaggcaacgggcgagccatagagaagtacaatatcaaagccgctgacggtttggcgggacttctagaaagtaaaaatgaacccaaacgataattatgttcagtttttaaaatgtcaatgataataaagagaagagacagtggacgggccgtagatagtggacgggccgtagaggagtataatggcaacgtttaacgggacatctagaaattataaaaacgaaacccaacgtgacaataaactctaaaaactataagatctaatttttaaaggttccaaggagaatgaatagaaatagtgatagatcgtgcaagcaaataaaggaggagatgtcataaggggtagcaactggtgtgacttttaaaaactatataattagaaacacggggatgataaggtttggtctttcaaagttttaagacaatgagatagctatttaataattttaaagtaaaatcatacttaaaaaaatatatgattttgtttgggtgctagccgcacaattgcgcgggccaagaaaaaaaaagaaaaggagagtccaagtagaaatacaatttaaaaatagctgaaattcggaattaaaatcttacccattagattatagtgggtccgaattataatggtatagattgattgatattattgtatacaagatacaattatatctacataaattgaagttaagagttgtatgtctattaaaactaaaagttgtataaatccaaatacacttctacgtataaggttcctataaaaataaaatttttcagaggcatgcagccttgcggaattgaaatcaaacatgatataggatatatacgtatgtaacggactcaatatgaattattgtctgatttctgttagccaaaagaagttccgtatgaattagattatacatatgtacttctataaatcaattacgtatcacaacaatattcaagctttgatatggacggaaacagatcaacaaatattagggggacgaaagctgcagcagcaggttaagcaacgttaaaaaaagatttccataaaaaaaggaaaaaaaagatttctgtatggaaaaaaaaacaagcgctaaaaattttaggaattgctaactagcagcctccgataaaaaaaagtgcgaaaaacgggtttccgccttccgtaaaaaaaaggaaaaaaaatagtgcgaacaaaatgtccgattctaaacaaaaaaatcccatcctccgtgccccccaaaaaaacaagcgcgaaatttttttttctatccgattaaaaaaagtgtgttcccgttttccttaaaaaggaaaaaaagtagtgagaaaaaaagatttatgtccgattcttaaaaaaaatagtacgtataaaccggtcctcccgaaaaacctccgtgcccgaaaaacaaacaagcgcgaacaaaggttcccgttttccttaaaaaaagaaaaaaaatagtgagaaaaattgttaattgaagaaaaagttttcgtgaaacgttcaaaaaaaaatctgattccataaaaaccgatgcttttccaaaaattcctccaaaaaaaagaggttgataggaaaaaacaaagagtccaataaaaaatccaatacgagattagtaaaagttaggaataaaaaaataaaaaaaatcaaaattaggaaaaaaagaaaagacaagaagagttaagtagaatacaatttaaaattaaatataatcagtattgaaataagagtacatatcagaacccaatagtagatgaattaaatttggaataaaaaataaaataaaatctaaaatcaggcaaatgaaaaagagagttaaagtaggaatacaattttgaaacagcttatgaaaataaaaaataaaaataacaaaagaacacaataagaaaaataaaataaattctgaaattggtgataaaaaagtaaagaccattgaaagaaaataccatctaaaacacataacgagattaattaagtaacaggcctatataggaaccactctaataggaacagagtggtggcggttgatgggacatctaaaaactattaataaatcaccaaataaaatcctaatgatgattaaaaggaaggacgacgggcatgtcgtgaagtaatcggtcaaggcggttggcgagacttctagaaagttaaaaaataaaccccaatgaaaatcatattttattttttaaaatctcaattacaaaaaaaaaatgagaggcagcggacgggtcatataggagtacaatggcagagccgctgatggctggtgggtcttctagaaagtaaaaaaatgaattccaatgatagctatgctcgattttacaatcccaatgagaataaagagtatgcggcggacgggtcgtagaggagtatagtggcaccgtttgacgggatttctataaattataagaaaaaatgaaacccaacgagacaataaactctaaaaagtataaggtctaatttttaaaggtttgggcttctaaaaagtaaaaaaataaaccccaatgataatcatgtttgattttaaaatctcaatgacaataaagaagggcggcagcgggcgagccacagaggagtatagtgacaaagttgctgacgttttggtggaattctagaagtaaaaaaataaacctaaacgataattatgttcgatttttaaaataatactccctccatcccattttaaatgcagccatagttttccgcacctaattttgaccgtctatcttatttgacattttttaaaaaaaaaataaaaacattagtcacgagtaaagtactattcatgttttatcatctcataacaacaaaaatactaattataaaaaattcaaataagacggacgatcaaagttgggcgcgaaaacttatggttgcaattaaaatgggacggagggagtaatgataataaagagaagatgcagtggacggtcatagaggagtataatggaagcgtttgacgggacttctaaaaattacaaaattataaaattataaacacgagaatgataaggtttgttcttttaaaatcttaagacaacgagataactatttaagaaattttaagtaaaatcatgttaaaaaaatataattttatatgggtgctagccacgcaattgcgcgggccacacagctagttttaattgaaaaccttaaattatatttgaaaagtaaaaaaagcaactcaacgtgatatggctaattacccgaagaaaggaaaaaaaatcagactaatgatgttactaatctgcatctaattacgtgataatcactttttccctcgttttcctgtttctgacaacaccgctgttcgttccgctagcgacacatgcacttgtgtgccacgtgtatgcgctgaggtaaagttgcctagttcaaaataaaaagattgagtaaagaggaatctaaaataaaactttgacaataaaatagaagtgaaattgagtctgtctcttttcttttttaagcctcttttatctgcgcgagcaggcgattaaaaatgaagccaagatggtcacgtctacgagcacgcgggtcagaaaacggaagtgaggcggaaagtaaaagccgtctctttcccttcccctgacgccatctcccctattcgctacagcgatgtcgtgtcattttctgcaagtcaatcgacaagaggattatcgaagtacagatacagaagcaggcgctgctgctagaagcgaaggatataacaagcggcggccggagacgacgacggagaaatccggaagaagaggaactgccggcgctgagctgcaatcgcgcccaagaatccatctcctccggcggcaggtatggtgatttcgtcttcctcgaactcctccgtttctttttcctttttttttaaaaaaaaatcatccatttctcccctgatggagtggagtggagagctccgtttctcgtcttctcggtggatttggtcattcgggtagtgctaccgtttcttgatttatcctgcggaaatcgtgctcttccgcattgatcttataggctggtgggaggcgccgagccgcccatttgagttgaggggttgaccaatctgaggaatattctgacggcgttatataattcggacaatcgatgcacaactggggcccaaaaacaaaaaaatgttcctttcttaaacagttggttcagaatgggatttttttttctttttggtaatttttattttttgttccttcccgattaccgtgaacagtttttacaagcaatctacatgtctggtcatgaacttaacatctctaaaatatttactctattatatatatcatacactgttcaactgaattgagattgcttttttttttcttttttgtagttttatttgtttgttcccttccaagtaccatgaacaatcttgcaaattacaatccatttacatgtttggccacggcttgaaatgttaatccagtatatggagaatcatatacggctgaactgacttaaaacactgtagtgtttgacaatataaatcacactgttgaactttgttttagacttaagatactatatagtatttaacagtaacagtatgttgtactatgtatcatatatgcactgctgaactatcttaagagactgtaggtttaacagtaaaagattgccacctgtaatttcctgaaggatataagcagttaggaacatctttttttcgccgggccggcaaagaacaccggccacagttaggaacatctttgttgctgtatattcgtaatgcacccctatattcccttcttgttctgttcttattgctgttttatttgcatgtacagcttacagggtcgctgctccatctccttgaattgtactagctgtcttgtgcttaagatttgcgctcggcttcatttttggattcaagctgctgggtgtggatttttatgatgggctgtctaccaacaaagcaagtgggtcgttcaacacattccttgaatccacgggaagctgtggctcttgcggctgaaacatcttgtgagaacgtcgatctaccagatttcgttaatattgccactggaacaccctgtgagaattgaaatccatctttccataagaaagaaaaaggatttagtttgtttttggatatttttatgattctgtcttaaaatgtgtggattagcttttcttatgttagtcgttcaaaatcaaacaaaatgacaatgcactgcatatatgatgtgtattatcctgagtagaatggaactttgaaccaataacttcttttctaccacagtaccagtaacccaatggatgccagggtaggccaatttcatctaaaaaagcatgttatacattatcatggattgcgtatagttctgtaatgttacctgaaatacatatatttttccgggttttacaacaagtttcttaacatttttctattattgcagttactgtgaatgaagttgaggcattatacgatctcttcaggaaattaagtaattcaataattaaagatggtctgattcacaaggtaataagtgcttccgcataattttgattggtacaagtttttaagatatttggcatgcagcttattttgtttttcttatccaggaagaattccatcttgctctctttaggaacaagaagacaaatctcttcgttgatagggtaagacttaagagtgttaatatgttccaaattgtcattgtataggttttcttgatgattcctctgttcttcagtgctaacagtttatattaaaaataataatatttattctccatattctttttgaattaatatgtccaaatgatgtttgcagtccacattctttctacttcacaatagtatgcaagagaactgcatatcattatataaatcgtagaaaagattcccactttacattcttgtgctcattgtttttagtcatccaccatcaacactcatatgttatccttcctaaaggtgaatccatataagtggcctgaagcagtgtaatttctctcttgcgcattagagcaacatttaaaaactaacaaatagaatagattttacatgacaggcttccggtttaaaaaagggtaattttgaatgtattggcattcagtattatcagtaaatatttatgtgtttgaaaataatcgcaggtctttgatttgtttgatcaaaaaggaaatggtgtcatcgaatttgatgaatttgttcgatctcttagtgtgtttcatccagatgcacctgaggaacagaaagctggatgtaaggactcttcagtcaattgtttattcttaccaaaaacatgtcgggcataagaatatagatgtttagatttgaacatttgctttcactaattaatgttataacttcttattgcagttgcatttaagttatatgacctaagacagacagggtttattgaaaggcatgaggtaagtgttacttttctcttcttttagttccagaaaattgatttgagcaccgtttgatatactttttaatgctcagtagcacttttttttactgaatcacagtcagatatctatattgtcaggtatagatattacctagaaaattatcatcttagtgaaacaaattaacagattgggcagctacataacatgtttgtaattgcatgagagaagttatgcttgtttgtatttctaagagttgttgtgtaaactttggttctattttggtatttaatcatttctcccctcgtctatagcaatgaaatcatgctaactctgctgattttattttctctttgctattctttatttttttttgtagttaaaggagatggtgttggctcttctggatgaatcagatttgaatattacaagtgatgctgtcgagatgattgttgatagggtatgggtcctaactccctagaacaccaagtaaatatgtccttctgtattgttctaagtctttttaaaaacaaaaaaaaaacaaaaacagacatttgaccaggctgacacaaaaggcgatgagagaatagaccaggaggagtggaatgagtttgtcaaaaataatccatatgtgctgaggaatatgaccctcccatacctcaagtaagtgctatgcacaaatttactaccaccatgaatagagttgctctgctatgtagaatgtttttacttggagtcacactagcaattatactcaacaatatttcttagaacttgcactcgtcagtgccaaaacgtagaatcagacgcttgtcaatgatagcgattgggggaaaaaaaggatgataatgggcttcacaatcacaattgactatagtcatgtttttgtcatatgtattgcgcattaactaattattattggttggtgatattctttagggacctcaccatggtattcccaagttttgtgattcactcagaagtcagcgaagcagacatggttgcctaacctgaaacctggtgttgctacttgctagattgcaagtttgcaacacttctagcatgtaatgtttgttccttgcgtgcattgttgactagggaaacagccatataggagatgagttgatgcctcaaaatgtagcatcactgaccagcagatgctcactgttgagattatgggcatataatgatttaatttattccataaataaatcatgacattacagatgaaaactagcatgaacgcatcattagatctacacatgtaaactacgcagaataacatgaacagatcaaatatgcgcaacatattgaacacgtaccgaggtgacgaaaagaccggctgcttggtcgaaacttttcgcatgtgtctacgaaggcacgaaacacgcgagcgaagaggaaggcgagccgtcgcgaacgaacagggagcagtcgcgcgaagcgcttcccaaaaaccttattgccgccttctcccggtgcaggacgtcaaaggcagaggttccggagacctgctctcccgatcgctggtgcacgccggcgagcgggattgagtactctacgagcgacggcgcagtacagagtaggaggcaaaccctagattgattttgcgtatatactgcgtgaagacggcgggtcggtttatatagagaagggtcgcttgatcagggcgcccgcacgatctctactgcgcgtaaccgaaccggataagtcgcgcgtaacttatccggactccacgccgtttgcacgcaccggatttttcggaacgtttccaaaacaaaacgaatccgaatttgcagcaaaacaaaactgcaaaaggaggctgcatctgcgcaagggtgaggagccaatttttcggaccattcgacgcgtacgtcgtgcacgcgcgctgcctgccctgcagggcaggccaggccaggccaggcgaggcgagcgagcgcgcgtgtgtttcccctcttctctccaccacacatgcttcaagcgactaggagggcatcatcccttttaaggaggtccccctctcatagaataagca

SEQ ID NO: 7924 - DNA, 18094 bp, Oryza sativa
tttcatataaaaaattttcgtacggaatttaaataacgcacctaaaaatctttatcttcatctaatttttattggagaaaaaaatgggaccttcgtgtgccgtgggacggtgggagtagtatcatggcctaattagttgaccgagcgctcgacatccgtcaacgactcaaatcatgcgcgcgcgacgccccagttattacgcgttggcatgtcattagcggagtactactaatttacacttagctctaattcatggcacgtacttacgtgatgtgaattgtgagatgcgagcgtgacgcggcgcgccatgtgcaatgtgatgcgtctcgctcgctcccctcgtgacgatgctggccgcgggggggctctttctcctgagatcaagctgagaaagaagataggcgcatcgccgtcgcgaaatcaatgtgggtgcagtgcctgtgccgcgggggcgcgggggcagcggatcggaagcggttgcgaaaccgaccgatcgagagcgtcaccgtcccagatcggggcgcgggattcgttgccggaagaggggggagccgcgcacgccacgccttgctccggtaatctggttggcaccacgccgcgcgcgtgccgcggccgcgagcaggagctatagggggctggctagtgaactgatccgtgagaaaaacgtaaacctcctcccgtggttttttccggggagaagagacaacggccgtggtctgggtgtgcatacggcatgtgccgtccgttgcaccgggcacggtcgacgggtcgaggcggcacatggaggcgtgcagtggagaaatttccacactggtctgtggacgacgtgctgtgtgcacaagcacaagctatccctacccgtactattccaagtccataaagtagcatggggttaggtagcaggaggccttggacagcgacaaacacgcccgcaaaaaaggcacagtgtccgaggcagccaaagcggtggacggacggagcccggagagcaaggaaaaaaagcaagccctcccaacgtttctcacagtttgtgtcgagccttcgtacgtctctctgactctctctctctcgtctccgtgtccgtggtacgagatgggagagagcgtgagaccccacacgtgtgggccctcgccacttgaaaacttacctttagagcatgtacaccggttataaccatatatcgacaagaaaatataagagaaaaaaagtcgggctacagatttgtagccggctacaacacagactccaaaatgttacgtgtgtataagtggtgggaccgggtattaataatgtagtatattttatagttaactattgtataaaataagctattagattggctatagatattttagagctagtagttggctgtactatttaccctgctcttactccttgggaccgttagaaaacttccaagtgacggctgtgtgttcagttcgctcagttgcgctgtgtcaagtggcatgccaatgtcacagcctcgcatgtccaatgcagtttaattaaacggcagattactatacttataacaactttcatactagtaaagcccatcagcaaagttttacagaggtaaaatagcaagaaaaaaagtcctttagaaaaggccaagttaattatactgtcgtaaaagaccaggaaaagaaaagggacaacatatatacaactatagcaaacgagccagtcagagacagtcatagaatcatactgacatggtcaaggagatttttataacccatcactttaactgttttacagccttcaaccgccttatcctcaaagcacacagcgctttacagcatccaaagctctctccctccctcactcactcgccaccttaatcaaaccaaacccttaattaagtacttaattatgactaaacaaggctcactcccccgttaattagattaagcagcaggcttaaggcgcaattagctagcatcccttgggcacgaagccgaggcgctggccgtcgccgtcgaacaccacgcggaagccctgctgctggatgttcccgatgatggagacgccgccgtcggtgccggcgaacgcgaagcagaaggtgcccctcgagtccaccgggatcaggtagttctccggcggcagcgcggcctcggcgccgccggcgaagtgcatcgacacggtgggcaccttcaccaccttgagcccgctcaggtcgtagcacgtgtcgaacagggagaacccgcccggggagaggcggaggcccgcggccgccgcgcggaacgcgtcgcgcagggcggcgtacgccggccgggccaggcgggtgacggacgtgccggagtccacgatgacgccgccgcggcctgtggacgggtccaggcggaggtcggacacgggcacgcccgggacgcgcgcgccgccgacgctgatgcccatgagctgcacgtagtagaacgtctccatcctggggttcttcaccatcggggtgaaggacgcggcggccgagggccccacggcgccggagccgaacgtgacggtggaggaccgggaggtggcgctggccgacgaggaggtgcggtccacgaggcagtacgagaagctccgcccgaagcggcgggagatctgggaggggaaggagaggctgccgcggccgagcccgaggagccccgccgccgcgacgaagagaccctcgttgtcgtggccgcagccgagggcgacgcgcggcacgcgggccccgctggcgaaggtgagggtctccgtggcgaagtccccggcggtgacggagccgtcgccgtaggcgacctggtagaggcaggccttgcggcgcaggtcgcagccgccggagtcgagcctgcggcagagcggcgcggcgcagtcgacggcgccgtacgagtgcgaggcgcgcgggtcgaacatctggccggactggtcgtagcaccggcggcagggcgcgcactggagccacacgacgtcgctgccggtgtccagcaccatgagcgccggcgtcacgggcgtccccaccccgatcttggtgaagtactccccgctcccctgcgccagcccggacaccaccggcgccacgaacccactcccgccgccgccgccgccgacacgcgtcccgttagccgccgcagcaccccccgcggccgcggagatccgcgacgccctcctcttgtcccgccgcaaccggtgcgcgagcagctcggccgcggtggcgttcaccgcgaagtcgtcgcggtggaccacgcgtagccccaccgtcgacgcggcggcgccgccctcgtccgcggcgaggctcccctggaacagaccgtcatcctccacggcggtggcggtgtacgggtgcggcgagagcggggtggcgacgagggtctggtacctgacggcctcggcgacggcggcggcatttggcccgccggcgatggcgaggagcaggaggagaagcgcggtggcgagcaaagacggaggaggcgccatgagcagcagcagcagcagcaagaggtgtgaagtgggctgggcgggtatggacggctattataaaagaagcggagttgtgcgcgagtagaaaccattattccaggagattagattaggcggaggtgattactgaattaattaagcagggtttctggctttctgcggcgcatgttccggtggggcagcggcagcggcggtggacgggagggagcggaataaatgttggaggtgagctactagtgactagtgcggttttgtctgattcgttcgcagccggcccacgagccggtgaacccggtggtgcggtgcggacacgttcccgtgctcgcgtcgtcgtcgcagcggcgcgcctcagctcagcaccgccagcgtgtgatacccctgtgccacagtgccagcttgcgctcctgccgcggcctgcggcgacagtgtgacgaatcgcgtgtgccggtctgggggcatcgattggctgtgcgaataaaaaccggagcagggaggcagcttccgatcgaccacctttccgctttcgcttcttttgaaactgtccaattttctgaaaaatcttggaactagttgaaactccaaatacatcctacagctgatgctacacgttctctacaatccaaatacaccctacaccgtggatgatgtttcctgtggcacgtgataccatatgttacacgttctatggatgtttcgctgaaattgtgtaaaccaggcctgcggggaacaaggcctcggtggagaattccgttggaccaaggagttctatatgggccatattatgagattttgatggcccgcgacaatcattttgggctggaataagttcactttaggtccctcaatttgtcgccgagtctgaaatttattcgtaaactgaaataccaaatataacgggtcactcaatttacaaaaggaatcacccgatgtcctaagcagtactatgttcggcttttaggtaacatggcaaagctgagtcggtgcgggacctatgtgggacccacatgtcagtgactagcattgtctttcatcctctcttctctctctcccctctcccctctcttcagctctctccctaatcctctccaaggcctccaccatggcgtgtatcacgaacccatccagctccagatctaccaccagaggccgtgggcgtatgtcagcaatgtgggcgacctccactttccgtagcgacaccaacgatagggcaccctccacttcccgagctactccaacgtgctcatcatattgagcatgttgtccaccacctagaagagaagcccaatgcagcgcgcataccgtcggacgctgtccaactcggcctctgtgcccaaccgacaatggtgccggaaacggctgtgtcctcaaggggtcatgtcgtctttgcacatgtggatgtactccagcatggcgaggctaacgaggaggccctcgctctccttattgactacctgtccagcggcaactcccctggtgctgaaggtgctcccgagttggcgacctcccgtagtgtgagcttcgcaaggacaccgtggtcgccgcagtcgtgtgacatgtgctcgaacgcgaggacatggagcacttcctggcgagggctcgggcctacgccgctgacaagcttcggagcaccggagatggagctcggtggcccaaattggagggagggtcgatgagctccccgatggcggcacggagcggtgggttgccgccgcgttgagctcctcggcagtggttgatgcggcctcctccggtcagatctggccgctccctttctgttcccctcctcaccgcctctcttccgatccactctctcctgtggcgcgtgcagtacacaaaagtgtgggcccaatgcaatttctaacgaggtatctgtggcaacatttatctccgcattcttcatggagcaccgaaatactccgacatggaggaaaatctccgacctagcctcctcaagttgaatgccacgtattgcactgtgaaagccccgagagcaggacaagcttcgtactcctaaaacttttccttcctatacaaggccttccatgttccttagagcaagttcaatactatagtctactactagctccaattcatatatagctaatctaatagccaattcatacaatagtttcttactatactattaatatatggtcccacctatcatgcacacactgcgttttggagcccgtgctgcagctggctacagatatgtagcctgctgctcttctctcttactccccccgtcccaaaaaaaaatccaattctagagatgaatctggtgtgtctagattcatctctagaattggacttttttttaggacaaagggagtatcttttatcttattaaaatatatttataactagctaatagcatgctattgtacctgctcttagagcaagtttaacaacgcagccggccagccggctgcatgcgtcgctcttcgcccaccgctgcgccggctgcgggcggtaagctggcgttttgatgcagcctggcccacgaacagagaggcaaacaccgatggcagccggcggtgtgtaaaatacccgcttttttctctctcttcctctctctctcctccgcgtaggatttagcctgcttatagcctatcataatacttgctcttagcaaaccagatcgtgtcacctgctggggttacctgtacagctatggcgtcgtgagtcgtgactcgtgagagcagcggaattcaaaacgcaaaaaaaaaaaaaaaaagaaaagaaaaagaccctcgcttccgtttcctcctctcccaaactcgcctcgcctcgccttcccgcccgccgccgccgtcgccatggatgccgccggcgaggaagggggcatgacctacggggaagtggtggactacttcaactccttgcaggacccgccggcgcaggagcgcatcgactgcatcatcccctacctcatctccctcctccccgcgcccttcgtccccgcgccgcccgacgccgcctccgccgacgactccgaggacgaccacttctccttcacctcgtccgacgactactccgccgccgaagacgcccgctccttcccgtcgccgccgccgggggatggcgaggaggaccacatcagccgcctcgcggacgacctcctctcggagatcatctcccgcctctccaccaaggaagccgcgcgcaccatggcgctgtccacgcgctggcgccgcgtgtggacgaagacctccctcctcgtcgacgacgcgcacctcagggacgccgacaacgaggtctccctcgtccgcgccatctcccgctgcgtggacgcgcacccgggccccgtccgctccgcgcgcatcacccacgtcgccttctaccaccacgagtacgcgctccggcgcctcgtggcgagcctggccgacaaaaacgtcgaggacctcatcctcttcaaccgcccgtggccgctcaacatgccgctccccgacgacatcttccgctgcgcctacctccggcggctgtacctcggcgcatggatgttccccgaagtcgccgctgccgccttagtaaacctccgcgagctcggcctcttccactgcatcatccccgaccgagacttcgacgccctgctctcgctctgcagtaagctggaggtgctctccctcgccatgtcgtacaactgcccgtcgcggctccgcatcaagtccccaagcctccgggccgcggtggagtggatgtccagcctcgacgagattgtcgtcgacggcgcgccatgcctggagcggctgctcctccaccacgccatccccgtcgccgagcgtacgcccatcaagatcgtaagcgcgccaaggctggaggtgctcggcatcctggacctccagctccacgagctccagattggcggcaccaccatcagggtataactccaaactgttgtgctctgcactttgcaattcagttcgtgattctgcaaccaaacaatttcctctctgttgtttgatttgttgtattgggaatgaaatggcagcctgggatgtggatgtttgtgaagtctagcgccaagctcccgagcttgaagatacttgctgtcaaggtgtgtttggcgatcgaacgggagatcaagctgctgatgacgctgctcaaatgcttccctcacctcgagactcttcacatcaaggtagttgttttagtacacgcggttagcacctgcaagcttacttccactgcattcttctactagtcaaataccaattctagattagatcgagaatataattagatagtagtaccatgttattctgttaatttgcatcgtgtagttgatttgcaatgttcattacttctggttgatatgatagctttcctgattgataagctaagcaaagttctgattgttgctttgctaaattgcagtccattcctccatgcgcatcacctgaaatcgcgaattgcgcggatgtttgggaatccctgggttcctgcgaatgcctcaagtcgcatctcaagacagtcagcatccaagggttccacaccgagcgctatgaggtgttgtgcctcaagtacctcatcttggagggggaggtgctcgagaccgtggccttcttctgcgaggataaagtgtgcttcgccgccaaggacgacgaggcggtggagatcgagctgatgtttcccaagaacctcgtccaagatcgctggagcttccagagcgccattgatctgtctctcgacgatcccttcttctacgccgtggagagctgatgggtctgtgcgtttatggtgtttttgtcatccgacatagatgggttcacaaatctatggatgtagcactgacatactaaattcttcagaaattaacggtgaactctggatgctaatttagtactagttgttaggttctgggttgcggaagtactaaaactttggtgcgtattgttttgggccaaaatccacaatcctgtctcaatttgaagttgttcaaaatctccctgctgaccgccagatggaacctctcctgtaagcatgttgtttgataagtctagctttcggtttcggatgtgttgcattttacatattgatgttggaatggtgccagtctgctagatactccatagaattgttctgaagagcaagcacatataatacctctgttgcaaaatctgttaagttggtagtttccctgataaagagttcctggaagagtcaacgtaaatggaattgttttgtactgggcctgataatctgtttttgcaaaggtctatcgggtgtgcgtgcataagttccagtctttctggtagcatgccggttagttgattgtttgaaagatccaaaacagtagctccagaaacaatcagggactgagggtgtgtttagttcacgctaaaattggaagtttggttgaaatcggaacgatgtgacggaaaagttggaagtttgtgtgtgtaggaaagttttgatgtgatggaaaagttgggaagtttgaagaaaaattttggaactaaacttggcctgaatcagtaatactttcatttgaaatggcaagaatctgtatgccaacttgtgatcgaagccaaagttgggattcttgtccctaggctggatgatcggaggtcagccattgccagtctgaatggaggaacccagtctgaactgaatgtcttgtgagattattatcttgaaaatctaggtcaagtttgtcagaagttccaaccagtctgggaggcttccgtagaagttgttgctaatggcagacgatacgaatccagacagacatgatacgtctattattaccttcatgttgcacaggttctttaaaattgatggtttttcacctgtaaggttgtttccagacagatggattccttcgagggctgtcatgtttatactagattgctatattttgaaacaaagggatcggagtagtagcacctgttcactgccatgattacctctcttaatttagctttagctttctctagatgacacaagcatcatggcaaagatgttctttttaacggaaatcaatcgacctctacatcaagatgtatccagctaatcacgtcatggatgtggtacgattgttacatgatactgttatcttttgtatgaaatacttgagatcaaattgatgaaatacaacatctaagccatgtgaagttgctacgaaattactgtgagccttcaactgtgattaccctcacttccattgatggccttgaaaaactgttcacttgtcatgcaaagccgcacccaacaccttccatggctgtactatatctaacacaaagggggaaaaaggctttcttgtgaaagcttactgtgtgctgtacaggtgtgagtgttggaattaatgaatgggccttagcccactcgaagattaattctttggaaaatcacaaaagcccacctcatgggatgtcatgcatgtggagtttagtaccaccttgcttattctaggagagggggacctccttaaaagggatgatgccctcctagtcgcttgaagcatgtgtggtggagagaagaggggaaacacacgcgcgcgctcgcctagcctcgcctcgcctggcagggcaggcagcgcgcgtgcacgacgtacgcgtcgaatggtccgaaaaattggctcctcacccttgcgcagatgcagcctccttttgcagttttgttttgttgcaaattcggattcgtttttgttttggaaacgttccgaaaaatccggtgcgtgcaaacggcgtggagtccggataagttacgcgcgacttatccggttcggttacgcgcagtagagatcgtgcgggcgccctgatcaagcgacccttctctatataaaccgacccgccgtctagggtttgcctcctactctgtactgcgccgtcgctcgtagactactccatcccgctcgccggcgtgcaccagcgatcgggagagcaggtctccggaacctctgcctttgacgtcctgcaccgggagaaggcggcaataaggtttttgggaagcgcttcgcgcgactgctccctgttcgttcgcgacggctcgccttcctcttcgctcgcgtgtttcgtgccttcgtagacacatgcgaaaagtttcgaccaagcagccggtcttttcgtcacctcggtacgtgttcaatatgttgcgcatatttgatctgttcatgttattctgcgtagtttacatgtgtagatctaatgatgcgttcatgctagttttcatctgtaatgtcatgatttatttatggaataaattaaatcattatatgcccataatctcaacaatccaaaaaccttattataggcactgtgattttactatggctggttttgccgatgcactgaggccggataaattcaccggtgtgcattttaagagatggcagatcagggtcactctgtggctgacagctatgaaatgcttctgggtgagtactggcaaacctgaaggagttcttactgctgaacagcagaagcaattcgaggaagccactactctctttgtgggatgcattcttagcgttcttggcgatcgtctggtcgaggtgtatatgcatatgaccgacgctaaggagttgtgggatgcactgaatactaaattcggtgctactgatgctagcaatgatctgtatatcatggagcagtttcatgactacaaaatggctgacaaccgttctgtagtcgaacaggctcatgagatacaaaccatggctaaggaactcgaactccttaagtgtgtcttacccgacaaatttgtggccgggtgcattattgcaaaactacctccatcttggaggagtttcggtactgcactcaaacacaagagacaggaatactccgttgaggggttgattgcgtctcttgatgttgaggagaaagctcgggaaaaagatgccgcgtctaagggcgatggtgggcagtccagcgccaatgttgtgcacaaggcccagaacaagagcaaggggaaatacaaagctcagcagaccaccaacttcaagaagcagaagaagaacaacaacaatcctaatcaggatgagaggacttgctttgtgtgtggccaagttggtcatctggctaggaagtgtccacagcgcaaggggatgaaggcacctgcagggcagacttctaagtctgctaatgtgaccattggcaacactggagatggaagcgggtatggtaatttacctactgttttttcagttaatcaatctactaattggtgggttgatactggggccaatgtacatgtttgtgctgacatctcattgttttcttcttatcaggtcgcacggggttccaccgtcctaatggggaatgggtcacatgcttctgttcatggtgttggcacggtagatctgaagtttacttcgggaaagatcgtgcagctgaagaacgtgcagcatgtcccttctatcgacaggaatcttgttagtggctcccgtctgactagagacggatttaagttggtttttgagtctaataaagtagtcgtgtctaaacatggatattttattggtaaaggttatgagtgcggaggcctgttccgcttttccctttctgatttctgcaataagtctgtgaaccatatttgtggcagtgtggatgatgaggctaatgtttggcattcacgtttatgtcatattaattttggcttgatgtctcggctttccagtatgtgtttaattcctaagttttccattgtcaaaggttctaagtgccatagttgtgtgcaatcgaagcaacctcgcaagcctcacaaggctgccgaggagagaaacttggcaccactagaactcctacattcagatctttgtgaaatgaatggggtgttgacgaagggtggaaaacgatatttcatgacattgattgatgatgctactagattttgctatgtgtacttgttgaaaacgaaagacgaggctctagactattttaaaatttataaggcagaagttgaaaatcaacttgacagaaagataaaaaggcttaggtctgatcgtggtggagagtttttctcgaacgagtttaacttattctgtgaggaacatggcatcatacatgagaggacgcctccctattctcccgagtctaatgggattgctgaaaggaagaaccgcacactgactgacttggtgaatgccatgttggacaccgcgggactgcctaaggcatggtggggggaggcattgttgacctcaaatcatgtgttaaacagagttcctaacagaaataaggacaaaacaccatatgagatatgaattggtagaaaaccatcactttcttatttgcgcacatgggggtgcttggcgaaagtcaatgtaccaataacgaagaagcgcaaacttggacctaagactgtggactgtgtttttctgggatatgctcatcatagcattgcctatagatttttaatagttaaatccgaggtaccagacatgcatgttggtacaattatggagtctcgtgatgctaccttctttgagagctttttcccaatgaaggatacacatagtggttcgaaccaaccctctgaaataattcccagttcaatcacaccaccagaacaaactgaacatacacatgaacttgtctctgaggaggatgtcagtgaagctcctcgaaggagtaagagacaaaggacggctaagtcttttggtgatgatttcactgtgtacctcgtggatgacactcctaagtcaatttcagaagcatatgcatctcctgatgcagactactggaaggaggctgtccgtagtgaaatggattccattatcgctaacgggacttgggaggtgacagagcgaccctatgggtgtaaacctgtggggtgcaagtgggtgttcaagaagaagcttaggcctgacggtactattgaaaagtacaaggctcggcttgttgctaagggctatactcagaaagaaggcgaagatttctttgacacttactcacctgttgctagattgaccacaattcgtgtgctactttccctagcagcctcacatggtcttctcgttcatcaaatggacgttaagacagcttttcttaatggagagctggatgaggagatctatatggatcaacctgatgggtttgtagttgaaggtcaagaaggcaaagtgtgcaaattgttgaagtctttgtatggtctgaaacaagctcctaagcaatggcatgagaaatttgacaaaacattgacatctgcaggctttgcagtcaatgaggcagataaatgtgtgtactatcgccatggtgggggtgagggagttattttgtgcttgtatgttgacgacatactgatatttgggacaaaccttgaggtgataaatgaggttaaatcattcttgtctcagaattttgatatgaaagatttgggagtagctgatgttatcttaaacattaagctaattagaggtgagaatgggattacactcttgcaatcccattatgtggagaagatcttgaatcgctttggctacattgatagtaagccttctccaacaccttatgatcctagcttgttgcttcgcaagaacaagagaattgctaggaatcaactggaatactcccaaatcattggctcgttgatgtacctggctagtgcaactaggcctgatatctcctttgctgtgagcaagttgagccgatttacctctaatccgggagatgatcactggcgtgcgcttgagcgagtaatgcgctatctgaaaggtactgtggaattggggcttcactatactgggtatcctgcggtactggagggttatagtgattctaactggatctctgatgtggatgagatcaaagccactagtggatatgttttcacactgggtggtggtgctgtttcatggaggtcttgcaaacagacaattttgacgaggtcaaccatggaagcagagctaacggcactggatactgctactgttgaggcagaatggctgcgtgatctattaatggatctgcctgttgttgaaaaaccggtgccggctatccttatgaactgtgacaatcaaacagtaattgtcaaagtgaatagttctaaggataatatgaaatcgtctagacatgtgaaaagacgattgaagtctgtcaggaaattaagaaactccggagttataacgttggattacatccaaacagcgagaaacctggcagatcccttcatgaagggactatcacgaaatgtgatagacaatgcatcgaaggagatgggtttgagacccatgtgagttatactatggtggtaacccagtctatgtgatcggagatcccgtgaattagatcctgggaagaacaaaccattaataaactagaggagagtaccaatatatataccctctccaagtgaagatgcatatactctcatgagctgcaaggcaggttggctatgccttaatgagttctgttggctttaattagcaaagatgttgtcctgcagagcattcttgaaagaactcacctttgtgagcttgactgttggtcgcagtctatgaagattttgggtgaatcttctaggaagcttactaaagacctaggagtatgacttatacgctccacccgaggggtagtctacagacggtctagtaccagataagactttgagtgaaacttgcttgcacaagacttgcaattcaaggcgtagtccattgttcaagttgtgagtaagtgtagcttggagttctaggtggatgttcaaccttaattggtctccatcgaatcgctggtatataaacagtacattggaaaaggcaaatctcagtgggattttgagatttggtgggggattgttggaattaatgaatgggccttagcccactcgaagattaattctttggaaaatcacaaaagcccacctcatgggatgtcatgcatgtggagtttagtaccaccttgcttattctatgagagggggacctccttaaaagggatgatgccctcctagtcgcttgaagcatgtgtggtggagagaagaggggaaacacacgcgcgcgctcgcctagcctcgcctcgcctggcagggcaggcagcgcgcgtgcacgacgtacgcgtcgaatggtccgaaaaattggctcctcacccttgcgcagatgcagcctccttttgcagttttgttttgttgcaaattcggattcgtttttgttttggaaacgttccgaaaaatccggtgcgtgcaaacggcgtggagtccggataagttacgcgcgacttatccggttcggttacgcgcagtagagatcgtgcgggcgccctgatcaagcgacccttctctatataaaccgacccgccgtctagggtttgcctcctactctgtactgcgccgtcgctcgtagagtactccatcccgctcgccggcgtgcaccagcgatcgggagagcaggtctccggaacctctgcctttgacgtcctgcaccgggagaaggcggcaataaggtttttgggaagcgcttcgcgcgactgctccctgttcgttcgcgacggctcgccttcctcttcgctcgcgtgtttcgtgccttcgtagacacatgcgaaaagtttcgaccaagcagccggtcttttcgtcacctcggtacgtgttcaatatgttgcgcatatttgatctgttcatgttattctgcgtagtttacatgtgtagatctaatgatgcgttcatgctagttttcatctgtaatgtcatgatttatttatggaataaattaaatcattatatgcccataatctcaacagtgagcatctgctggtcagtgatgctacattttgaggcatcaactcatctcctatatggctgtttccctagtcaacaatgcacgcaaggaacaaacattacatgctagaagtgttgcaaacttgcaatctagcaagtagcaacaccaggtttcaggttaggcaaccatgtctgcttcgctgacttctgagtgaatcacaaaacttgggaataccatggtgaggtccctaaagaatatcaccaaccaataataattagttaatgcgcaatacatatgacaaaaacatgactatagtcaattgtgattgtgaagcccattatcatcctttttttcccccaatcgctatcattgacaagcgtctgattctacgttttggcactgacgagtgcaagttctaagaaatattgttgagtataattgctagtgtgactccaagtaaaaacattctacatagcagagcaactctattcatggtggtagtaaatttgtgcatagcacttacttgaggtatgggagggtcatattcctcagcacatatggattatttttgacaaactcattccactcctcctggtctattctctcatcgccttttgtgtcagcctggtcaaatgtctgtttttgttttttttttgtttttaaaaagacttagaacaatacagaaggacatatttacttggtgttctagggagttaggacccataccctatcaacaatcatctcgacagcatcacttgtaatattcaaatctgattcatccagaagagccaacaccatctcctttaactacaaaaaaaaataaagaatagcaaagagaaaataaaatcagcagagttagcatgatttcattgctatagacgaggggagaaatgattaaataccaaaatagaaccaaagtttacacaacaactcttagaaatacaaacaagcataacttctctcatgcaattacaaacatgttatgtagctgcccaatctgttaatttgtttcactaagatgataattttctaggtaatatctatacctgacaatatagatatctgactgtgattcagtaaaaaaaagtgctactgagcattaaaaagtatatcaaacggtgctcaaatcaattttctggaactaaaagaagagaaaagtaacacttacctcatgcctttcaataaaccctgtctgtcttaggtcatataacttaaatgcaactgcaataagaagttataacattaattagtgaaagcaaatgttcaaatctaaacatctatattcttatgcccgacatgtttttggtaagaataaacaattgactgaagagtccttacatccagctttctgttcctcaggtgcatctggatgaaacacactaagagatcgaacaaattcatcaaattcgatgacaccatttcctttttgatcaaacaaatcaaagacctgcgattattttcaaacacataaatatttactgataatactgaatgccaatacattcaaaattacccttttttaaaccggaagcctgtcatgtaaaatctattctatttgttagtttttaaatgttgctctaatgcgcaagagagaaattacactgcttcaggccacttatatggattcacctttaggaaggataacatatgagtgttgatggtggatgactaaaaacaatgagcacaagaatgtaaagtgggaatcttttctacgatttatataatgatatgcagttctcttgcatactattgtgaagtagaaagaatgtggactgcaaacatcatttggacatattaattcaaaaagaatatggagaataaatattattatttttaatataaactgttagcactgaagaacagaggaatcatcaagaaaacctatacaatgacaatttggaacatattaacactcttaagtcttaccctatcaacgaagagatttgtcttcttgttcctaaagagagcaagatggaattcttcctggataagaaa

SEQ ID NO: 7925 - DNA, 8148 bp, Oryza sativa
catgctggcgccctcctcctgccccgtcggttcacgtgtgccacggtggcaggaggatggtgccccaccctggcgccccaaaaagaacagtttctgggataagttttttcagggatctatttgtgaaataagttttttaaaatgaccaaaatgtgaaaaatccagcgacaagtgataactggcaaaaccagtgaaattttagagaagttctgtcaaaatcttgaattctagtttgattttttctttcattggtcggattatcaggcagccttaaacccttgtttgatgcttaggaatagtttctaccagctacaactattcttaccagcgtcaacttcccctgcaatccgtccaaattctaatcttaagattttgggtgcattagcttaccggccatacttagccaacatatatcaataaaagttgtcgtaattgtctaagttgagacgaccaaatccattctgacacatttagatcttaggttcagtttgggagagcttctagcagctacagcttctcacgtaatctttagcttctcccaacaatctagattatcagttatcacccgtattttaaaaaaaccaacttctacaaattctcgaaagctggctaccaaccaacaaattctcgtaatcttaaaactctccgaacatagccttaggaaatctcatcataccttttaaagtaattgacatatgggatctaatttgttaaaaaaaatcctaccaatattatggtaccaactaaacagctaccaagttgatcaaacttgtagcaaaagagtgacgggcaaccaaacacccctagggctgtgttcacacataggtgttcccatcctgaacagtgattacggaaaatggagcggtctattagcgtttgattaattaagtattagctaattttttttcaaaaatagattaatttgatttttttaagcaactttcgtatagaaactttttacaaaaaaacgcaccgtttaacaatttgaaaagcgtgcacgcggaagaggggatagcgaacagagcctagcatctacataatccaaaaactaagccaaaagctagagttatccgacttattcagattctcatcagctgattatagctgaattctttgtaatctcgccagcaaaataaccaatggacatatctcaaattatctagctcccaaagcggctcgagttcgataactgtttattcaaaaatccacgtcgatcaggaaaggatctatcaagaaatagcagagagagagagggggcagcggaactaaataaactagttgtgacttgtgaccactcttttctattaatgtaaacagaaaattttataagagtttgaaagggtcaattagccctagagggggggtgaataggctaatttaaaactttatgtgaaagctaaaactgaaataaggtcggaaagtctgatccacagtcagactatccgaaaatatcagatagtctgaagttggatcagactgtctgatccaccaatgaagcacaactagatctatcacacaaacaagagtaaagcacaaacagcgactagatctatagcgacacaattaagcaaagctaaaaggaggatgaaggaagattaccaatgatgttcacgaagttgttcccggagttcaaatccttgaggggattctactctccgttgaggagctcactaagagccgggtctttgctaaccctttcctcaagaggttgcactaagcactcctccttccactaaggggtatctttttccttgcggaggcgagatccggccttcacaaacttctctcggccaaccacacgtagatcggtggctcgggagtgacacctagccgtctaggagtcctcaacctccaagagtaacaaacaccacacaactcttggtcaaaccctagtgctcaagatcgagtgaaacacacactaggccctcaaacaccaaatccacaaccaccaagatacaccacacaaagaacaaggagggatttgagagagggagagagctcaaagatccaaagcaccttagcaccaagctcaacccaaagtgaatgagaatgaaatgagttgggtaaccctagaaaagggttaggtggggggtatttatagacccccccccccaaaaaaatgtggccgttggagggaaatctttcagcccacgtcagatagtccgatacaagatcggatagtccgatattttaaacctccaaggcaacgagaaacagaaaacgaagttccatgaaatttcgaactttccgagacatcggactatctgatgttaaatcggagtatctgatattttagaagcaaaaacttcgtcctcaaacagagaatcaagttctatgaaatttcggagtctctgtatcatcggactatctgatccgacatcggatactccgatacttagaaaaactcactcgataggatttttttaaatcaagacagagagtgaagttctgtgaaaaatcggatagtccgatacatcggatagtctgatttcaaatcggatagtctgatgttgctcaagtaaaactgcaataactttttactccgaactccgatttcgaagatcttggagtctatggaaagctagtttcgtgggctatcaaacccaacataaaacatggtccaaaacctttaagagatgttgaaaaacttgcaaagaaacccggtgtaagtgttgtgacaagtgaaacaactcgggattgaaattttgacttaggtttttcaactcacacaaagatgaaccattttgagcactagtattctaccaataatatgcatgtggtttccctcttaatagtacgacattcctacgacacaatgtaaggtaaaagatacaatataccatttgatcattgccacattgcatcgtgatgtcgcattcatggggtatgcatctcattacaacatgtcgaggacataacaaccttcacatttgcttgaataaaagtgttagtcctctctaatcgcattgtaatcaatcatcaaaatcattagggacctagatgcactttcaatctccccctttttagtgattgatgacaatacgattagatcacaagagagaatgaatataatagatgattttggtgcaaagatttagtaaaagctccccctaaaagtgtgcattaaagcaagtagagagctccccctaaatctttgcatccacattgaagctcacaagacaacaaatatatcacattacataccaagcattcataattaaacaataatgtcttacaaagcattaaactaacttaagaaacacacatctctcatacaaataaaaaccactcatgatcgaccataataaataaaaggatagatcttctccccctttggcatctaagcaccgaaaagggaggatttttgccggaattttgatgaaaacattttgcaaacttttggaaatgaattttttaagggaattgcaccgggaattttgaagagattcaatttttcacaaacttttgatgggagttggagagaaaggaatggccgaacattctggccccatttgagttcatggctagcacacaatcaaccacacaaaacaatagccacaagtcaaatggatgatccaaaaatcaaatgagagtgaattatcatgagacaagatgattcaccctcgagagagggaatgtacgaatctatagcaaattgtgcaaggaccaaaattcattagagaatgagatccccgtacacatagattcaagctatccactcagattatgactagtgttcattcatgaattgaatgttcactttgtcatgatgtggcatgcaatcctattctagtaattgaaaacaaatgcatgcaaaagatcaagccacattccgagaatccaagatatttagttcacttctcaactcacaaaacctagcttcatctagaggcttggtgaagatatccgccaattgtttgtcgattctcacatgttggatgtctatgtcgcctcttgtggaatgatctctcaagaaatggtggcgaatatctatatgtttggttcgggaatgttggacgggattattggctatcttaatggcactctcattgtcacataggagtgggattttggacacattgaggccatagtctctcaaggtttgcttcatccaaataagttgagcacaacaactccccgtcgaaatgtattccgcttcggcggtggatagggcgacggagttttgcttcttggaagaccaagaaacaagggacctacccaagaattggcaagtacccgatgtgcttttcctatccactttgcacccggcataatccgcatcggcataaccaatgagatcaaacctcgctcccttaggataccaaagaccaagattaggtgtgtgcactaaatatctaagaattctcttcacggccacaaggtgacactccttcggagcggcttgaaatcttgcacacatgcacacactaagcataatatcaggcctagatgcacaaaggtaaaggagtgagccaatgatggaacggtataccttttggtcgacgtctttaccttgctcgttgaggtcgaggtggccatttgatggcatgggagtgtggattggcttcgcattctccattccaaacttcttgagcatgtcctttaaatactttgtttggcaaatgaaagttccttccttgagttgcttgatttgaaggccgaggaagaacttcaattcacccatcatggacatctcaaaacgcttggtcatcatcctactaaactcttcactaaaagacttgttagtagaaccaaatataatgtcatcgacatatatttggcagacaaaaatatcattatcatgtcttttagtaaaaagagttgaatcggctttcccgatctcaaagccgtttttcacaagaaaatttcgaagacactcataccaagctctaggggcttgcttaagctcgtagagtgccttgtggagcttgtacacgtggttgggatattttggatccttgaagcccggtggttgctccacgtataccaactcgttgataagcccgttgaggaaggcgcttttgacatccatttgatatagcttaaaattgaggttagtagcaaaagtaagcaatatgcgaattgactcaagtctagctaccggcgcaaaagtttcaccgaaatctaatccttcgatttgggtgaacccttgcgccactaacctcgctttgttccttatcacgaccccggcctcgtcttgcttgttgcgaaagatccactttgtgccaatcacattttgccgagatcgctccaccaaagtccacacttcattcctggtgaaattgttcaactcctcttgcatcgccatcacccaatccggatcattaagagcttcttccacccttagaggttcaagagaagacacaaacgagtaatgctcacaaaaatttgcaatatgagaacgagtggatactcccttgttgatgtctcctaagatgttgtcggtggggtgatctcgttggatactttggtggattcttgggtgagctagatttattgaagagggtggcacttgctcgccttcttcaccttgatccaagcttgaagtagagggatcattggcttgggtcgatgtaggtggctccacttgtgttgaggaagaggccccttgttgtggctccctaggacgtacgtctccaagagccaaccttttgattgcttctctagggtcctcctcttcacctaacacatgtgagtcaacttgctctacttgagagccgttagtttcgtcaaatgtcacatcaggcgcgatctcaacaataccggaggttttgttgaaaacgcggtatgcgcactcatttgacccatatccaagcaagaaccccccatccactttaggagcaaactttgaggatctagccttcttattaagaatgtagcacttactaccgaaaacacgaaagtaagagacatttggtttgttaccggtaagaagctcatagggagtcttcttaagaaggcggtgaagatagaggcggttgatgtcgtgacatacggtgttgacggcttcggcccaaaagcggtccgatgtcttgtattcgtccaacattgtcctcgcaatctcgatgagagtccgattcttcctctcggctactccattttgttgaggtgagtatggagccgagaactcatgcttgatgccttcttcatcaaggaaactctcgatgcacgtgttcttgaattccttgacgttgtcgcttcgaatgttcttgatcttgaggtcgaactcgttttgggctcttcttgcaaacttcttgaagatggcttgtgtctcactcttgtcatgcaagaagaacacccacgtgaagcatgaaaagtcatcaacaataacaagaccatatttgttacctccaatgcttagataagcaattggcccgaagaggtccatgtgaagaagctccaacggtcttgtagtagtcattacgttcttgactgggtgatgtgctccaatttgtttcccggcttgacatgcactacacaccctatctttctcaaattgaatatttgttagtccaaggatgtgtcgtgctttagaagtttgtgaagattcctcataccaacatgggctagcctccgatgccaaagccatcccatgttggacttagccactaagcatgtgtcatgtttggctttagttgaggaaaaatccacaagataaaactttcccttgagaacacccttaaagactaccgagaaatcatcccttctaaatatggtcacatcaacatcggtaaaaagacaattgaatcccatggaacataattgagaaacggacaatagattgtaatttagagattttaccaagagggcgttggaaatggaaaggtcatttgaaattgcaatcttacccaatccaattacctttccctttccatcgtccccaaagatgatgttctcttgagaagtgccatttggatcaagagatgaaaacattgattcttctccggtcatatgattagtacaaccactatcaatcacccaacttcttccaccggagacatattcctacaagagatcaatttctagttttaggtacccatacttgcttgggtcctctcatgttagtaacaagtgccttaggcacccaaagcactctcttgatagaaatatttttaccccttgggccaacatacttagcaacaacgcgaccactagcgttcttcctaagaacataagatgcatcaaaacaatgagaagcattatcattaggaaggatacatttggccttaacaaagttgctaagacattggggcttcttgatcatcacactcttgtccacccttcctttaggtggaggaacatacccaagaccttcatggttgaagttgtccctttgatagcctaggtactcctttagggccttactacccatatggcacttaagtaagccattatgaaggagtcccataagcttctcgttttgcttttgcaaagcactcaaagaagtagagttagtagcacaagtttcaatatcaatatctttgcacctcacacatggttcattgcttgggacaattttggagcacgatgcctcgctagggaaagagacactattctttaaggtttcgaacttctcttcaagagagaggtaagctttgtccaagtcatccactctctcttgaagttgagcgttcgccacctcaagattagcatgagactctttggtttgcttgtaaagccgtaccaaagcctcatttttctctctctccttagcaagttcactcttgagttcatgagaccgctctttctcacgaatgagcaattcctcttgcctctcaagagttgcatattgattctcaattctcctaagcaactcactcaagtgtggtatggattccttggctatggatttgaacaactcgtcatccataacctcatcctcaacatcttcctccaaatcactaacaagatcaacattaaatgacttgaggggagagggtaccttaggctcctttgccatgaggcaaatgggagcatcctcatcacttgagtagttgaagagtctcggtggtgatgaaggcttgacggcgaacgtggcaactccttcttcatcacttgagcttgactcggagtcggagccgaagatcatcccaaggtgagcttggccatagcgatcatgcttgctatgcttgtgcttctccttcttct

SEQ ID NO: 7926 - DNA, 94612 bp, Oryza sativa
tcacatcctccaccgtaggcggggagtccggtggcgtccgccggcgccacggtagtagtgacgtcgtcggcgcgagtaagcaagagcgaatgcggcggtctctgcggctgaggccggcgagcttcaaggataagccggtgcccacgccgccagaaggagcagaagcagccatggccatgggaagaacgccgccgccgccgcaggccggcgtctccggcgtgtcgggtcgtcgtcgaggagaatgtgatcaaaggtgttcgtcccgtcgccgccgagtggccatggcgcgcgcgggaatctgatggtttaaatatgttcctttactcaaatatattcttgtctcgcatctccaacttagatatattccatctgaatcacactgtctctgttgttattcggggaaaatctatagttcaaaccacaaatatgatgtaaatcgtaaaacttttactctcgctaaaacttaagtatcagagtagtaaatattttactttggatgatatgaacaaatcttagatgtcactttttcatcatatgtagagcctgtttactttgatgaaaaaaaaaaaccttaccaaattttggcgttgccaaaattaccaaaatttggcaggatttcttatatagttatcaaaatttggtagcaaactaaatatagctatttttttggcaactttaccaaaatctggtaaggttgaaaatggcatcaaaagtgaataggcccgtagtttctaggtttgtactctatattttcctctatttttcaacaacatgcctttatattctatcacacccatccctagaatacattatttttagctatgcacctacacatagaggtagagactagagagtggtctaaattatgaaatataaaactaaaacaatgggtatctttaaattttatctaattatgttacggcacataattagtttgttggtatttattttatgaaaaaaattaagttacttacatttttcactgcttcgaggtacaaaaactatccttccacaggtcattcaaaggaattcggatcaggtgcagttgcagtagtaactgcaacttagcaactgcacgcaacatcggccatccatttttgcgatcaatggtcttgattcgtagctacagtaaccatgtgaacagtaattcgtgctacagtgtttactgctacagtagtgtgaacagtcaatacgtgatctaggccgtccagcttgtatccaacgatgcgtactgctactgcttagggtgcagtcactgactgcacctgatccatatcccattcaaagatgataaaattatccttaccagtgtgtacggacggccctgttcgtttcttctaaaagtagaggatgaaaatttggattttcgtggcacgctttttaaatcgttaaacgatacgtttcgtgtgaaaattttcaatatgaaagttgctctaaaatatcatattaatctatttttcaagtttgtaataattaaaacttaatcaatcatacgttaatatcactttgttttacgtaaaaaaaaaacttaatcttcatcttcatcttcatcttcgttttatgtatgatttttgattatgtgcaaatttcaaaaatcaaacgttggtgtggctaaagaaataagaacaggtgcgtggcaaaacaaattggtgacttttgacttttaagagacgatgtgataacattcatcgaaaggactggaattacattgagtacaaaaaagaaacaggattaattttgaaaaagaaaagcagacagggcttgcagactgcaattacacctcatgccaccacacttgcgtggtgacatccaaactggaaaacaatctctaaattacaacggtgaccaaaagcaaaggaaatatattgatgcaaattaaaccgaacccgctttcatatgctagatcttcttgttaaccacacggcagttcttgcggatttctccgtcgtaaccagtgaggggattgatgttccccatcttggttatcgagttcacgtagtgctcgaagaacagcggttcgttttctgcatagcttctgacgagacccgcgatctgcgggtctcgtcctgtccacagaacttcatttgaattgaggagccctcttccctcgatcagcagcttgtaataggtgttgtcgaatttcgaaggggtagcaaactccagtgggcgtaagttgttgtcaccgccgttgcgtgggcatgttgaggccagtgtggagtagaacattctctctagcgttttgtcaggctggttgtctctgtgctggttgtagagcctctgcttgaagctcacacatctggccattccaatggtgtggcttcctgtcaatgcagaaaaatgtatgtatttgtttggtgagaaaaatattattagttgtttcaattatgttaatgcaggaggatggtttggattagcattttaattatcccagtatgactagagctacactatccttatatttgttgttcacttaattttctggcaaatttcattgctagttatgctttgtttcagtgtttttctcatcttttctaggttcttgcagtactttgaaagattaaacatgtgacaagaaactgatgtggagaacatgtacaaacaaatctattttattccgccggatttttttttactacattaccttaaaaaaaatctagtttcaacactgaagaggtggaattaattcaatacctgacagtgccacaaggtccaccttatccagtccttgcctttcaaagaatttcacaagacgatgcagtgtcgcatttggtggaggaaggttcttgtttgctaatttcatatatgctgcctttgaatccttccttcctagtggaagttcccagtatgggccaccgctctgtcatgagataaaaaccattaaatttcatcatgcttgtggtagataattttaaactgaggttagaaacattatttttacttgaaatgccagtgttatatatacatctacatccaaacaagatgaaccaaagtattgtagttgctttcaaaaattctcttattgtgttctcttgaaaaagaatgaagtctatattttaaacagatgaatgaagtttttttttttaattttaagagcagagatgtttaccagaactgttgaacctctcgcagctagggcaatggtgtcagcacaagagactgtgtgtggacaagcttcttcaagtgcagccttgatctcgtctataacttcaaatcctctaatagaatttttgttaggaatagcctttttctcgctcacgaattcttcactgtcatccaacaaaaccgacgcgtcgcatccctgaaatttcatcgagacgatcaaaaccacttctcatttatatcaatgagtgaacactgaaaattgtgtttccttctagaaattttgtgttcttttagaacaaggaggacacttgaaaatgtgctaacctgaacaaagcagtcatggaacaggagcctgagaagagaagcagcaatcctctgctccttggcaatagccttctttaggacagagaccacaatctcatcagcttgtgggcatgtagccttatagtaatctggagaaagaactggctttggtgggctctgcacaactgggtgaagatcctcatggtgagcagggaaagcaagagctacagtgaagcacagagaagcagtgaaaattgcagaaagaacagtcttggatgaagccatgatagcttctggagagtgagatgctgtgaatctgtggtttgattagttctcgcaatttcacttcgtatttatagaactcaagaactctcaaaatgttatagaactcatgttgtttcagctgcaacattccatttcatccactccactagctaagttgtggtaagaaaaaggaacatgcatggagttgctttgggtgtacctgatattctctactgcttgatttagaggctgcttttgtcttgtgtatcagttaccactatctgatgtctcataatgccttgccatgctaaactgacctgcctaaacccttttggtctcttattattggttccacttcaagaacaatgagaattttataatcgggctatatatatgtctttcttgtgtaaggcactacacataattgaggttttcactgctatggttttgcatttttggtgttctaataatacatgttgggaacagaaagtgttggcatttgttcaacctacttctctaaaataatccctggtaatataaatcgaaaatgttggaattagctgtagctactccaaatacatcgatccttgtaacacaactgagagagcttgagaagaaagcacatctacactttagtactaagtagtgtattaggacagctttggtaactaggaatttttaactgtttcatttcgtgtatatttatgcatgcatgacagagcaaaaagtttaaaatctcacgagaccctaatatatacactgaccaaatttagtgagaatttcgacacataacacattagttatccaacaaatgtaattattcagaaatgtaacatatatttcctttgaaagatccttgaccttatacaaacaatgcaagttaaagtcttgcactttaaagcccatgttaaccacaagagcactgctcccgtcctgcattttgtaccgcatggtacatgtacagcgtggtaccaaaacccatccagccgttgattttacgggggtaggataggaacaggcaaagaagcaaggcaccgctccatcctttgattttgcgcgacttctctcccgaatcagacgtgagacccgctgaccagacatcataaaccctagccgccgaacaaatgtccaccttctaaatcgcgccccaaatctcgccgacgtcgccgcccgaaatcacatcgccgccggaagcatctgccgccccaaatcacatcgccaccggaagcatctgccgccccaaatcacatcgccgccggaagcatctgccgccccaaatcacattgccggaagcaactgcggccgtagcagttgccgtcgtctgagtcgctgaagcagccaccattccccttaagcggtgtacatcgccggcggagaagcccttgcgatgcggcggctcaattaggactaattgctagggttaccccttcactccagcactcatcgatccagatattgtgaaaagacatcagtgctcttgcaccaaacgttttcaggtggtactgcgcaaaggatgcaaatggtaccgcgtggtaccgtgaattcctaaccgttagatctgtgcaaatcaacggcgcaaattttgtaccttgttggtaccgcgcggtacctcaggggtgtgctggacgataaaattcctataaccacaaggaaagtaagttcagacttgcagttgtgctgatcagtattcagtggtagagactagagaccactgtaaaactattcaaatccagtattttcaagggttgaatactactacctccgtttctaaattcttgtctttgactattactattccacttaaccgttaacacctcctaaatggttaaattacgatgaacgaaagattaattcttatataagttagaatcctacacatactttgataacacggtatcttttctttgggaaaaaaaaagacgagtggcaagttaaaatgtgaatagtgcatggtgacaactgacaagtttttaaggaacggagggagtataatacagtaaactctcatatggcaatacaggagctatagacagatctcgctgtctgaactgtgcgagactgtgtctgttaacagtagccatcacctggtcggtgctgaatatgcatcaatgaacagttaccactgttaatctgtttcggacgcctgggtagttggatcaatgaactataaacaaaatatactctgaatccctgaactttaactttcggccaaatgcaacatgttgctctgtccgggtttcagaatttttcagacctaagcttagagtgcaattcagtgcattggcgagccttggaatgcaaccattttggaaccccacaggtatggtcactcgctgtctcgtacagtgacgcgatgaatgacgattcccaattgcacggcctaataattaatcgatgaattaacctacttaataaactagtaattaactagccagcttctggagacaaattagaaatagctgcgcacgtacatgatcatgtgcgagtttcgttgctgtcttagcacgcaaatgcccggccttccaatcttatggagatcatgcataacacgaccggttatctgcccggccggggtgaagcagagtaatcacgtgttcataagcgtgcagccccatcgtttcgcttattacagcatatttacaaacgaaaagtagtttgtaaataaaacttttatatgcgtgttgttagcgatctaaaagcaaaggctgaaaaataaacttcgataaaaaatcctaaaattaacttcaaatttaaggttgaaaatttaaattttgactgataaacataagtataagcgaaaagataagaccaatggtttattgggtttatgcaggggcggatatagaattctagtagaaaggacttatgtcctttctcctcaagctctctcatactcttccttaattttctccctcttcttccctctctagtctctcttatctccttctctcaatggtgatccaccggggtagggggacttgagtatccaacacccacgctggatccgtctctagatatgtgagtatgttacctcgtatcaatcagaaatatgcttacatgtattaattgtgtgtagacaaaagagaaactgtagttcagtactcccttgtgctttccataaaattagcctattgttcgtgcgttgttataaaattttaattaataaaaattatcgctaatatgttattattgctattttctttatatatgcatcatctcttaatttgcaggcggcgctttataaaatttggagatttttttaccagctttaggtagtgattaatggcgcgtcggaaaatatggctacggctgcatgccggccgggcggcaagtggttcttggccgaccagtcggcgcaatcaattcaaatgtaggacttgacgtgagaaaaatactatatagagaaacataagagaaagtttaatactatagccaactaccactccaaattatttatagtcaatataatgaccaattcatacaatagttgcttactacactattaatatcttgtcccatctatcatacacacattacgtcttgaaacccgtgctgcagctggctacatatctacagcccgctgctcttctctctcttcttttatctctttaaaatatatttatagctagcttatagcctgctattatatatgctccaatgcactcaaactttcgacacaacagtatactagttaggcccacacactgctgccgctagctgcaagcatatgctacacgtaagcacgttacgtgcatgtccaattaagtgataattaggacatgcattcacgatcaggggtggatataagagggctcaagctggcctctactactgacacgaggatcatgcaagcttcccttacaaagatgggaagatgagcttgtagcttaattttttctagtttgttaagtctggattcatcactgttcaagataaaatgactagaacaatgttggcagaatattaaatgagttatcacatagaataattctccacaacatcaagacataatgagaaaggagtagcattaaatttgaatatgaatcaatagtgtttgcattagaaaaaaatagtatccagtactgattcataatgtggatatggaaatcatggctactttcttttattgcggtggcccttagctacttcctccatgcccatttaattgtcacatttgcaaataactccaagatctatgcaagaaacccttcttctttccaaaactaattctcatcgatcaacatgctgtgttaggcatacatgatacatgtacatgtggatatgcaaaagtgcaattgcatacatgggagacatgcaacgatgtcatttactcatgcacagataaacgaacatatgtataacgatgtcattcacttctacgcagataaacaaataaacattataatagatgatgattaattttgaaagaccttaaaaaatttatatgataattaaatgggtatcatagagtgggcagtgtgcatgcatgcatccatcattcactagtaaaaaacaatatttccagatggcccaaaagtgatttttgtgtgcagacctccggtctgtctgtccggaagggtctacgaaaatccaattttttcacaagggtggcgcgcccgcacacaaaaatcaaattttcacgcgcgggtgcttatgttgtccacacgcgaaaacaaaaatccaaaaaaaaacccgcacccgtcggccgctcgccgcgcacccgccgccggatccgggagggcacgtccgtccaccgctgccgggctcctcccgccgacttcgtcgtgctctttccgccaccgtcgtgctcctcccaccactgctgggctcttccattgctgtcgtcgccgtgctcctcctccaccactgccgtgctcttcctcccaccgctgccatgctcctcctgccaccgcccgatccgggcgggggacggccgccgccactggatctacgcgtgggacggccctcaccactcgcctgccaccacgtgcccaccggccgactgccgcgcgcccctcaccacctttgactcccgccgccccacgccagatccaccaccgcttgctcgccaccaccagatataggcgagggagggccaccgtcgcccctcgccgccttcaacgcgtgaagcgcccgctgccgcacgcccgggagagagagagaaagagagataggagtatgaggaggagagagaggagaggagataaggaggaggtaataaggacagagagagaggaggggatgacttgaaaaaatttgaagtgctaaagagggaaagatgaggtaactcagatttctgggcggacccttaagaagcccgtctgcgaaaatatatttttccgtgcagccatttaagaggcccgtttggaaaaatgactctatttgtatatacgactcgctaagagggtcgtctgtcaaaatagattttcgcatgcgagtcttttaaggagctgtatacaaaaatatgagtcgatttttaatagacgtggacttacgatttgtctgtaatctattaatctgcttattcaggaaaacttgtgacttagcttgatatagccactatttagtcatctcaatttggcagttaactcagttagttagctagctatggcaactaacaacgtgcatgcacgtacgaggagaagttgatcagatctgatgcattgcattggcgagtagttgatcagatcaacatgcgatcgatcgatagatgatcagatgtgctatcgctgtcaaattaaagaagaagagaaattgaagggttcgcaacttcaaccgttgccatcatcacttgattgatgatcgatctatcgatatatcgatcgaggtcatagtcacatggtagtactagtggaatgaatgttagttggataggtgatctaagcatggatggttccgttaatcgtttgttgacctcacccctctcggaaagttgactagctctgatagatctctactagctagcttaattagctaggtaaacgccttagttaattacagtagtttgtgtaacacaatagcacaaaatgattactatgtgcatatgatcgccattagagcatatcctatagcaaactataagccaatttaattaaacacatgtcgaggagataaaataagagagagtagcagcgagacacatatctgatgacagctgcagcacggactctaagacaaaatatgtgtataataggtaggactatatattaatagtgtacgtaatatatgtttatatgtaattattgtatgaattgtctattaaattgactatagatgatttggagtaggttatcggctatactattaataaacttgctcttacgtggctgtaggtaggctatactattaatcgcatgcagcactaaataattaattaacaaaattaagcacttgtaaaacttttctcgtgagctagtactccatctagctagatcatgtcagaagcagagtactctagtagttatatatccaatgcagtcagttttcctctaaacggctaccgtttaacggtcttgagctttggattagcacaagctaattaactaacccaaaactttaccacgaaactgcagcttttttacaaagaaaagagaggtcgtcgcgggaagatatatcgacaacaaaaaaagatataatttggttgggtttgatacaaccgacagcaagccactggagattatgaggctttgacctaaaaagagctatagttaagctagctgaacaacacatatgtgcagatgatcacaaagttagtagctggtatagctaattagctatgtctccatgcatttctcattctttctttctttattttgagagagagtcaatcactccatcagccagtcaggtcccatataattgacacctatactaatcaaaatcaaatttgagtcaagctgttatctctagagattccatggccggtctgatgctgtgtttagttgccggctggatgcagagcaggtgaaaaaggccgtacagccagatggaagcagacgagcttgttagttggagtggggccctgtagttggtacacttgtactttggccacttatacttgatcttgcacaattatgtacttctaatttggtacactagtacccctactactggtcatttgtactagctagctagcactaccacctttgatcttgtacttatcatgattcatgattatgcacttaatttggatttctcccatgcatgatacatcatgggaatttagggcaatagggttatggggcactatggttatctatgtactccagtattagagcatcactaatatatatggcaaagtgatccatatagatgggacccacataaatagtttatccctatggtaatgtccacaatgtatagataaaaggtattattagtagaagagagaggagtagagatagataatataatttatttcatatgggtagtccatatgcatatggtatcttttgctattttttctatatgaactagttgcacaatggtaataggtggctgaatgaaatattctattgcttatggactacttttacaccatattataaaatggatagctagatgtgatttagtttgcttaattaatgtaggggatgataagaacacaaatgtactatccacatgctttcccatggctcaatgcatgtctgccacatctttcctttctcgagaatcgagttgtaagttttaacaaattgatgtgacatggataaaatgagtgtgtcagagtggttagttagttgttgcaaaaatgggaaaaaaatgattgagcaatatattggagaaagttcattttgttttctttttattttttaattgtgcatgcatgtcacccctatacttgaatattcaaatatgattgagctataagaacattttcaaaagaaaaaaaatgtatgcaatatctcgaccctttagtagaaactttttggtattggtgggattagtcccatatatagtgaacttagataaattaatgctagtattagtatataaaccaacacactgtgtaatcataacacatattgcctaattttgatgattgagagagtgtcgttgtgtgtgtgtgtgttaagaaataaaaaataaaaggggtactgtacgttcgtagtattacatttctttcggttattgagctttgatatatgctactatggttatggtcttgtttggatcctctgaactattaaatagccatccgaaatcttgatatttagaagtattaaacgtagattaccgacaaaaccgattccataacccctaggctattttgcgagacgaatctaatgatgtatattaatccatgattagattcatcacgcaaaataacctaggggttatggaatgtgttttgccaataatctacgtttaatacttctaaatagcaagattccgaagggctccggatccaaacagggtctatgtcttatgaaaaaccaacttctgagttccgaggatgaactgtaaaatcatttatctagatttatctctagaagttgtccttttttttacggagggtgtatttattttgtttttttatttgaagttggttagttaaaaaagaaattaggggggatgtttttaatatactctagcaaggacataaccaaacatggaatcgaatctacccacgcgtcgtctttgactcttttggtcgatatacatgccatgcgacttgcgagtaggtacgtacaattgtattatatgttcactgttaatggatcctgttagagtgctagtataatagtagtatgataacattgaatatgttaattatcacctgaaatctgtttctgtaaaaaataatttcactcatcactatacgtgtatattgacatttttttttggataatcaaatttgtgccagctatatatatcttctaacttaggatattctgcataaaaacatatttacatccatgcaccaaattatcaagctaaggcactcatgtttcaactttcaaattaaagcatagagctgttttgacgaaattgcacgtgtttttggatcatttgatgacctaggtaaacccgagaatcagtttgcaaaattatctttgtgatacagaggttaattcgatctgtccaaggcttctgtttctgctatcgcaatagtaagctgcagacaattaaccataatgtttctacactgtaatgaggttaacttaattacccttctattagccacagatttttctaccttttcttttgcagcgtataacgtattaacgtggcatggcaggcttgcagccagtgtcaaattaatattcattcgcacgcacgcttcagattgcgtaaaagtgctaaatattttccagaagaaacgtggaaaagacatgcacaatagctcccttcgccagcaacacacacagcacttgcaaaataaggcagctaactaaaaataaaaaccaatttctcctgcctaactttcaaaaaaaaaaaaaactgtttagccattgaattccttggaagccaagggctagtcttaacagtcaacaaagcagtgatcaacttgccttaatctgtgatcaacctcctaatcccctatcattactaagaccttagacattcttagtataacattttttaggcttccattccaagggaccttgttaaatacttgctttgtttcataatacaagttgccaaaatgtcatgtatgctagtattggggaaaacatgagtaatttatagggctttggatactaactatatcttttcttttttccttaacttaagcttgcttacaagcagatggggacggggtttggtaaaagtataatcagaaaaatacattaagcaaccctctaaccaaatcatttattagtgttcaagtcctgtatacatcggaacaggttagcataagaaaccaatgtcaaattatcttcaatccagtttgaaaaacttgtgttggttagcttctaagaaatgtgtaggacctattcaaactttggtcttctcttgcacagtaagcatgactaatacattgcaaagatcttaaaactatatactaagttataactctgtaggaaggagaggaataggatacaataaaagtatcattagccttacaacacaacagaagtcaaatgagcaggtactcttgctcatctcacttttgtctcctctaaggttttggcagtagggatgccaaatctgtagcctcctttgaggcatgtggcgtgtgtacttgccatggtaatgccctaccacatgagttgtgagtacattacaacaataattactgggaccaaaataataggtatgatacaaacaaacatgaaacctaaaggcattgatcccatcaaaacaaaatatatattgtgttcaggcttaagagataaataatcaacacaaaaactaccatacgcaaaatgaagagagagaggttaatgtagatcaccattcagattcagtagtactacacccttccaaaaatatatcatttttagctacaaactttcctcgtcatggcaaatatgaagttttttttgggacggccgtattaagatgaaagctcctagatcgatttatgtcttgatttattcatcttgtgttcattgagtcaggtacttatgatataaaatcacatagtaataatgttctttaaaaaagagcctttttctgcactacatttgcagatctacatcagaacaagggttctagagctatacacgtagcatgcatacctgtgactgtctctgtgagcctgtgactgtaacaaccgccatgctgcttccttcaagaaacggccactgatatgtgcttcacagaagaacaaggctgccggtgacaaagccttggaacagttgaagaacctgctttgtgacaagaatgtaggccatgcaagacacctaacgccgaatcatcatcacgcaccgtgtgttgagagttggtacatggcacatctcgtttgacctgatcgaccgatcccccatctccatgcatgtgttagctaggatatcagcacctgtgttgtacaacaaaatgcaccatggtactacacatcctctctccgaccattgatgagccatcagaactcccagttgatttgatcgctgcaacaacatacaaaaggtaacttagtttggcagtacaattatacaaggacaacagcatatgaaaaatgttggatattatcctttgatataacgtttctactaataagtatacggaatgtagcatcatactttaaatgagccatcaaaaatgccagtttgatcgctgcaataacatagaaaaggtaacttagtttggtggtatctacaaggacaacagaatatatgaagaaaccttagagattatactgtgatataacgtttgtagtaataaatatacggcaatgtagcatcatacttttgatccccaaagacagggatacgaatccaagtttgatgaccaccaacaatagaaaacattcatgtgaatagtccagcatacataaggtattgcattaaacaaagccgtatgatctgtagtgacacttgtgtataaccaaagtagtaggattaaaacggaagcaaaaccttacttttgtctacgcttttgtgctttgtcagtttgatttcacacatgatgtgcaaattatcatgtgttttgtgaggttaaattttggatatggtccagggaatatatatatatatatatatatatatatatatatatatatatatatatatatatatatatatatatatatacatactagtacaacctgtcaggtgtgggcctactatgaggcaaaaaggttaaagtgagaggaacgactgatatatctttgtgcatatgcattgcctcattatggtaatttaaaacaacatctctaacgttctgatacaggagggtataatataatattatataatccatcaaaggtttcgataatgagtagaaagataatgtgtagtgtacaggggcagattatgctgccttctagtttttcatagtacaagcagttatatgaatatttaattggaatgcttatttttaagtagcattttctgtttcatcagaccattttatcctctctccaactgctaagcaatattgagcttcatttttgagagattatcacttatcactccatctacacttgttgacaatgacaagcattaaatcttcaaatgactttgctaaaattaaagccccaaacaaaacaataagacgaccgaaaagccttgcaagcaagttggagttactattagctgataattgatggaattactgaagcagttgagcacaatgcgtagctagctgacttattttatacgcatcaccctaacaacccaagctgccctgccgcgtctcatctcactgtcctctgctccaaaccacccttcctacatgcacccccccacaggtgctatatatgccaccccatgcccgcctcttctcgccacccacaaccaagagaagtagaaacaaacagagagcaattctcttctcctacctagcaacctagtgcagtgcagtgcagtgcagcgaaggtttacttggcgacttccatgggttgcctgttgatgctctgcttggtttctcccctcctcctcgccacctctgtccacggcaacccgtggtatgggtatgggtatggcttgttcccgcagttctacgaccactcgtgccccaaggcgaaggagatcgtgcagtccatcgtagcacaggcggtggccagggagaccaggatggcggcatccttggtcaggctgcattttcatgactgctttgtcaaggtactgtgatttctcttctgctgtagcattctttacttgtcttcacaaagctaatggtgctcggttgacatagcacctgcagtgtagcctgcaaaaacataattcaaatgagttgtatgcttagtgcaactagaaaggcaattatatgcgtttcacttgcttttgcgatggttaaatccatatgaaggtattgcaaatagtcatcaaaaatagagaaaaaaaagacatgtatttgcagatgcaactttagctgttacataacgaaaacgcaaagtgtaggagatcaaacctttgttatatttgtacctaggtattaaaaaaggtacccttaggagcatggaagaatctatagttattaggcaaactttttaccactgataagatagcctaccaacattgcccatgcgagcactactttctgccttggtgatatgatgagtccgtaccatgatttcttgattattcactttcttttcaaagagaggatgactatttaattcaaatgcacaataattggcgctctcgatgtttcatttatcagagaccttcacccagtacaggaccctaaatcaatatatattttgctgttccgttgcatgtgcctaatctatgtactacttccatgtacctaatctatgtaccaacattgtgtaggggtgtgacgcgtctgtgctcctggacaacagcaccaccatcatcagtgagaaggggtcaaaccctaacatgaactccctcaggggtttcgaggtcgtcgacgagatcaaggccgccctcgaagcagcttgccccggcaccgtctcctgcgccgacatactcgccctcgctgcacgcgattccactgtcctcgtatgtagcagagataagctctatcagaaccacacaaaagaatatcacattcggaaatagaaggagaaatgaactgtgtattattattatttctgtatgagcttagagaaaagaaccgctcctaggatgagctcaacagtgccgtgttttgtgactgaatttgcactcaaacctgcaggttggtggcccgtactgggatgtgccacttggccggagggactcactgggtgccagcatccagggctccaacaacgacatcccagctcccaacaacaccctccccaccatcatcaccaagttcaagcgccagggccttaacatcgtcgacgtcgtagccctctcaggtgaacttcttcttaccatcttatgagtatgtgcgtccatttcttgagagagatctttcttacattgcacaaaaatgggtgcatacatacaggtggccacaccattggcatgtctcggtgcaccagcttccgtcagaggctctacaatcagagcggcaatggcatggctgactacacactggatgtgtcctacgcggcacagctgaggcagggatgcccccgttctggtggtgacaacaacctcttcccgctagactttgtcagccccgcaaagttcgacaacttctacttcaagaacatcctgtctggcaagggccttctcagctctgatcaggtcctgcttaccaagagcgctgaaacagcggcgctcgtgaaggcgtatgctgatgatgtcaacctcttcttcaagcacttcgcacagtcaatggtgaatatgggcaacatctcgcctctgactggatcacagggggagatcaggaagaactgcaggaggctcaacaactactaccactgaggttgtcttgtgtgctgagttttacaaggtggtggtagtggcatgttttgtttaaataagtaaagctggttgtaatgcgtcaaggctgtttgatcatttgtgttattgtgattgcgttgcaaaacgtgtatgtttaataattcaatatataaaatgagttcatttggttgttctagatctggttgtttgacttaccaaattctgactctcgagtccgaactcatggtacatatccacctactcttcatgagttaccctagtactccagccgtgctagctttgacatttgtcccctgtcaaaatgatatgatgtagtttgtaagaaatacctacagttactcatgtagtcatgttgtatgctgtatctcaagaaatctcccagtccctgatgtaatcatagtctaaactctaaacatgacttgaccagtccctgatgtaatcatttagtctaaactctaaacatgacctgaacaatttcataataatcaccactaaggtatacaaagtatgaaaattcaaaaggtttgcaacagtaccatggaagaagtaaaccatccaatttctagaccaagaaatcaggcaaaagtgatatatttcagtgtatttatagccgtggactattaacagtctcatctttatttggcagctacagaacaacaattttcaaggatttatggccacaatgttttttttaaaaaaaaaatgaacttaactctatgctttttgatcattaagtttcagaacacctaattctacagccctacaggtggaggtgaccaacaggtagggcaggtcagcaagccagtaaactgtgttttggttactgttgattttgtcaaccttatgagttatgaccttaaaacacagaataatgtgacactagccaaattaaatacctgccgatttctactaatatggccacaaaacatatttgtgttatttactgaaagaatgtgtctggacatcacatgagtacattctttaaaagaagttaaaaaaacatagctcctctaaaggatgcatagaaaggagtttggctgacagtagctccctttctttcgtacaatgttttttctttaatcatagaatctttgtatgccattccctaaaaaaagaatctttgtatgccatagttgtctagttgaatacacccactaatgtgaagagaggaaaccaatgtcaattaagaaggaaaagacctaaatgccaaacatatcaactgaggttactagagttgaatgcaacaagatagacactgaatttcaggatcttgaacaatgtcaccatattggacaaacatatacacaacaattgaccaacatgaatgacaaaaggaaaatacatgtacccgtatgtccaccatcagaggccttctctaactactgaagtttggaacctaaggcattcagggtgctcatccaggttgcactgctcaggctgtaaagagagacaaaaacagttagaccataaaggttagataacgagtcaaaaggacacatcatttttgttagaagagagaaatgttcctgcatgtgatagttaattccacctttatgaaccctattttgccaactgacaagacagttcagtcatgttgacaaatgttttcctcacctacagaacacaggacagaagcaggtctaagatatctcgtggtttcttaagtatgcatcaccaagcttcagttatatctaaaagaacatgatgtacttacaagttagatgacactttgtttgccaatgatgatactacaaaccagcaatactttgctaacagaatgaactagctaccaaattcaactagaattctgaatcattgcttcaattgctttgttggccttaatcagttccccttttaagcaaagtgaagcgattgctggataatatgtgtcaaagtcatcatggaaagaattccgtagcaaattatcatagtaaatatcagtatcatcacttggtgtgcataaattctcagctccatctattgtgggttgaactgtgccttcagaaattccatgaagacagttgctagaaacaccataagtagttgaacataaaacttgtccaggattatccatattacgatcataagccacaggtgtctctacgttcttcaggtgactaagcgtgctacaattattagaatctgaagaggatacagacatgagcgccacttcatttaggatagtcacgacctcatcaatcctcccttgctcacaggcagaaaatagaaggccaacaaaagattctgcttggatcttatccccaacactgtttatgaactctgcaacttctttgcactgaaacatctctctcaagatgctcctagattcttccattcttccttttgcatagagtcctttgaccaggctcatgaagccaacaaaatctggaaccatctccttatgatagtattcactaaagaagcctaatgctgattcaatgtcaccttttaggcagtgtccattaattattgcaccaattgtaatagcgtctgggaatagaaatatttcctcaaaatgtgatataagctccagtgctttctcagttaacccgtagttacaataaccacttattagcaagttgtaaacacgtgtagtgggtttgatacccttggtggacattttctgaaacaactcatgagcgtcatccaaaaaaccttctctgcacaaagcagctataagtatagagtaagttaccagtgtcggaagcacttcactgctttctaggtagtcaaatagccggaatgcttcagtaaggcatccctgctggcacaaaccattcagaacagagttatggatgacaatgtttggctgaatcccttcttctttcatgctttcgcataggtctaatgccttctcaagataaccacttttacaaaggccttccactaatatggagtacatggcaagatccactgaataaccattttgttcagcttccttcaaaaagttgcatgcatccagaattctaccttccctctttagtgtgtatacagcttctcttagaacactgacaggaacacggccattgttcatgtaattggaaaacccaatagcttcaccaacactgttcttgctgaggtggcaagatagcatattaatcattctaggttcatccaggccatgaattttaatgaactgacttaataatggctggatggtctgttcatgaccatttcggagcaagcatttgagtagcctgtagcatgttttgctagttacagtaaatgatttcattcttagaagcttgtaaacatccaatgctccttggtagcaatctcttgtgcttaagaaagcggaagcataattacatagagatgaaaataagtcaatttcagatccatccaccttaagaatgaaattcagcacgccatgttcaccgccttctttaaagtgtgtatggatcaacttcttgtaagtacaggaatcaggccttaaatttctttggataagatcattaaaaatctgctcagccatgtttacctttcctccattacacaatgctataatcaggcaattgtgtactattgtagaggagaacaagatgtcttctttgtaatcatcaaacaactgcagtgccctgtcagtttctccaagtttacacatcatgtcaataactgtatgatatgtgacaatattaggccttaatctcatctcgggcattctaagaaacaagctgcaggcatcatccaccttcttaatcataaataatgctttgataagtacattgcatgtgacaacatcaattgtaacaccgctgctctcaagcctaccttttattgccattacaccagttgcatcttctaccttaatgtgaccatgtaacagcgtgctatatgtgaagttatcagcagcaataccttcatatatttcaacagccttcttggtgtgaccaaccttacatagaccatttattactgaattgtatgttacgattccaatctttatcccctttttatccatctcttcaagcaaagagaaagccctatccaaatatccctttttgcacaaattgtcaatcaaaattgagtaaacatattcatccaccaccactcctgtctgttccagtttcctcactatagaaaaagcatcatccaacctgtttctcttgcagaaaccaccaatcaatgatgtataagtgatcaaattcggcttagcatcccttcggttcatctcatccaagaatcccatcactttttccacactacgttctctgcaaagtccatcaataacagtagtataactaactacatcagctgcaatgcccttatctaacatcacccgatgctcacggagccctttcatcaataacccgctactcatgtatccatgaaccaagctgccatataaaacagcatcaccaaccaaccccttcccttccatctcccttaccaattgtgctgcctcagtagttctccctacacggccaagcacatcgacaaaagcggttaatgtgatcaagcctggctcaaatccattgaactctctcctcaccctcctatagaattccagcccatccccagccttcccgaccttggagaagcctgaaatgatcacgctgcaaacacgatcatccacctgacaccccgctgcagccattacgtcgaacaccttgagcgcggtctccatgtcaccgcgggcacacagcatcgtcagggccacacgatacgtggacggagaaaacacgagcccgcactcctctacgccggcggagagcacctccagcgcgcggcgagcatcgccgcgcaccgcgcaggcccggcggagcagcgcgtcccagaggcggcgcgcggaggaggttgccgggccggcgagcgcgaggcgcgctgccgcgtcgcgcggacgggaagaatctagaagcgccgaggcgaccaggaggtgggtgcgcgcggtggggcgcacggagttggcgaccgcctgcgaggcgagcgcgccgacgaggcggtgcctccgccggcggaggagcgccgccagtaggatgtccacgcggcgcggcgtgacggcccttccgagcttgaccagcgacgggagcggcggtggtggtcggggctcgccgccggcgagcggcatggcggagggtggtggtggtggcgccgccgccgcgtgggaagcgaagcgcaaacgttcgaaacgttggaagccgatggcgtgggccgaatttggatacgagcttgttggatctgggcctgaatagatatgggcttgtattggttctgggcctgtttggatatgggcttatttaagtgaggcgttttttagtccgaagcgagaaggggagaagaggaagatgcagcaagcgcaggcgtcggcggtggtggccgcgccggtggcggctgcggcggcggcggcggcgggggcgacggggcaccagcactagggggcgaggggtgacgccccgccgaagcaggtggcgcaggcgatggagcggctggggcgggcggggcggctcatcgcggacatccggctgggcgcggaccgtctgctcgaggcgctcttcgtcgccggcgacgcgcccccgcacagcgccccgcagcacgttgagaagaccgcgctcgccgtcgcccaggaggaggccgccatgcaccgccacttcgacgacctccgcgcgctcgggaggtaaacccatctccgccccgtgcccccacactctccgattcagaagtttttcatcgattccttaacctttgactgttacgtcgcaaaatacaactaattccctccgagaagaaccattcccgtcatgattccacggttgcagtctcaaaatgaaaaaggaacattcccgtcatgataccacggttgcagtctcaaaatgaaaaagaaatattcccgtcatgataccacggttgcagtctcaagaagaaaaaggaaaacccttgtctagataatttctggaaattggtggctgggatattgatttaacttctttggattgtatgattggactttttttaaagtaataatctccttcccagtttaggcatggcagcacattttttttccactaaattgttctgtaataatggttaatcaccataaactgatgccacactcttctttggtgttatccaattgcttgtatcttgtgaaacccttctacctatgaaaccttgctacgagagatgcacggacaggcttaactgctcaactttggtatatgaactttagcattctagaatattggctgggtgcctgggtctatcagattgggatgcatttctggaactcgtgttccttggcttgtaatagagcaatatttaaccttaattgaacagcttcagcttgaacttgttttggggctgtttggatcagggactaaaattttagtcccggtcacatcagatgtttaacactaattagaagtattaaacgtagattaatgaaaaaatccatttcataaccttgaattaattcgcgagacaaatctattgagcctaattaatccatgattagcctatgtgatgctacagtacacatgtgctaattatggattaattaggtttaaaaaaattgtctcgcgaattagctctcatttatgcaattaattttattattagtctacgttaaatacttctaattagtatccaaacatgcgatgtgacagggactaaaatttagtccctggatccaaacaccaccttagtgccactcagggctcgaactagttttagtatcactcgtggatggtaaggatgtagggtaggtgctcactctataatattgtctcagcagagcagttatgtgttgggtacaattgtttacatgtgaccacttgaccagtcgtttgttgaagaagtctgcaggcatttggaaaatccatgtttcatggcaacatggtactattctgtctgatgaataaaatgtccaagcaatatgaactgcttgttaaacgatggtttttgagtctttctgcaacctgaagttgctagataaacggaagatgaaatttgcaggtgatatagttatgattttagacagaatagttagtttgtgaaaatcctgaagttaggagtactagataagcttaagccatgtgactgagatttttttaagtcaaaggatattaggagccatcttcaataaagttaggtatgtgaacaggatggattcactcgattttgctggtgctttcttattgttctttcacagtattcttgttatagtgtttgggttagttgtgcttgttgctattcatgatgtttttactttgtgatgaaccatcaatcattgcttacacagttctcctggtaagttccaattatttttattgaacttcaagtttcaagttccactatttcttcataagtgttggcctagccaactgaaagtaaagatctagtttttaaactgtagcctaataaatatcttgtatccattgctgttaggaaggcaattggaagagtctggagttctaaatggagcccttaaagccagaggcaattcatggggcttgcacatgccacttgtttgtccagatggtgcagttgtggcatatgcttggaagcgtcagctggctggtcaggctggtgcatcagctgttgacagaactaggtaatttcattaccatcattgttgtgttgtatgtttgctgccacaatatgatgtgcttatttgtcttatttatattctgttgatgtgtgagatttcatcaaccgtgcattgcagaatgcagattaaatatttataccatgttatttcttcctgcgatatacgataattttcttggccgataaatttgtactgttgtttccctctttcccctttaaatttgtactgttgtttccctctttcccctttttcccttatttctcctttttccctcttttgtttcttcttttgcactttgctttctctaatccttctactatgataattacattcttccaaggtgtggagtgcttttgtaggaattgaagtattagatcagttcttgttttcgttgcatccatattttattttgattttacacagaatgcatcggaaatattccaacgcccttcattcatgtgcttctttagatgtatgtacttatgttgaaggcttcaagccttcggatcatcccctagtccccatgacaagatacccgaagtttattactatttacaaaaatgggttactatactaaacttaacagctatcagccacatgcgattgtacctagtggcctggcctcaccttttttaaatttaaaatttaaaatgtatgccgctgcttaatgcacaaattatttggcttgtgaacaggcaaggacatatggaatttttattatccatttatcatgtgtttataatgttcagaggtatatcaatttcaggtttatgctaacatatagatgtttccaggttagctctcaaggccttcactgaccagaaaagaaggttctttcctcatctagatgatgaagggtttaaccatctgcatgatggtgaacctggtctcgctaaaaagccaaggctgcctgctagcaatggggagcttgaagaaagaactttatctgagatactaaagaatctagaaaatgaagttcctaacatgaaaatattcacataccggcgtctggattggtcaaaaagagctgcatcattagcaacccttatgaatgatgactttgtggatccatctaaggagctgaacctgcaaaacatgagcaaatcgggatctggtgatacaactccaatagatcaggttgcgataattgagttgctagctccttctatatttagagctatagtatcactgcatcctgcaggatctactgatcctgatgctgtggctttcttctctcctactgaggtaatcatgttttccaaaagctaacttgttaattagtggtcatggatgcacaataccttttcttaatgttgacacatgaagtgaatcttatattagggaggaagttacctacatgcaagaggcctatcggtgcatcatgtttttaagcatgtatcggtaaatgcttcttctgtgttctcttttaatattgttttcaataagagggcattacggtgtaacgaatacactgttttttattatatgtaggagcatgcagataaagcattgcaatactttgtcagtgtggaaccaactaaatcactttctctgttgctggtaagtttcaacaagaattggtaaattgttcagaatagtaatccagtttttttcaaaggttcattaaaattatttttactcatcgttatttcctttattttgaacaatcctattgcaataacgtcacattgtaatgctaattatttaacatgttaacttcttgcagcgttggattgccagctatcagactctatttacaaaagtttgcaggtacacacacatattatatatctaacagatgtctcttgtactatcgtcacaattttacattccactacataagtaacactcttcattactttgcgtgcagtaaatgcggacggcttctgctgatggacaagtctttggctctgcttttaccccctgtccagcgcccataccatcatcagacttctagtgttggttcagatcctcaggatgcctatcacattggatgttcttcctatgatgcctgactcttctaatgaactctcgacttttagctaggatgtttcaattctgaggatatattgcctgacaaacatgtgcaagactaatttgtaatggcagttctagattctttttttccatggggttcctgcagtgtagctgttaattttctacatagaaaaaggcgtggttatttgatgagttactgtagttgcagtttcatcttggtagcatgcatttcaggaacagatggtgtaaaacttggaaaggtgctttgagtcattttttgtgaatttcaattatcattttggccctctttggaatgtggcattttccttttggtaacattttgtgaattttctaccaaattccaaagcatgttcttaataagtgatgcctgccgattaggccggtcatactgctgatccatggacttgaaacttcagtactgactttaacgtattgtactcaaattgcccagtaaactagtctcttggttggaacaaagaatttaagagtattttttccttttggaagagaaaatgcatccagtttttttctacatctttcctttactatgaaacttttatggaatacatgtgcttaaatgagtcttgctggggtctggggatcatttgatctgcataattttagtcacggggacaatgaaaggctagtgacagggaaagagctgaacggcaagaatcttactccctccgatcgtaatttgttcagttcgctggtactccctaatacgggatatgtaaagattctccctccgatcgtaatttgttcagttcgctggtactccctaatacgggatatgtaaatgttcaaactaagggtgtagctatatttatggcgccatatttttcattaaaaaatagtcggcatgtatttacattgtaagtccctaaattacatatgtaattttagtgtatttacaatgtaagtatcaaaattacatatgtaagtactaaaattacatatgtaaattcgaaaattacatactaattacatatataagtggggtgtaaatgaggtgtaactactgtgcaagtggctgaaaaaaaatcgactgtagcatatggcgccatatttctagcaaatccgatgttttatctcgagatggagggaatactttttaactctaggggtaataacgacttggcattgtcattctactcatttttaaaagttcttctaatgaaaatgtggattttaacaataccaaatttttgaaaggtgaattttggtaataaattgtacaggtccttcatatttatggcaagtttccagtcatatttttaaggaagttccagtcatgtttaggctgtgttctttactcctatctttccaactttcactctctcatttttcacacgcatgtttttcaaaaagaaaaactaatttgtttttataaaaaacttatataggaaagttctaaaaaaatatattaatctgtttttttattttttactaacaactcataattaatcatatatcactccatcgctcaatgttgcactagagatgaaagattctcaacccctgcaaaaccatgcagccaggtccctgtgttctctcccacgataacttacatccttatttttcgcttgtacgctttttaaagtgctaaacggaatatttttttaagtttctataaaaaattgttttaaaaaatcataataatttatttttttaagttttctttagctaatacttaattagttatgtgttaatgcatcactccgttttatgctcgaaggaaagaggtttctaacaccacatccaatagaacaccacctccaagagaacccagcccaaaaggcctatcatccacggcccacgtagtaggacaaaagctcggaaaggcccacgtggcgcaccgcctcacgtcgccaccgtcccaccgacttgtgatttccaatccctcaaatactgtaacgccacgtcgcccaacttttagtaacggcaccaatctttcccaccccccccccccccacccccacaaacctgaaaaacgccgtcgccggctcgccgccgggatggtgttcctccgcgcgccggacggcacgacgcgccacgtcgacctcgaccccaccaccgccacgctcgccgacctcacagcctccgcctccctcgtctctacctctcccaccgccgcctcctcccggccgtgccgtcccctctcctggcgtcccttcgggtctcgccctcctcctcgctgctcgtccacctccccctcctcggaggcggcgggatggcctccccgaccgcgaccaccccctcggcgcctccgccaccaccaccgccacccgcagcttgcgccgcgcgctacgacttcctcaactccaagccgccccccaactacgtggcgagactgggacgcggcgccgccgggttcaccacccgctcggatatcgggcccgccatggggcgcggccgtgggaagccgcctggggacgacggcgacggcgatggcggtggcgacgaggaggagaaggggtacgacgagaaccagaagttcgacgagttcgagggcaacgacgccggcctcttctccaacgccggccacgacgacgacgacgacgaccgcgaggcggacgcggtctgggagggcatcgaccggaggatggactcgcgccgcaaggactggcgagaggcgcggctgaagcaggagatcgagaggtaccgcgcgtccaaccctaaaatcaccgagcaattcgccgatctgaagcggaaattggtcgatttgtcagcgcaggagtgggagagcataccggagattggggattattcgcttcgtcgcaacaagaagaggcgatttgagagctttgtcccggtgcctgacaccctgctcgagaaggcccggcaggagcaggggcatgtcaccgcattggaccccaagagccgtgcagccgccgctggcgcagagacgccatgggcgcagactccggttactgatctgacagccgtcggcgaaggccgtggcaccgtgctttctttgaagctggacaggttatccgattcggtatccggtgttactattgttgatccaaggggttacctgactaacctgaagagtatgaagattactagtgatgctgaaatttctgacataaagaaggccaggttgttgctcaagtcagtgatacagacgaacccaaagcatccaccaggatggattgctgctgctaggcttgaagaggttgccggcaagcttcaggttgctcagcagctcatccagcgtggctgcgaggagtgccccacgaatgaggatgtttggctcaaggcatgccggttggccagcccagatgaggcaaaggccgtgattgccaggggtgtgaaggaaattcccaattctgtgaagctgtggttgcaggcagcgaagttggaaactagtgacttgaataagagcagggttttgagaaaagggttggaacacattcctgattcagtcaggctgtggaaatcagtagtagagcttgcaaatgaggaggatgcaaggctgttgcttcacagggctgtggagtgctgcccattccatttggaactgtggcttgcactagcgaggctggagacgtatgaccaagcaaagaaggtacttaacaaggcaaaagaaaagctccctaaggagcctgccatctggattatggctgcaaagctggaggaagctaatggaaacaccgagtcagtaaacgaggtgattgagagaagtataaaaactttacagggaaaaggattgggtattgacagggaggcatggctaaaggaagcagaagctgctgagcatgctggatctgtgatgacttgccaggctattgtgaagaacactattggcgttggtgttgatgatgaagacagaaaacgcacatgggttgctgatgctgaggaatgcaagaagcgtggttcagttgagacagcccctgccatctatgcacatgtgctcagtgtcttcaaattcaagaagagtatttggttgaaagcggctcagcttgagaagagacatgggactgaggagtctctttatattctcctcagtaaggctacaacatacaatcgacatgcagaagtgctatggcttatgtatgcaaaggagaaatggctggctggagatgtccctgctgcccaaaccattcttcaggaagcttacgcttatcttcccaattcagaggagatctggctagctgccttcaagcttgagtttgagaacaatgaaccagagagagcaagaattcttttgtcaaaggccagggaaagaggaggcactgagagggtctggatgaaatctgccattgttgaaagggagttagggaatgtagacgaggaaagaaagctgttggaggaaggtctgaagttattcccctcattcttcaaattgtggttaatgcttgggcaaatggaagaccggcttggtcatgtagccaaggcaaaggaggctaatgagaacgcactgaaacactgcccgaactaatctagaggagaagataaatggcttgaggaagtcacgtgctgttctcaccatggcaagaaagaagaacccagctacacctgaactctggcttgcagcagttcgagctgaattgaggcataggaacaagaaggaagctgatgctttactagccaaggcattgcaggagtgcccaacaagtggtatcttgtgggctgcagctatagagatggtgccacgtccccaacgtaaagcaaagagctcggatgctataaaacgatgtgaccatgatccccatgtcattgcagccgtggctaaacttttctggcatgataggaagtttgataaagctaggagttggttgaacagagctgttactcttgctccagacattggagatttttgggccttgtactacaaattcgaactacaacatggaaacgctgatacacataaggatgttgtacaacgatgtgttgcatcagaaccaaagcatggagagagatggcaagcaatagcgaaggctgttgagaactcacacctgtcgattgaggcccttctgaagaaagctgtggtggctcttggccaggatgaaaatccaaatgctgtagatccctagtctgtatcacttttaactttaaattaaggtatttggtgcaatctgttctcagacttctctcatagagaactttgctattgtgtcctttattgccatactttatgaggtcatattgtaatgcttttcgctgtgttctattttactgttcagctataagatatacagtatttattatttaagaaatatcatgaccagtttttaagatttgacctccaagtaatttgtttgagacaagcagtgttatcatttattttgttggtatcattaagtagctctaccttaaaatctagctaggttgtgtgtcaaggtagtcggaaaactcaattataagcactacgactatgaaaatctgttgatgctgtattatgctctgtgcacaaatgcagcaaaatccatggtaattatacaattgtgtttattcttggcatggccttaaggttctgaaagaatatacttatcaccttctcatctacttaattatatttcggttgaagattgattttgttttactccttaggttgactatgttacctcaactgaagtttttggggaatgtggtgtggcaattctaggtcaaaatttgtcaatcttactacttccgtgccataatatagcaacctagtatatgttcagattcatagtattaggatatgttacatcctatactagcaagattatgggacgaagggagtaacaatgtaacattgattactgagcaatctgactaaaaactcaccagggggctgctccaaccatttgtgatttttgaatgtgcattttagccagtataatggtcaagctatctaattttgcgagaaaacagaataattatcctcttccaattctaactgttggagcagtgggttgataaaatgtctaggacaatataccactttcaggagcataatttaatttctttttgttaccaaatttatattttgtaagaaatcaagcataactatgttacctgttctgctcacaggtcttcttctgcaggtcgataaagaaatatgtagagaaagaaatacaactagacagtgaactgggatgcactcaagcaactgcttctgctacgacctcgcattctctacccaccgaactgattgctgcagtcccccaaccgtgaagcttacctgaagaagcaccaggcatgccattgctccaatgtgattggctatctctagttaatggttagcaatattcttgaactaccatgaccatgtagacaatattcttgaactaccagcaccaggtatattgtttttatgtccttaatggttagcaatattcttgaactaccatgaccatgtagacattgtccttgagatacctaccacaaattcttagcttggtgtatttgctagtcgtcactagattctcaggaatgatgcaatgtttcttggggctctatttattatctgtgcactagcgactttttctatggttataatagctctgtttgccagttagccacattgttcgtggattagtttgtgattgacgaaatacatgtttgcaagtgttctaactttatttgagattagttttctaatttaattccgtagcaaagaattgcttgcaagtaacaaattagttctaaatctgaggttcccagtacagccagttttcttatttggcaggtcattcaaaacttcttttgcaaaggcacaaacgtagtgctgatcgtttacagatataatttagataaaattagtacacatatatcgtgcatctttgtttttgttagtttatttttatgtttgttgaaaccacaccttctggccaagccttaaagagtcatatgaaggacttatcttgttgcaaaatgctaccgcattgtatgaatcataattgaaccttcttaatagatcttccttctatataatcccagtacatgccttccttgttttacctgcatctggctgtaaaccatcatatcgattaaataaagattttagttttacttatttaaatttctgttggaaaatctctggcagaccaggagcatgaagcattacaagatcaactttcagggaaggatcattttcaaacagttttgtgtataaatgggacagtcccactgctgccttccttggcgtcggcagaagagctttgttctacatgtaaggtatagtgttatacagatatcatgccatcaaatgaatgtttctttcggcaaagctcttctccatttcatgtgactaaattatacaattctgaagaaacttcatttcacctagaattttcatgtattccatttcatactatacttaaacaagaaagtgttagtgcttgcatttgatatgggcatccaatgcaatgcttaaaatattataatacttaagcaagaaagctatagaggcattaattgggacggacatccggcagcagtgtatggacgatctaaaattttgaatcatctaactaaatttcttttttttcaaattgtaactaattttctcttattgtcttttaggtaattatcattgtgaaaatactattgtatgtggctgaggctaagatcaatttttttccttcatatattgtcggagggtgaacccctcaagcgggggaccgtgggaccccctttccggttcggaccggggacgcgggtgaaggatcgagaatcgttggggagagagtgagagggggtcgggcccctcaggagcgatgaaagatactaggggtttagacaggttcgggccgccacagaagcataataccctactcccatgtgtggttgatttcggtgggagaatataagtgcttcctgtttttgggatttgtcccccctccactggggcatagacctccttttatatctcaaggggttaccacaaaggcccaagacctagcttcaagggtaaggaaaacattctttacagacaattaatgcttgtcttgtcttccgacgagcggagccacgcgcgccttaccgcggcgtgggtccatcccatcacgccgagcgacacaggtggacacccgtgtcattccttcttaattaacgacgatttccggccgcccgttcccaccgttgggcggggatttctcgaacggaccggtataagaagatttggtatgggttcaaatgagaggcaaaaagcccctcattaatggcgactagacggggtggtgtaggccacgtcccgtgccagcagcaggcgcacgcgcagggcgccctgcccaccgtcacatcagtcactccggtcttgagtggccggttagtgcgcctgcacgccgcatttaatgcgacgtgccacgttgacacccctcaataaatgccgtaggtgggcgctgagagtgcccgcccaagccgcacacacgaggcgcaacatggagggggttggggcggcccgacccctgccgtggcaggtagccaacacatcaaccctaggcatagggatggcaacggggctgcacccgacgggttttgccatcccgtccccgcccccgtggctaaataattttcccgttcccatccccatccccgcacacgggggagggttttcccccgtccccgcccccgtccaggtaggaagcacccgacaggtgcccacacccgacgatgaattctcagatattggaggagcagcaggcagagagtctaatttgtggtagagaataaaaaatcacccagagaaaaaactatttgaaataagcatagacatccacaaacgtcttttgaagatacacatgcatagatctatttgattcatccccaacagagagctatagaagcatagagtccaaagaaatacaagaaaataaaaagggcaagtaaatgctagtaagagtttgatgtgcgatggagctcttgctttgtcgcacaggacaagcaagactagaacacctcgctgctgcagtgcagctagcatccgatggttggaagcttggatgtggtaacggcggagcgagagcgacgcagacgcttgtgtaatgttgcctttgatccggcgacgacggcgcggcacttctgctgcttggcgtggctcgtgcaggcgtgctaccttgaggacggcgacggcatggatgcgtcagtgcagtgcggaggaagggactggaggagtgcgtatttggatctgagaggaggggtgtgctagggtttcactagaatatatatgtggaccttcgaattgggccgtgtaactgagcttttagcttctatctgggctgcggccttgggggatatctacctgtccctgataactcttggccccatggggattcagggccggggtgtgtagaacacccccggcccatgcccacccgacgggtggctcatttggccgacaacacacccatggggagtgatatgctcccatttacagaccctaatagaggttttccccgcgggggatcgggggtcgggtcccattgccatccctacccaggcacaaccctcctcgaggggggggagcgtcacgtgggcttgaggcggccttctctctttgtacgtggtacccccgggcccatatcaccgacagtagcccccggcgttagctctgaccggcgctctttgcagatggctagggttgacgccactcctctcggtcaatggcttgtgggcccggtcttcgtcccacgtggacggattcaacgagtgtggcccccacgcctaggcggggctagagccacgagataacctcgaaaacgtggaatccgggcgaagtgggattgcctcccttgtaatgatgggccatcacttcgtgattactgcatcttacgggggccgtgaagataatgatgggtgcacgaaacgaaaagggtagttcttcgcggtaaccgtgcgcaattagggtagtcgtggccccacccgcattctgaccgaaacggccgcgcgcgtgcatggcgcgcgcgctggaaacaggtgcgtggtgaatcgagggggcggaggaagtggccgcgagaaacgaggagccgaggtgcagagggaggataaagggcgcatgaaggggttttcttcccctcctttcgccactttgcttctgccgctctcctgcgccccaactcaactcgcatcttgctcttccttcgccacactctcgctccccgttccccctcttgatgacgtcatgacgcggagctcagcgccgctcgatggcagcatccttcccccctctcgcattacaaacgagaggttcgcggggttgccgaggaagttcgtgccaatgccgtccgggcgggcaacggtgatctacggcgaggctcgtccagcgccgcagtaccccgagcgatctgtgttcttcctctcctatgcgatggtgggactgatcccgcccttctcttccttctacgacatgctggatttctatgggatccaaatggcgcatctcaccccgaacgccgtgctgactctggccatcttcgtacatctatgtgagatgttcatcggggtgagaccatgcctccagctcttccggtggttcttcaccatgcagctagtgtcctccgacggaggccgggggctgctacttccagccgcggccaaacacgcagcagcgctacatcgggcagacgctgtgcaagaagtggaacgactagttctacaccgtccaccccgaccaccctcgtcagtgcacacggcgaactggcaggaggcgccggtgctgggggacgcgttcgacacggccctcgattacctcgtcgggctgcggtccctggggctaaacgacactatggtcttcggtgattacactcgccggcggctcgcgcctctccaggagcaggcccggggcgagtggacgtacaccggcccgaacgactccacccggacccaccgggaggagacctaggactggagtttgggcgacctgaaggcagtggtctagagggtgctcaacctcggcaatgtcgagccgtcgctggtccccgagggcatcctccctctctgctgtgacccggtgcgggactccattttggccattatgcagacggtggctgccgacgcggggcgtggtggtggtggcggcgcaggtggcagccgcgttcatggggagcacgccctttcggccgggggagtcaacacggaggacccgcggccgggagttcaggctacgctcgtccctccgacttgagaggaaagcggaagcagagggattcctctcctcccccctcctcggcccccgtcccactagggcggcacggagcgcgtcgctggcgggcacttagcgggtgccacgtcgacggcccacaaccgccgcaccgctagaggccggaagaagaagaggctgcggaagatggggaagaccgagccatgccggggggagttcatcaagcccccggaatggagcttcaaacgttgcccctagaggttcgatctcgacacgcacgttgcacacgcccttccaaactttccaccccgactcttgcttttttcgtcctttctcccccccccttttttctagcgaggtctcttctcggggtacaccatgggtaacccccctccccccgcgtcggcccaaagtacccgggcgcgatgaagccaggcccggcgcgcgggagaccgaggcggagagatcgggtgcggaggcggagccccgggtccagaggaggcaaacggcctctgacaccgcgcccgaggacgaacccgaggcgagggccacaggaggcgacccgggcgcgggagacgatgcgtcccgctcggcagatggcgaggattcctcggccgtgccaagggcggaggccgcccggggggcctctgccgctgacgccgccaggagcgcatctggcgttggcgggggcggtgcccaggacaatgggggcaacgcattcctcccggtgctgcggatgctacggcctcacgcgcgcagtgcggggaccggctccccttccaccccctggaccggggccccgaccaccggcgggtcgtcaagagggcgcggtctcctttttcctcaccgactccaacgggctcggagcctcttctgcaggtgatggcgacgacaaacagcaccgtcatcgaggggctcaacgcccaactgcaatccctacacgatgagcgagccgcgctgcaggaggagtgggagcgagtggcagaggggcagtgtgccgtggaggccttggtggccgcaaggcgcactagctccgcctggcggagttgaaaacgcgggccaaggcgatggaggaggtgatgcgggagacggagcaggagagggttgcggccctcatcgccactgacaccatggaggaggcagtgggcgacatccggcttgccgacgacgcgtactcggctgcgctctaggagaggagcgacgccgtggcagttcgggagctccgggcctcgcaggccgacgcgtccctacacctaagcgaggaggtcgtggaggcccgagctgaacgagcgggccttatccctgctgggggcggaagccgctgagcgccggcgcgaggaagtcgtcgagctccagtctcgggagatggagcggcgggcttgggagatggagcggcgggcttgggagatggaggatcgggcccgggctttggacgcacgggaggagacgctagcagtgcacgagtccgcggcggtagagcggaggaggcgaacgccgagtggggtcgcgccctcgcggacgccgaggtggccgcgcggcgcctggaggagagcctgcgccttcgggaggaaagctggcggaggcgcgacgggaagatctcggagcgcgagtccaaggtctcccgccgggaggcggtggcacggcggctcgccaagcgcgaggatgcatggcgggtcgcgagagccggcacctggagcacgctagcatggagcgggccgacctggaccagcgttcagccgagctcaacgctcgggagaggagcttggccttgtcggctcggggcggcatgacacttgagggcgggggagacgccgcacgggagtgccttgccgcggcggagcgcactatcttggatagatcgaggccctccgcttcgagatccacgctgggcctcaaatgcttagggatgccgttctcctgctaactctcacaggacgctggtcggggattttggtcgaccagaacgccaagctccccgccggtctgaccgggctcgcccgtcggctggaggaggtggccgtcgagttggagcatatccccaaggaggtggacgacacggtgaagttgtcgtcggcagcgctggcacaggaggcggtcgagctggtgctagcgagccactgggcctgcgacccagacttctcgcccttcctcacgctggatgactccccccccccccaacaaggaggcggcacatgccgcggtttgggaggccgtggacgtcatcgtgggccagttcgaggggacagcctccccgttcacctttgcttctccctccgatgacgaggaagacgagggcgaatccaaggacgccaaagcctaggagaagcccggcgatggcgacgcggccgatgctccaggtccttcggggggagcggggaaagctagcccgcactgagccgtagcccgtccccctcgcccccccccccctccctcctttatttgcttgatgtacatagctctttatctttaaagcacttttgttttaccttaaaaccgcgtgttaagcttttttaagtgaacgactgcctttgctcgccgtatgtcttatccacgtttgatgtctttcatgtgcctgcatcgagatatccatatgtttgtgagttttgcgattgacgaagggtgccaacccacttcttgctaccaccaagcctacttgactggggtctgggctcgagctgcgttctcatgcgatatgggccggtgctagaaccgtaggggagatccactagcaggctgaccaggccgagggtgttgcgacctagggtcggggacgacctgatctcggccctttcgaagcctcctgctttcgcaacacctcagggcacgactcgcgtctgggcccctcttggcgtatagacggctcgagtcaccaagagcaacgcgaatgccgagagcgtcccagttcgagtaagcgctcgagagaggaaggcaaaagtgggcgtagcggataaggtagagaacaaaaaaaaaagtttgctatttaataggtacaataatacaagtggtggcagcccccggccaacgcggcacgacgcgaaggtcgtgcggggttggcccaagcccaaggtacaaacacttgttgtcttcacgggtagaacttgcagaggtgctcaatgttccacaggttaggcagctctatgccgtcctccatgggcagtcggacagagcccggccaggggaccgatcactttgaatggtccctcccacatgggggagagcttgctcaagcccgcgcgcgcgtttggacgcggcacaagactaggtcatttacttgtaatgatcaggtccggatatggcgctggtgatagcgccgcaagctctgctggtagcgggcagcccgaagggctgcgcgtcacctttgttcctcgaggtagttgaggtcgtcacgccggagctgatcttgatcggcctcggcatacatcgtggcccggggggagcccagggtcagctcaaatggcaggacagccttgcaccgtacacaaggaataaaggggtttctcccgttgcacggctcggagtggtccggttggtccagagcaccgctggtagctcctcaatccatgagtccccgtgcttcttgaggacattgtacgtcttggtttcgagtcccttgaagatctccgcgtttgcgcgctccacttgaccgttgcttttggagtgggcaggtgaggtgaagcagagcttgatgcccatgtcgtcacagttgttgccaaagagctcactagtgaactgggtgccgttgtttgtgacgatgcggttaggcaccccgaagcgggcagtgatgcccccgatgaacttaagggccgagtgcttatcgattttcacgacagggtaagcctcgggccacttggtgaacttgtcgatggcgacgtagatgtactcgtaccctcggcgggccttcttgaaggggcctaggatgtccagcccccagactgcgaacggccaggagagcagtattgtctgcaaagcctgggccggctgatgagcatgcttggcatggaactggcatgctcggcactaccgaaccaagtcggcggtgtcctggagcgcggttggccagtagaaatcttggcagaaagctttgctgaccaaggagcgcgaggaggcgtgggcgccgcactcgccttcgtgaacattggtaaggagctcgatgccctgtttctgagggatgcacttcaggaggactccattggcgccgcgtcggaagagggtctcttccaccaacacattccttttggagactcgagtgattcgctcgcccccttcgcgatcctctggtagagtcgcgtcttggaggaatgcttggatctccatcatccaagcaacctgtcgaggggcatcaatgctggcctttgcaggccccggggcctggactccatcgggctcctggggctgcatggtcgcgtcgggctcccacgcggggggattgagacgcgcagatggatgggcgagcctttcttcaaaggcgtcgggtggggttggggctcgcgaaaatgcaagcctcgatagctcatcaacgacgtgttctcccatctgggcatgtgacgaagttctaacccatcaaagtggctcttcatacgtcgcacttccgggatgtaggcctccatttgagggtagaagcattggtactccttagagacttggttgacgaccagctgagagtcgcccaacaccaggaggcggcggatccccattttggccgccgccctaagtccgcaaggagtccttcatattccgccatgttgttggttgcccgaaaatctaggcgaaccagatacttgaggatgtcgccggtcggtgagttcaaagtgaccccggcaccggcgccctgcaaggtgagggagccattgaagttcatcacccagtgcatggtcgattggctatgactgggggcatctccgagctcgggggcggaaggcccgagcgttgggtcgggattgaccgatggggtccattctgccatgaagtcggcgagggcctggctcttgattgtgtagcgtagctcaaagtggagatcgaactccgaaagctcgatggcccacttgaccaccccgccccgtaccctctcggttgcgcagtatctgaccgagagggtaggacgtcaccactctgacccgatgcgcctggaagtagtgacgcaatttcctcgacgtcgctagaactgcgtacaacatcttctgggcttgagaataacgggcctggaggttagtgtagtcgatgcacatcctgagcttgtcattggccttagggacgacgtccgggttcaccagccactctggatggaccacctcccggatgaaactggccttcaggagatgcgccacctcttcgcggatgaaggcctggcgctccgaggcctgccgccgcaccttctgccggacgggcctcgcgtctggtcgtacggcaaggcggtgctcgatccccttcctagggaccccaggcatatccgatggcttccgtgcaaaacacattggcatttgcccgcaggaacgagacgagcatgtcttactatttgacgtccaagttaccactaatcttggcggtcttggacgagtcgttgccaagctagacttacttgatgggcacctcatcgctcgaagtcctctgtttcttcgggacgcgtgaggttgaggcctcgtgccttccgccgccgtcctcgacttcgaaggctgctcgcgtgcaactccacgcaagccagcgcgatcttgacatcgccgtggacggtgatggggcagcccaggcccagcatcttcaactgaagataggcatagtgggccgccaccataaacttcaccaacgcgggcctcccgagcaccgcgttgtagggcagattgagatccgccacatcgaagtcgatccgctcagtgcggaaattggagggcccaccaaaggtgacggggagcgagatgtgccccagcggctaggtgtggcatctgacattgcatatggtgggtgaaagcaccagagctagttgaccccccctggcggcgcttgcggggtggtcgatttggtcgaaggtgagcttcacctccgaccagcgcgaccaccgtgcagcctcgtgggtggggacagtggccagaagctcgtgcttcatggccttgaagcttcgacgggaggcgtgggcacatgcccctccgtcgatggtggtgatgacgtgttgcggctcctggaagccgaggtctgcgtcatcgggttcctcgataggggccttttccttggcctcactttgccgggtgttggacggggccgctggggctttctcctcccggcgtccctctttccgctcctgctcgtattttttgacgcgtttggccaaattcttgaccgagcggcaatcggcgaggttgtggtgggaggtgttgtgcacggagcaccatttgtccgccgaacgccccccgctggaggtgccggtgtccttttgcttgccacctgcagccttccccttgcgctggggccgcgaaacacctttggcggcaaggacatggccctcgtcgttggagcgggccgacctcttctttctccgcttcttccgccgctcgttgcgagcggcaagctcgggcgtggctgcggctgcgccggagccggaggagttccaggtccaggccttctccttgcaagccacacggtccgcgagctcaaagagctctgcggtattctggggctccttggaggctattttcttgagcatgcggttgtgccgcacgcccctcccccccccctgcgcgaatgtatagatgaccgcatgggcgggtatgcaggggatggtgttgcgcacctggcagaaacattggatgtactaccggagggactcatcgtcccgctgccatactgcgtgtaggtccacttcctctcctgggcgcggatacgtgccctggaaattaacaacgactaccggcggcctgttcacaccgttgggcgggatttctcgaacggaccggtataagaagatttggtctgggttcaaatgagaggcaaagagcccctcatcaattgacctgtaccgctctgtgccaggtgaaattagtgtgatacacatcaaattaacagggcttcgttaattttaatgatgggtcagatgggtactgactactttcgcattattttcagagagaactagtgtccatcacgtcacatgcagtacttgattatctgaaattattctatgaaacaaaagccgaactgtttgcttcttttgagtaattgtctgaagttaaatttcttggcagcggatatggattttaataattcttatagatgcttaatatatgtacggaaaaatgaaggtttttgtgttgacatgctctgctatcttaatcctacttaaccattttatccaagtttttctggaatcattgctcttgtatgtcttgaaatttgtttgtaatgttttgctatcagtgcataacaactgataatttgaggtctatttcaataacttctgtttctatcaaagattgtgtgttattctgtacggatggatagctttcagcaacttcctcttaaatactgataaacatggaagtccacaatcgaagtactggttgaaggaaaaggtcggaacatggatgtatgaacgtgatatctgcatctaattgtatactgtgaattcatgggtgataacttgatcagcgtatttacaaattaagactacttttaagataatgaaagtgatgttcatggatgaccaccttttagggaatcaagctttgtttttcatgcaccagtaaaatttctcgttcatttcttcacttctatttagatttttaggataatatgatttgaaaacacttatgattggttgttttgaattgcattggtattttggggtacggtttgcttgctcaatttgatgcatatccttttgttcttttgccgtttccagagcctacgttcgaaggaccttcagcttcatgttattacctccaatatgatgattgacgctttgctcaaaggaggcagataggaatatgccatggatatgtttagtccagaataatgtggcctacaatttatttaatgattattttcattggagcttctactgcttcccagctacctctttttctcaaagaggaaatatatgcagcatgtgcagtccctccctgagaaataccgttttcaagtatcacatgcagtatttgataatcgaaattctggtctgacaataagaccaaattgctacttcctccgtttcatattataagactttctagtattgcccacatttctttgtaggactcatctgaatccttagtttttataatcgaagtattgtttaaagtcaaagatgtcagaacatggatgtataaacctgatatttagatcagttatgtaatgtgatcatattcttgggagataacaagatcagtttttcagttgttatgtgcttatgagttaagactgccatttcgggaattaattatgctgttctatgaacagatatattttcttaatcccttattcgtttcttctaagcgttctttatgttggttgtttttgagtctgctagctcaatttgattcatctttttggcctgtgtcatgaggtggtgccattgggagcagaacaagctgtgtgaagattgatttcccagagaacattggaaatgacatatagattcttacgcatggcatttaatctttttcaacttactcttgctgattattgtcataatttaacaaatacggttaatgatggtcctattgacggaaccatcaatatcctgtatatccattcagatgctgttcatattcatcttttgtccattactgcacccaactaaaaatctgtgccatatgaatcaaatcaagtgtggttagattgattaatctgaatcttttgcactccttttttttcttcaaaaacaaagatagacataccaatgtagtataatatactaggagagctaaaccaggtgagtgtattttcctgacttaacctagatgtacacaaccagtttgtcaagtatttacaatacatatacatctcgatgtagtttctcatgaaagccctttgcaactcctatccacctcaagttagtggctgcacaaaaagctctctcctgatccttctgaataccgcaaaacctctactgctatacacattttacagtacacacactgtgctgacaaaaactataggaaattcaacaggtaaagagtcaagaagtctcctggaacgactgcgaccgcgacaatgcagctgggtttgccttaagagcacgagcaggacgagtctctgatgctgcttggcctttgctctcacctttggactggaacggcttgaagatgccagggtctccaggcttgatccccagggtggcccagatggagctcttcgccgcctcgtcgggatcgtcgatgcggagcgtcttgggaacccacagtgatttctcctccttgtcctccttcagtgggagagaggagtccctggaatgcttccccagaggggagccattgcctgaacagctgctgttgctcgacgacgatggagacatgcagccgccattcgttctgatccacggtatgttccatgccgtggccggccagctggataagcaaccccatagtgcaggtggcactagagggtatggaaatggtggtgcagaaagcctcgaggcaaccggcatcatgggggagttcatgttcatccatggagctgaactggtgctgcagctctcagattgggaagcagactctggcatgcttgtacctggcaccatcataggaacgttgttccatcctatgttccatgggtacatgtaaggagctccaaggtagtactgcggcactgggccgactccgttgcaatacaccggcgtgctgttcttgtcaacttgggctgcattttcaggtaacacgttgtgtgatgtgattgaagagatgcaagagttatcttcctgattttcacccgttggtactgctgcagcattggttccattctgctcctgaatgttcagcactgatgccatcgattcacagagtggcacctcaggcccaaatttgagaactgtttcgtttctgccaattggttgtataggggtcgaatgcgcagatgcgaaagcttcagggttcattgacttggatatttccactctagaccccatcatgcaatcaggggccatcagtaagtgacggtagtgcaacgatgagctcttgcttttgcgcctcccagcaccaacaggtacatttctcatggttcccccggcagtccaatacctttggcagttcttacagaagtgcctgggttgattaacattgtagttgttgtaataacaaaactttgtgtccatactgttgcaccgagggcaagggagaatcttatctggcttcttaagtactttgtcctggcctgattcatcatttgctgtcttttcattttcatcttttgagtctgatgctgctttctcttcaacgttgttcatctgaccctgatcttcttttttattgtccaaggtagatctgctgactggctctatgctttctattgactctgatgcatcaaccctcatttcatcatttcccttctcttctggcacatcagccgtcacttcattatcctttttctcttgtggtgcatcgaccttcatttcgttatcttcctcctcttgtggcacatcaaccttcatttcatcatattttctttcttctgtttccttgtgatgatcctaaaatattgccgtagtggatattagcaaggtacttcagttcaaacttcaaagaaacctctaataatgaaaccctttttgaaaaaaaatcactttagcaggaagtttggaaattaaagaaatgtaataggatcacaagtctatggcatggcaaaagataaataatatcatgaatgaatctttcaagcaaatgatatgcaactataatcacctttattcagctttgtgtttcttttcttccaaagaagagacatgttagcaagcagatattctacctttatgggcctaacacttattgtgttgctccaaacattgaaaattgggagcatgaaactatgaggtgtacaccggtatgtaaattcataagttgggtatctgaacaatttggacatgctaatccaagcccagttgcacagatcctaattcaatcgactttagcttcatccatccacagaacatgctgcagagagatatgccaagatgatccgaaggacaacggccaatcatcactaaaaataaaatcatgcaggtattctactcttatctattcaccgtctcgttctgcctcagtacaatcggctacgcggattaattgcttttactgaaaccagaacacatcctaattactagctgagaaaaaaagctgaccactctttcgctaaatgaaagcgaaaagccatggtgtagaaagagaaagaccaccacatgctcaaaagaaccttagattttgcatggatgtcctactttacactcctaaccactttttgaggaggcaaggatgattacacccaaagtacccaaccaaccaattatgctaattgccctctctcacctgcaaatacccccaatcacaattagcaataacacagaacaattatgggcaattctctacttaactgccgcctaagtcgaagacaaggacaaaacatggtgtacggacaggtaggatcatcctaattcttggccttatccacacacctaaaatccaaactgaaccttttttttttcatacacaccaactgatcagggaaagtgcaccgtaactttcacccatgacccatagttcgaattcctcaccttaatctgatcaagaagagctcaatttcacagaaacacataaataacagcctaaattaagccgatcatatcaatcttttcctttctcttccccacaaagcaacaaaaccctccaaactcgaatgaaaagcaacaaaatgcgcacgcgattattctcacctcatcctgcgccgccggctcaacctccgccgccgccgccgccgccgcctccggctggtcggagccgtccgccgccgcagcagcctcagcctctggagccagcgggatcacccgcccgaagagctttatgcccggatccttgtcacacatcctcgatcccccctcacccaccaacaacccgacaaccaccgtgatcctccgccgccgccgccgcagccgctgaccggagcggcgagagaagagaagacgagaggggctaatttggaaataaaactagctaagctagtctcctctacgcatgggacgaaatgggaacaaaaaagagcacgagaaatttcatttcagaggggattgctcttgctatattaaagaaggggattaaccctcttataccctcccaaaacccactattctcaaacacacccctataaaagttcggagcaacatcggttagcataataagccaaagcaaaagccaaaatttgaatttttaaacttgattttgaagttaagatgttttcgatgtaatttcttgatagtattggcttttaaatcgctacgaacaaatatatacctataaataacttttatttcctaataagctgctttgtcatatccgagaatatgagcaatcgatgaggctcttgcatactccctctatcccataaaaaatcaatatagtagtacttaatatgacacatcataatacaacgaatttagatatgtctctgtctaaattcgttgtattaagatgtgtcatatactctctccgtcccataatataagggattttgattttttccttgcactgtttgaccactcatcttattaaaaaaaaattatgcaaatataaaaaaggaaaagttgtgcttaaagtactttgtataataaagtaagttacaaataaaataaataataatttcaaaaaaattaaataagacgaatggtcaaatagtgcaagaaaaaaaaccaaaatccctaatattagggagtacttggtttttttggacggagggagcgtaggtaaagcctgtactgacagggagtgtttatgtaaatatcggttcatataggggcgtggaggcgaattgtccgaggctcgggatggcgacgcggggggcaccaggggcggacagctggcgtccaggtcagcggcgcggggggctcgtcagccacgagttctcgtggctgggaggcgcccggggtgacgtcagctgctgcgggcggaaggcaagcgatcgaatctcgcgaaaaagcggagccaaaaaggggcggtccaggcggccaccccgccccccgctttttctcttctcctttctttttccttctctttttttctttctttctcctcttcctttatcctacgtggcacgtgctggacggaggtgggccacgcgtgtcagtgggacggcgcgtggtggggggcctagcgcaagtggggagttggtaggggttctagccttctaggggagctgacggtgggcccggttggcgctgattggctgataatttttgtcactcttgagctgaactggcgtgggaaatacaagataaataaaatcaccaagaattgtagtataaaatccgaaccccaaatacccaaaattggggtaaagtgacaccaacgtgaattatatttttttaagaaaattaaaataaccaagcgttttagtataaaatattgaaccccaaataccggaaaattggggtaaaatggcaccaattgttttttttaaaaaaaaacaagattagtactctcccgttttacaatgtaaatcattctaaaattttccatattcatattgacgttaattaatctagacatataaatctatctagattcattaacatcaacataaatataagaaatcctagaataacttatattatgaaacggaggaagtataaaacaccgaaccccaaataccataaaattggggtaaaaatgtcaccaagcgtgaattgtttttttatataaaaattagtatcaccaataattttagtagtataaaataccgaaccccacgtccccacgctctactaaaaaaaccagctgcagatcaaaatccgttagctcatgagaatggtcccgtcgtgctcgtaggccacgtggctagagatctttccctggagacaatcccatccacaagttttgttttgagtaaattttttgaaaaaaaatagtgggattccaacatttattcgtggcacttgttactcgctctcggtctaagcaaatcatggatttgggttggttttgtgtgcacatgtggggccctgggttgctctcgtccacgtggtgttgcggataaaatggtggtgagaaaaggacgtccatttggtggaatcaatgtgtcaaaattttggatttagaagtacgtgtttacatatgcaaggtcgcaagaaacttgtttgagctacggcttataagtagaaatggtaaaaggtttaaatagtggactaatttttttcctcatctaaaaatatatgagagcaagatgataaagttgtataagaacatcccctgcagctcatctaaattttatcctccatactcccatttggatggccatccaaaaaaattcccactctatataacttttcacttcaacagatcatccatattacatcctacatataccaacatcctatattttactaatatttttcaattaccacacatttttactcctattgctctcacctttcaccacttaaaaaaaatcttgggaagtgggtagttgaggatagagtgaggagagagaacctccatatttggcttgggaagggctaggtttggaggacctccaaaaatggagtacgtgatagagactctgttggagcactgtttttctcctccatactccaaatatcagatggatgactagatagagaagctgctggggatgctctaagtacccatagctcatgacccattaccacccctatttataagccacaaacaattttggactttaaactcaattctctcattttaaaacataggggttcacaatgtgcacaatcaccgttgtaaatacccacgcccaacttttataaacacatcgagaagactgacatctgaaaaaaaaactcaaccttaaagttagtttagtgtgttgttttatcccttcctaatcttttaactctaaatttagactgctagaatttgaagtacaaaaatcttatccaaaattttctactccatttgctacgtactccatctcgtcttggtttatatataattcacagtcgtagttatacgagcaaatgccagtggtgtgtgctagcgaaattacccagaattgatacgcatgttgagtatcatgttgatggcttgtttggagagtttaagattaagagaagcagctgataggtagctagcttctaagaatctgaaaaggctgggtttccgagcttctgacttctagtttatttctgaattctataactacaacttaagctgaactatttgaaagaacttttgattgtaagaaaaactgcggcagctataagctccccaaatagccttaggctacgctcaggaggagggttggcacgtaaaacgaagcacatattattgcatgattaattaagtattaattatttttttcaaaaatagattaatatgatttttttaatataactttcgtacagatttttttttaaaaaagcatactccctccgttctaaaatataagcatttttagcatagtgttaagtcaaatatttttaactttgactattaataaaaaaataaaaaatcaatcatataaaattgatgttactagatatatcattaaacaaactatcataatatacaactctttttatttaaaacatcttacttttatatatattattagttaaagtagtatgtcgtaaaccatatcaaacttaaaagtgtttatattttgggacaaagagagtatccttcagcagtttaaaaagcgtgtgcgtgaaaaaaaaaaaaaagttgagttggccaaacttgggggaggaacgcggcgcacgaagcggaagcgttcgaggctgcgaccgagcgaagcgtccttggccacaagcaggcgggcaaccttttttctcttggaatccttttccagtttgaggatcagaacgggcccacccccatctgccgctgtccaaccagcagcaatccaccatctactagcagcggggaaaagggaaaatggctcgcggcgcgggggccactttcctttccacccgcgggccgcggccacgtccacttgtcacgtcttcttctctccgccgtccacggttcggtctcccggcgcacgaacgacggcgcgaacacataaaaataccgcggcgcgccgcgcgtcgcgtactcgagtccaccaccgctgtgggccccggcacctttttcctccaaagcgggtggtgtgggaccaggagaagtacggctacgtcgcctgctatgctgtctactagtatatgtttgtgaggcccacctgtaggtggctgtggctcggagtcggagtgaggtttgtggtgggagtgctttttgtaggtttgtggtgcgggttgcgtccaccgtacgcgcggcggctcatgggccgtgccaagtggcgctggtggggcccgcaggttgcagagaaggattctccggtgaaccacactgttcgtggctgccgcctgcagggattttgcctccggcgaaaggcataccaaccggctttgcttcgtttgtctgactataacaaagatcatgcttgtgagacatgaataaataaataaataaatagaatgaaattttctggatcccaagcaaatatttcatttgcatttttttccaatcatggaaagtacattcattataactgttttttcttatccttcctcgtgtcctgtcgaaacagcctagctacgatatttttactctcttgaccctcttcctccttaattttggtggccttgctgctgctagcgggagagagagaggtcaaactcctcccaatcgttagtactaataccgtagttgagttagtctcgcagtcgagccattctcgttgatgggttctcattttaattttcttcttgctacgacttaaattacttcatttttcccgtgtttcaatcaaatgctagttttgaaactttcatgtgttttaaaaattttataagaatctaatgagcatgacattccattcctatattttctctatccctatgttttgagtcttgcatttcaaatggggccttaatctctaactcttgctcaatggattgggcctggttgtagttttacaaatttacaatacaataatgtagaagggaaagtctatttttttctcccttgattataagtcgagtctgattggcatccactaatcgcacaaccagatatagagagtccttaaactatcaaaccggcttgttttgactcctcatgtggttctgatggtggttttgtcctatataacatttgcatggctttacagacaattgttttatctaagagttggtatactcatgccaacatggggcttagtggcaattctagcatgagaaatttacaaaaacctatgtgggcctacaagtcaatcacatgaaaaaggaaaaaaacctagtgccaccatcccacccctcccttctcttctcgatacggcctcgatcccaacacagtcaacggctacggtgaagggctcctagatgaggtagagtgttccttgacaatgtttgtacctttgctattgctagatctggcgatgccctggatgtccttggccatgagcctatgcaacatgctctaggcgtagttgaggtcgacaaacgaccaccgccggcgacaagctagagctagagctcgcctggtagagatggtagtggcaatggtggccaatgagcccatccattgttgctaggcacatcacccccaactatgcgtccatctgctaccattgatcacgttggctctggtagtcgagcttgcttcaatcgcacaaagtcgttagcgtcaaggactatgttacggagctcaaacatatgctataggtggtcgagacagagcttgcaagtgtgcaagtggagttggagatggagaggaccaagaagaatgccaccgtgcctcccccaccacgcctcgctgctcggctgcttgcgtcctcgacgaggtcggacgttgcagctgcccgtatgagctcgagatcgatgaagccacaccttcctttcttttcctcgggtgttgccgcctttctgcttgtgtccctcaataaggttcactactttcatcaccaccgcaacaagctcgagctcgacatggtgcgccatgcccaatgaagagaggatgggagaggtggaggaagaaggcacttatatatgggtcacatgacaattgtttttctaattgtgatgccatgtagacaccagtacgcgacacgtcagatgaaaccactgataaaaccactatatgagaaaaattgatcttgttttgatacttgagggatgtgctatacttggtattacggttgagggaggcgaatcaaactcggcctatacttgagggaagaaatgtagacttttcctatgttgaggttggcagctatatgtgcagcccaggctcaatattgactctttgtttgaaggaataagttcactttggatccctttatttgtcacccagtctgattttcgtcccttgatcgcaaaaccggatacgacaggttccccaacttacaaaaccgtttaaataaatttgaccctggttttaactgaggtggcgcctacgtggctaatttgactcggtcttcatctgacatggcattgacgtgacgcttacgtggcaatttgatccgaataataataaaacctataggacccacatgtcagtttcaattgtgaggcccacgtggaccccacctgtcatcctcactacccttttctctatccccctctctctatcctctctctctctccctcttctctctcctgccggagcagcgggccgagcggtgccggcggcggagcagcggggaggagtggcggcggccggagtggggcagggaaggagcgtcggcggccggagtggggcgggaaggagcgggccaggcaccccgacgaggaggccaaagaacaggaggtgcgcggccacggcgtcggaggcagccgccgcggcgccgcacgccatgacgaggcatgcccgagagaccttcctgatggccctcaccaccttcagcttcctcgccaccttcccgtggctcgacttgatggcgtggagaatggacgagtacctgtcgtggatccgcccgaagctgctccgtgtcgccgcgtcgctgaacgggacaacgggttgctccgcacggcggcgagcggcgccacggtgccatcggtagcggcgacgctgtcggagatggtggccaggaagctgtccgtggacaggtagtttctctgcgcgttcttgatgttcgtcagcagctgcttgcagatctccgacgcctcgtcgttggcgtcgaagtagcccgccatcgccagcttgatctccgacgacgtcctccggtgcatcattcgctgcaattccgcggggacgacgccttcggtgcagcgtgctgatgtactcctcaatgctcatggattccatggctgtgttccaatacaaaccagaatttctcaccattattgatggcaaaatgaactgacacacaagaacatataaacagatgacgaaaagctcaatgttctatctcttttttttcttctctctactgatctcaccttggtgtgatgggcacatgaattgccccgattccaaaactcaatttcttcgagtttcttgatcttttgggacaagcaaaaccggagtcaaatactgccgaaggatcttatttaaacggtttcgtaagttaggggacctgtcttatccggttttgcgaccgagcgacgaaaatcagactggacaacaaatagagggacccaaagtgaacttattccttgtttgaagcctagctctttccagatgggtagaattcggcccagttcgaaaaatgaaattcaaaattagggcgcaatttcattttgtttagaagaaaacagaatccatccatgtattgcagtactgggaaggtcgttccaatcacagttctaacttctaatcatctagccatctagacgcagtattacaatttgcgagagaattccggctggttccatttgattccacacgagatgcattttgttctgcccaagcaaaaatcaatcaagcagagccctaaacaaaaacaaaacaaagggtgaattctttttttcctttaaccatagtccaactccatccccatttccaccgcttcgagaaaaaaaggtaaaaaaaaaagaagcgacaggtgaggtgacagcctgacaccaccctccatgttccgtggtctcggtccacaagaccagtgtgctccccgcccctttctccccgtgtgcggaacccgtagaccacgaccacggtccacggggcctcgtgccggaagcgagaggaagacgaatcaacaaacaaaaagcaacgccacgccacgccacgccactgcagcgtccgcggggtttagggagggttcatggccttctcgtcggaggcgtggaaatcctccgccactgccggccacggcgacggtgacggcgacggcgaccggacccctcctccgacgcccccgctgccgacgccgctgctgcctcctacgctcgctccactgcagcgttcgctggtttttgggagggttgagggcgaggcgatgtcgtcggaggcgcgggaatcttccgccaccgccgtcgaccgtacccctcctccgacgccaccgtcgccgccgccgccgccgccgcctcctcctacgaacgggacgctcacgccgccaccgtcatcggcaccaagcggcggtcgtgctacctcgtcggaggcgcgcgaatctccccacgccaccagcgtcgacgacggcggccgcgctcctcctccgccgccgctacctcgtcctacaagcgctcgtgctacgcctgcgaccactcccagcgcggacggctcctcctcctcctcctcgtcgacgtcgggcgggtcgcttccccgcggtgaaatggcgcacgccgtggagtccatggagaagcttcgagccgccgtgtccaagctcgacgagatgaggcgagttcgatctctcctttttcccggtctcctccctcgaatcgatcgttccgatcctctttcctcttgcaacttacatgcttatctctggcttttcccctgtgcagtgacgaagacaaggactccttcatgcacctcgtctctcgctacctgatcaggtagatggagattatagtagattcgattcggcatgatttctctccattttttagtttctcgtttcgatttgttgagtttttttgggtgcatttgtagggaggagaaagagatgatcgactggaacaaagttgagcgacccacccctgagatggtggtgccgtacgactcactggtgcaggctccccgaggtacgcacgttgttctggatgcctccttcgatttcagcttgatgatccgatgttgttgtgctggtttcgtttgtaagtgctgtgagattcacatgctgtttctgcgattgaaactggatcgtgtttggcgctgcagatatccctgagattagaaatctgcttaataaacttgctgtgctcaagcttaatggaggacttgggacgaccatggagtgcgttgctcccaagtaagcatataaatattcgaattggtgcattttacctctgaattgatttgtctggtcagcttctgctgactgttgttagactcttcctcagtggaacgggtgtacggctgtagtcccaaagcaaagcaattagatggttcttcctccgtagggtgtttatgatgatgcactgacgtggaagatcacattatcatattatagcctgatgatgctttttcttgttattttgcttgtaactcttttgttttaacaaatgtatgttcacatcatattttaatgtgcttggtaagatgtataattggttatagcatactagaaatctgccttgatatgtcttgattttactgccatgtttcttttctggacactgcatgctgaaaagaacatatttcttgctcagcgtgtatctatgatatctgaatggtgtcctaaatgttcttttgagtgctttatgtttctattccttttaatttcctacactgcagctcaaatgacagatcgttcctttccttgaatggatgacattgatcttggttatgcatgttcattgtcattaagtgtcctgatatccacatatatgaattatcttaggtactacattcttacaggcatattcatcgtttcggttgagctatatctgaatgctctaccactgtgcttaatttttctgtattcaaacattcaaatcattacaggctcactgccaacatgttttttctaacatatttgatgcaatgcatcgatattgggtggactaggaatcattatgttctccttgcaccatctttgagattttgccttctgaaacaagtaattgtgcaggtgtacgattgaagtccgcagcggccttacctttcttgaccttgctataatgcagactgaggtattcttaacatatattggtgttttttctttaatgactggatataacatgtaattgtttgtgccttacaagtttcacccatctgcagtttctgaacaagaagtatggatgcagcgttcctatccttctaatgaactcattcaacaccagccttgtgaataaggttgatattcccttcactcatcatttaagatatccttttagcatcttgattatgaccttttatttttgaagatcgtggagaagtacacaaacattgaaattcacactttcaatcaggtataacattcttttcataatattttcttcattttttcttgatgaatatcacatatttacacaattatgggttcaacttacaagaatcatattctatacagaataagtaccctcgtatcattactgaaaagttcttgccactttcaagcgaaggaagtacagggtcccattgctggttagttttctccaataattctaaagttatcacattccgagtgaattgtctgcttaatgaatacatttcaaatacacagtcgtttggcctgtgctatattttgaaatgtttatatttaactcatcccatttccttaaacctgaacattccaatactgtgatcttttgatgaaggtatcccccaggccacggtgatgtgtttttctcattgtgcaaaagtggaatacttgataccatgttgtcacaggtaagaaaaagtctgaagtcttacccttttatataggcaacagcattagcacctagcactattcgttggtttacaatgattgtgtaaaatatattgtattgttttccagaaatatgtaacttgatttttgatatgctcatggtgtttttcatatctttgtaacatggaatgttaatgtcttgcggtaatcttatcatccttgagaaggtaacatattttctagtgtaaaatttagtacctcgaggtactttttcaaggattataaaatttctctaatgtttctccataagaaaagaaacatggtagatttttttttcttttgcattttatataagtgatacacaattatgctttagtcataaatcatgtccaatgatgaagtccaagtatctgtcgtgtaaggggaactttcagagtttgctaaaaacaatattgttgctcagaatagttgaggcataaaaaatgtgttagggtgggaaacaaaagagggggtagccaaaagaaattgaatgcaacccctaaaattattttagggactagattttttaccatacatgattgataaaaaaatgactataaatatatctttttagtaatttattgcatattgatattcctgtgcttagtttcttttccaaatcttctttcagggcaaggaatatgtcttcatagcgagttcagagaacttgggcgctacagtcgatattggtatccaaatatgagtacaacatccttattaatgtctcatggcttgcatcagaaattgaatccttaaccagcacagaaatcctaaaccacttgatccataacaaaaatgagtactgcatggaggtatgcaagtgtgcaacaagaactaattcccattgaatttggataatacaaaagtcaactcaagtatttatgccaggttactccaaaaacatcggctgatgttaaaggtggttctctcatatgttatgaagggttaaggtatacttatttaatcttaactttgttgccggcgcttaattacatactgctagttcaggagaaaagactatgatttacatgcaagttgcaatgttaaatttgtagcaaatcatcatgttgcttgtttctactaattgcacattgcgatataaaaccgtaaataattttctctgttgttatatacttgtatgcagctgttggagatttttcaggtcccttatgagaatgtaggtaacctctactaaattattttgttccaactcgtcaattttaaggtctgatggatgcttttcttcttttcttttgggggggggggtggccttcaggtagatgaattccagtcaattgagaacttcaatatgctcaacactaataacctgtaagaaacccaggttgtctgtctcttattaagagtttgaacccttgctaacagcttttggatataggcgggtgaacttgaaggccatcaagaggctggtaaaagctgaagcactaaagatggaaatcattccaaacctaaaggtgcaccatccgggtgaatttgttctctacttctcatttgcactacatttatctaagcattgtttttttgtgttacaggaagttgatggtgtgaaagtcttgcaacttgaaaaggaagctggttcagcaatacaggtgcaagacactttcttagtcttgaacttatgatatgttgctcctcctttctgttcatcttcaaaataatatgccctaatgcttttcattctatttatctagtgctttgaaaaggccattggtgttactgttcctcgctcaaggttccttgcagtaaaaaatacatccgatctgttcctcatcctggtatatttgaatcttttccatgttcttgttggtctagaatcataaatgattggttctaagtttattttttttgttccagtctgatttatatattgtgatggatggcactgtaacccgtaacccagctagagataattcaacaaaccccttgattgatcttggacctgagttcagaaaggtatggcagttgtatttaaaacatctgagatattttaaatttgaagatcaagaagggtcattgaagaaatcaagaaatcagtgaataaatctggaatttgactgtaatttcccttctttttcctcacaaaactgtaggttgacagtttccttgaccgatttaaatcaatccctagtattgttgcgcttgatagcttgaaaatctctggggatgtttggttcggttcaagaattactctcaaggtaaacctcacaagtcacagtaacatattgttatttttttttactccttggttgccattctgtggtgcttggtatgcctcctaattgcagttttttttctgcccatttcaagattttacatgcttttgggctgtgtacgtccattgtggatgtagaggccggattttaatccattttctaaaaaaaaaagattttacatacttcacaattcaatgcctctttttgaacgcatctcttgcggaaaaatggctttaatgatgctactcttattacagggtgaggtgacgattgctgcccagttagggttaaagctggatattcttgatggcagtgtttttgataacaaggtaaaagttcatctctggataattatctgttttgtggttattttggaaactgtactattatttcaatgatgttggcctttttatctcacagcattcaacacatagttctggagccatcaaatatacaatgaaattggatgagggagcggactgtgcatctattgattctgcgctcaatcggctgaacccaggatcaactttgatcctaaagaaagatgatttctatcgatacattgacccaattcaggcacggaaccgggcaatgttccattcagaaagcagtaagccctcatccagcaacaacgagttactccaagacaatggaactcccttcactccaaatgataatagtgacaggatacaacccctaccccttgctcccttctcttcttcacttggctcttcatcactgcttcccttatatcactctagagcccgtcgagcgccttactggtatacacgatttattttcgtgaatccgcgaggggcactgcattcacaatttaggtggctgtgggggcgtataaagtttagcagtgcgaaagatcttgccatattttatggtatttatcatatcgtactgtatggaatagattgcattatcacagcaactttgaaggacaattggtttgccaaactggtgcaaggaaagctgtggcttataatattggtctttcatcagttcaagttgcttagccgccggcgcctccgctggggtgagaggaggaggaggacgctcagatctattcatcaggatatccagagttacttggacaattactctgactccgacatgtggcatttgattgtacacagtgttgctagagtgatatccaatgtgctggaagatgtaaaccgcaaatatatgaagaatcactacctaggctttcttgccatacattcaacggtgtttgccatcgaagtgataggttcatacgctgttgaacttaattacgacattgagcactatgcagaaccgccagagttataggtatgcaaattttctcttatctcattatttgttcccatcttgctctatctcattacttattcccatctttgaacataaggtgaacttcacatatctttgataagtagatggttaatgtcgttggaacagcaatagatattggctttatctgagtaatatattgcttctactttgttacttataatttataagacaactaaaacaatatttaataaatatcattggccggaagttccattatctaaaaaaaattgatagtggaatgattctgtagccatatgaggggctttggttagtgtttaatccagttgcaacacttgctaaatatgattggtatgcttgttggtctgtgagcaaaagctctcaatcgtaaacattttgtcaagaattactcatcagcatttagtatcattatcatgatgctaattcattaaggatcatgtcatgttcaatacataacgtatgccattggtagtgctctgcgcactgtgcccatgttcaattagattgatttgtactctcttcaaaagggcatatctgttagttttttgccatgttttacttgacttgcttcatcatgttaccagtaaacatgggatttcctttgttaatcctatgcactgttgtcagcttatttgttgtttcatttactaatcatcaccagatcatccttgctagaattatgtatgactgatagcttctaacttctctggtagacaggtactcaaggtcccctttttacaaggggaacccaaaatcaagttcaagatcatgatgcctgcacagctcaatccagtacctgatcctgatcccacgcaaggtatcaagaagccacaagaggttttaagccaattgctaatgctacgtatgatgccatctatcacttactaactcatgatgatattgttactgtaatcacacaacatgttcctgatgcgtttctgtggttaactccgtatcatgttctgaatgcgtttttttgtggttcatggtatccatatatgcttacactagcatgactctgtcgtatgtcgtatatctcgtatgtactatgtgcttgactgtggcgtatgtcttagtatgtaattatgtgcaaataagtacttcctttgtttcatattatgagacttctagcattgcctatattcatatatatgtcaatgaatctagacatatatgtgtgcttagattcattaacatctatatgaataatataggcaatgctagaaagtcttataacctgaaacggagggagtactttatagtactttatcttattatctgcattatagggttttgttgaacggggacagctgtttgtatagactagttgtgccagctgaatactataaaacataagtataatggccataaaacataagtatgcgtaaataatgtattcccttgcaatgctactatcccaacaaactgaaaaaaaaaacacacacatactccacgtagaagatgatctgaagaactaggaacagagtacagactggcagtgtgaaactgtgaataatcaggcagcgggtggcttgggcttcttgttcggtttgaggatgagatcggctagaggataccaaattattggtcgcttgtaggcttgtgcgccggcagcgaagaagaggagcagggcgcattcccacatcacggcctggtacaccctcggcaaggggaggaggctcatcaccacgagcagcacgccgcacgagagcgagaagcccatccccaccgccgccgtctggaagtccgacgatctcatcgccgcgcgcgaggccgccgacgccagatccccccctccgcccgacgccgagagaattcctttttttttttttgctgatcgatcgattccgccgccgccgtcgtccgtccctatcaactttctctttcaatctgttgtgtttaggttatctgattggggttggggtatatatgaaccggaaaaatatatatactcatgtaatccgtgtcctaaaacatctccgtctccgatctgtttggttatctgatgcggattggctcgcacgcgcgcgcgggtcacgaggctggtttcggtcaagcaaaagttgcaaaacggatgtggattttcatctctgcacttaggccctgtttctttcaacttaggattattataatccagattattaggagtaagctgaaagaaacagataatttattgaagtagcttattataatctgataagctcatttaggtgagctttttccagattattgggtgaaaaattacccaccatgccaccccactccctttttagacttgcaaacccaataatttaggctctaataatccgaaaagaaacaactaaccgcttattatactacagattataacaatctagcttatagtaatctaactcaataatctagattataataatcccaagctgaaagaaatagggccttagttcatggatggaaagatggatctatgtgttcttgctgaattttttttataatgctattcaaatattcaagctatttttgatggtgtgtcaattatatataatatttgttattgctgaattgatgattatcttgtatttttttctgattggagagagatactacctaatgcgaggcctcggaggggttgtggacggggcttgatttgaccccacatctccagtcggggccaggggcaggggcgaagtcgagggcgggggcgttctagcccaacccggccccgcactgccccggtgctatctttactaagatgtataataccacactaaaggcccttctcaactgtatgtatatgcggcatctaacgggattctacgctttctaaaatatcccacatggtaatcagaactaggggtgggcattcggtctaaccgagaaattcggttcggttcttcagtcttttagaaaattcggtcttcaaaatcacaagaccgatcggtcttcaagaaaactcaatatcgagagcttggctcttcagttatttcggttcggtctcagtcaaaccgaactaaccttagcagcgatttgaagttttgaacaacaaaataaaaccgaacaagatcgacgaatcaaaggaactcaagtcagatgaaagacacaatatgctgccactagtgaatagagcatgattcaggaaagaaaaaaaaaaagcaaattgagcaaatctatcctaccacgacttggatccccgtcgatctccaccactccaccacaagctccagatcccatccatctcgtctcccaccgtgggctcacagccggcctcctctggcatcgaaatccccagctaacggcatcttcctccaccggggtgtgactggccggcagaagcagccggtaggggtcgctactcaccagagggcggaagggtggtgcggcgccagagacggtctcttccactgcgaaaggcggaagggcggcgcggaatggcggaagggcagcgcggtgcggcgtggaagggcggcgcgacaccgtgcaggtcgcgctagcgtggagatgggagaggataaggttgcgcctcagagaggccgaaggagcgatttttttgtcgctaaacttggagtcacgggatcacgggatggggagctaaactttagccgatggggagttagttttactctagatgattttactctagatgatgaggcggtattgggtctagtgggctgagatatcacatgtgttattgggccatttatatatttcggttttttcggttaattcggttacccgagacccaagaccgaattaaccgaactaaattcggttagttgaaattgcagatcgaatttgtgaccgaatctctcggtctcggttatttcggtttctgtctcggttatttcggttcggtctttttctgcccacccctaatcagaaccattttcctcaaaccaaaaccaatcatatgcatcctcgctgtcactcgcgtttgtccccgtcatccagtgactgacaaactcaagaagaaaatcatctcctgtggaaaagcccatttgcgccgcttagagcaagtttaatagtatagccaactaatagctctaaatcatttatagctaatttaatagtcaattcatacaatagttatctataaacaaatactacaatatcaatacctggtctggcctatcatacacacattatgtcttgaaatctatgctgcagctacctgcaaatctatagcccactatttttctctcttttcttttatctcgttaaaatatgtttatagctagcttaattatagtctgctattgtacctgcttttgctgggtttcctggatagaacgaaggtagcaccaccaaagactcttgaagtcaccaacaaatacaagactttgacgatgatctccaataatgagtactagtatgtaacttgggaggctcgagaccagtaggtcttgggcggttgggctatcttttctcctcgctttctcgcaaggtgctcataagtcataacagccgctgcactgaagacgtctgccaaggtgtggtagacgattgaggacatgtttgcatgtcagtctcaaacttgtgttctcaacacgcgtattttctctcgtggccactcacaaagagtttgagtatgttaaatatggagtacaggtggtatttgaatcttctgaagatgaagataaagattaaggacctgtttgttagagctccaacgcctaaatttagctctaggagttgggtctggagtggagttgtgtagttgcctaaacccagctccatctctctagtttattttgtgcgctccacccaactccactcccactttagtggagctgaaactatttgatccactcccactttaggtggagctgaaactatttgattgagctccagctccaggagaagtagaggtgaaactgtgccaaagtgccaaacatgccctaagtgttttacgcaaaacgagcaaaacgaggtagtaataacgcatgcttaattgagctttaattattacaaacttgaaaaatggattaatctgatattttagaacaactttcatatagaaagctttgaaacgcaccgtttagcggtttgaaaagtgtgccacgagtatcgaaaagtttatccaatttttattggagaaaagaacatagcatgtcaacaagatgaaattaaaggccttgctgacgagatggagtccgcaggaaagcatcttgacgatgatgatctcgtctcctacatcgttgctagtatggatgttgattttaatcccgttgtgacgtacgctagttgcaaaccggactgaagctatcaccgtcggtgaactctttgctcaacttgttagcttcgaaactcgtatggagattctgtaaggtggctccaactatgattcgttggccttcactgtagcttgcgaaggcttcgaccgcaggcaaggtggtgactgcatgcggccacgtacgtcggcgcgaaaacaatattcatcccatagaaacaaatattaattgttagatttgtcactataattgcttccaaattatttctcttcctccatttcatattacaagatactttaaatttttttcaaaattttaagtttaaccaagttaacaggaaaaaaagcaacatctataaaattaaattaaattagtttcattaaatctaacactaaatatatatttaaataatatatttttaaaaatatcgttacatttcttttatgaatttaatcaaacttaaaagaatttaatttaaaaataagtcaaaatacgatatgaaatggagggacgaatattctttaaaatttagggtcataagtaacaaataatagtcataatagttgtttatcgaagaccgtcttataatatataaacaagccagttagtttttttgccatgttttacttgactcactttgtcatggtatcaatcgattctgttttttctgtacatcttttccctaccagtaaacatggggtttccttttgctaatccttctgcactgttgtctgcctatgttgttgttttcttttactaatcactaatcatccttgctagtacaactatgcatgactgtgatagcttcttactttcaggtactcaaggtcggaaggtcccctttatactcaagatgatgatcctgatcccaggcgaggatatcaagaatccacgagaggttttaagagcatcctagcagatgctccattcggtactccatctgagatttagcgcacgaaagtgaaaatcggagctccagcagacacaccatcgaatcatccaaaaatagaggatacgcaaaaacggagagaggaaggccaaatatagcgtttctctctccaaacgtcatatcgcaacggccgcagctcccgcccctatctgaagttccgcaaccttctgatgaaccctgagttcctctcaacactcaaggctgatgttggcccgatctttcggtgagttgtgataactacgatttgggagaaacgttgacgatccgactacaaccgtacgagacgttgtgttgcgccttagcgatcgatacacctctccgtgggttgttgatcttgccggtgcagatcaaccctattcctgcaagcaaatcgaagaaacaagcaagaacaagaataaagcaatctgatattgcaaataggaatttaatacaaatgataagttggggtttcgaatacaagcagacggacggtctggccgacacgcgcgctgcaagcgaagtagcaatggctaaactttcatctaaacaaaacccgagaaaccctgaaggggtaactagctatatataggggtgggaggacgacctaggggtgcctagggtcgtgctccaccagcttggggcgcaccccacatgggccccacctgggccggggtcccaattgaagttacaagcccataggcccattataggtgatgcaacaccttgttcctgtgattctggccacacgagatagaattcagagaagaggctggatccgttagaaagagggctccgagagctttccatcaagtactcacgggccgaaaacggaggtcgtatgcagattcggtggccgtttgaagtcagcagtgtagtaggtggccgaatcggattccagcacttggagtacttgatctcgatatcttcttgttcatccatgatgtgagcaatggttgcatccgtggtagccatggtcacatcatcctccccttcttcacggaaaaccgtcctcggtttttccatatggtgctctttgcgtagtccatttacaacaacctgtttcttccaatcaaaacaaggcaaactcgagacaatttggttagcaataacatttttctctagcttgcatattttatccacatgtacaggaggttctaaatccgagcagatgtaaactctatgcacaaaatatattccaagatcattatattcaccaaagatgtgaaatataacattggttggatatggcaaatcagacttagcaaataatttctccttgaaattatcgagctcacaaaaatcatcaaactgaacatagcccaaagtatttaaagaagatctcaattcacgctcctctacttcattagcaatgtgaacaacatgcttaaaatcagtgcagtatgaattaacagtaggaatagcatgttcattcacaagttgtggcatggatataagtgaagcattatcgcataactcttctttatcacaaggaacagcaaacaaatcaatttgtgacaaaggaatctcagcagttggttccactaatggttgctctgctatagcatgaaaagtggacaaattcaattcattaacaacacactcacctttattaatttcagcaccattaagtttacctttgatgccctcttcagataatggaggtgcctcgactttgagtgtgatcaatgggactggcggctctttcatgtctctctcctccttttcatgattatgcacttcctgcaaatggttagtaatagaagacaaaaacatagcatgttgcttcttcatgtcctcctctattttactttcagcattgcaagcaagttgtaacaaatgagaaagagatgtatatctttgacaatcaagcatgtcctgaatttctttgttaagcccacataaaaacctcaattctttagcttcttcgcattcatctaaaccacaacgtaataaacaagcttgcatatcatgatagtatgaagtaacagttctggtatcttgttttaaacattgcagtttattgaacaaaatgtcagcataatacatgggaacataaacatctctgaaatatcgtttcaggtctttccaagattgtggtattttgttatgcctacaaagatgtttccaatcattagaagcatgtttaattaaaacactagaggcacacataaccttttgtttctccgacaagacatgcttttgaaattcactatcaaccgctagctcccaattaatgtaagcacgaggatcatagtctccctcgaaataaggcagtgcagatttgatcttacctagaacatcatcacttacctcataatggtcatgttgatccctcctcatgtctcgacgaagatatcgatgttgagcgcagctatccccaattatcttgcgtatccctgccattgttagtagaaaacaagaaacatacacaaaaatatgcgcgttcctattaactactaggtagtggcagctcaaaaatcgcacacactcaagcttttaaccaagctcttacaagatcttaccaatgcaagtggaatggtgacatacaccgactcaaccaagcaccccaatgaaggttggatgtatcgatgccttggcaaacacttgcggtacagctgtaatcaaatatgtggagctctgggtaggcttaaatatgtagcaaaggaatagcaaatgctcaaatcagataatgcaaagttgaataattgttcaaagtcaagtatcgtgctggtcctaggctagaacgtactagagacgcgagcctagacacaaacgataccacaagatagcactaggaacaactcatgcacaactctgatatatgaagttcagctcaaacataacagtattttctcttttctttctttcttctttcttcttttctttttttttctttccttttcttttctgttttttttggtgcggctttttttttctttttttttttgcacctttctaccttttttttcacttttttcttgatttttttttaacaaaaactgactcaaggaccttaatgtaagattacagggactcaaacataaatataaaatttacagggactcaaatgtaaaagtctaaacctaaaattaaaattatacaaaaaatggaatgctgaatttatgccggttccgtttttccaaacagatctcgaaaccgacaccaaacaaaaattcgccaaggtgtttgacacaactcggaaccgtggaagagagggagggagtcggactcggccaaaggggcgagtgggactcggccaggaggtggagtggatggcagccgaatttggtgtatgggataaaaaggaaactgatttttaaccaatccaatctactatatctttccaaaataatcttgactacttccaaaatcagatatggtaattcaccttcctcctctcgtgcacgacagaggcacggccaaaacaaacacacacaaggatcggcaaactctagatgcaactcaagaactctaaaactaaccgacagaaacttctgaaaactacaaaaatagaactgtggcagcgagtcgattccgttttcgtaggtcccgacaacaatagagacacggtggcagcgacgactgtggtacaaaacatgaccagaactcgaaactctaaacgaactagacgctaagaccagcaacacgacgtgacgatgcaacacaaaattcaacaaagcaaaaactgaaaagaacaatgcaatggcacaatatggctaggtaaatgatacgattttttttgtatggctattttctggttataggaagataaaaactcaccgagcaacgaaagctctgataccacctgatgaaccctgagttcctctcaacactcaaggctgatgttggcccgatctttcggtgagttgtgataactacgatttgggagaaacgttgacgatccgactacaaccgtacgagacgttgtgttgcgccttagcgatcgatacacctctccgtgggttgttgatcttgccggtgcagatcaaccctattcctgcaagcaaatcgaagaaacaagcaagaacaagaataaagcaatctgatattgcaaataggaatttaatacaaatgataagttggggtttcgaatacaagcagacggacggtctggccgacacgcgcgctgcaagcgaagtagcaatggctaaactttcatctaaacaaaacccgagaaaccctgaaggggtaactagctatatataggggtgggaggacgacctaggggtgcctagggtcgtgctccaccagcttggggcgcaccccacatgggccccacctgagccggggtcccaaatgaagttacaagcccataggcccattataggtgatgcaacaccttgttcctgtgattctggccacacgagatagaattcagagaagaggctggatccgttagaaagagggctccgagagctttccatcaagtactcacgggccgaaaacggaggtcgtatgcagattcggtggccgtttgaagtcagcagtgtagtaggtggccgaatcggattccagcacttggagtacttgatctcgatatcttcttgttcatccatgatgtgagcaatggttgcatccgtggtagccatggtcacatcaccttcccctccgtcgtcgactcgtcgtcaccggctggaaggagagggaggggcataccagatctagaagataacgtcgccgtggtatccatgctcccttccgcccctccatgcccgtcgcctacctccacccctcggctatcgcctgtctccaccacgcccaccggccgccgccgccgcctccgcgcccatctgccgccaccgctgcctccgcacccgctgcctttcacgcgcgccatccaccgccgctccacctccacaccatgccgcttcgctccgcccgctcgggcgtatcggttctgttcggctggagaaaatggatgctggggttggggtttggtcctgggaacgttgatgtttatatttttttttctttgctctcacagtaaacttggtagactgttgttaatcaacctcaatatacgtgagagattaattagtaactatgtgaagcatgtttagcaaataacattattttttaactaattcaggcttaaaaaacatatacataacaaagttggttagaagatattattaaaatatatgaaaggtgatatggaggatgtaatatggatgatttgttggagtaggaataaatatagagagagaatctttttagatggccatccaaactgagatatggagtaccgaaaactgagatatggagtaccgaatttagatgagttgctgggcatgctctaagccagatgctaatactacatatgcatggccatctatttcacatactctcatgatgcaactataaaacaacaacatacgtgttcttacttcgtttttgtggttaatttcgccgcatgttcttaatgcgtttttttgtggttcatggtatccatatatgctacaagactacactagcatgactgtgccgtatatctcgtatatgtaccatatgtgttttgattgacagtggcgtacaccatgtagctgcactaaatttagtaaaaagaaagaaaacatgcatctgaattattcatataaaagaaacacgtattcatagacagatctgaactagtaacggacaggctgaatctgtagtgaatctagtaggcagcgggtggtttgggcttgttgttcggtttgaggatgagatcggctagaggataccagattattggtcgcttatgggcttggacgccggcagcgaagaagaggatcagggcccagtccgacatcacggcctggtacaccctcggcaaggggaggacgaggctcatcaccacgagcagcacgccgcacgagagcgcgaagccgatccccaccgccgccgtctggaagtccgacgatctcatcgccgcgcgtgaggccgctgacgccatcgatccccggccccctcccgccgccgccgccgccgagagaattcccttttttttttcttttgctgatcctatcaatgtttctcttggcccttgccccccttctctttcaatctgttgctgtttaggttatctgatgttggttggggtatatatgaactggaaaaatataaatcatgtactaatccgtgtcctaaaacatctcggtccccgatctgtttggttatctgatgcgtattggctcgcgcgcgcgggtcacgaggctggtcgctcaccactctccacgcctcccgccattgccgtccagttcctctcacacggagcttggccagctcggcctcatataatagcatatatgttttctcattatattattcaaatatattaaaatgacaatataattttaaattttgtaataactttacaaaactactaatgtgcaatattcatatggtattttatatacgtgtttgttattaattattttttaattccaaattttctgtaaataatatttttatatagactataggctcttcttccaatattatttatttttatttttgaatttttattatttctaattgtatttctatgtgtactctaaactcatttttcaattttctttagtttttaatttcgaatttcaattacttctaaattgtattcctatattgactttaaactcttcttcccatgtttttcttaattttgaatgttagttatttctaaattatatttttatacggactctgaactctacttttaatttaattatgtttattccgaattttagttagttttaatttctatatgaactctatactctacttctaatatttcttatttttttaattccgaatttctatttttttaattgtatttctatatggactctatactctacttctaatattctttatttttaattctaaatttctattatttcctaattatatttctatatggactctatacacttctaatattccttatttttaattccgaatttcagttatttcctaattgtatttctatatgactctagtctcatcttctaatattccttattttttaattccgaatttcaactatttctaaattgtatttctatatggactcttgtctcctcttctaatattccttatttttaattccgaattttagctatttctaaattatatttctatatgtgtaagttcaagtgccttaatttggtttcggtgattaatgacacatctaattatatgagactaacgtttttatgagcctttctttgactagtcttatttggatatgaaagtaaaaatgatgagaggtatgtattaaaaacttcacatattctaacttggtctctcttgtggatccaaaatatagtgtgagctccctcattgatcttgattgataatgtgcatatgcattccttcatatccatatatatatgcacatcttgagggggagcttattctatattttattcattataagatctctatcttgatttgaaattatctttcatctcatcttattgtattgtttatatcaggttattatctatcacaaaagagagaaaagattgaaagattttggattaaacaatttgtgtaattgttgctttggtgatagatgataaatcgatgtttatgggattaacctctctttttcataagttgttaactaggttatttcccgatgatgagatgtggtagatatgcattctttggtgatggaccttaatcatgacaaggatgaaatgcatggaaataaaacgatatgtaccacttcttatctcctttttgataggtttatatgtatgattttcatgttattgttatataagtgtgagactaatgtttactcgagtcatatcttatttagtctaatttacattaagagcatggagattatgaaggtatatgttttatattggtctacatcattactacatatgccttctctatgtgtataggataaaccccccattggttcttctttacttatgcatacacttgtctctcttgtatatttctttgtatgcatatacttagggggagcaaatcctatacatttattgtgtatgttctagatccatgttgttcacctattatttatatcggatctttgcacttgagcttgcatacgggtatatgacacttgaggtgtaaatgaatactcaacaaacatatccatatctttcatatgcaaccggttggtcatcaagtgaaggatgacaaccgatttgttgagactaatgttctcctttgagatgtgaaaaggaataggttccatcgtaatgaggctaatggatgacaacatgggttgatggtcaccaagacaaggacatcgccatgttgacaatagtgaagtcaagattgtgatgagaagaaaggcttgacaaaggatggtcaagacctcgggataaacatggttcaagcaaatggtcacgagtgttgatcttggctcaagcattgaccccaagttggatggcgcaaggcaaagatataatagaactaaaaatgttttcttagtcttttcccggtcttggtgtttggtgtagaccggatttgctagataggcgccgtactatcaagaggggtctatgaagcgagcatgtggatgatcttgtgccatattagttcatatgcatataggtgtattttgtgggcttgtctagacaagtgtggtgagttttatcaagtcccaaacaaagagagaagtgggcacatcctataggtttgggtagcctcatgtggttatgtccggtggagtatcctttggagtgtgagctatttctccctgataaaagttgtgtttattggatggattgttcatgggttggatagccctttgaataagctttccatatagtccaagaacgccaaattccgagatccgagtcaagagatatcgtcgttttactaacggttggttgtgctgaaaagtgacctgcggtctgaccgtaggccttaggtcggtctgaccggggctgttagccggtctgaccggtgtggtaaggccggtctgaccggccctactggtctgttgcactggtctggtttttggtggcgatacagagccgccagagccgcaaccggtcagaccgagccgacggcggtctgaccaagccgtggacggtctgaccggccactacactgctgtcagaccggccaggttgagtgggctcaatgattgccctgtaacggctagttttctagccgttacaaagtagtccggtttgaccggccactctatggcggtctgaccggccgagcacagagttggggatttcgactccaacagctagtttaggtggttgggagtatatatacctactccccagcagcaagattaaggttttggcactccattgcattatcttgaacctttgcaagagctctcacatccttgtgaacttagtttatctagtgatgtgttagagagtgggataagccaatccaagtgcattgcttcattgttatagctagtgtggcacttgatcatcctcagcaagcatcctagacttgttactcttggaggttgccgcctcctagacggcttgtggaggtgttgcccggtgacctctccgaggagattgtggaggaggcccgacgccggttgtgagtagtttggagttcaccaacttcggagtgaaggaagaactactctagtgatcgaggcttgggtagtcctctccgtgggccggctcccaccttgcccacctcttgacgaagggggcgtgcggtggcttcgtggttgagcggtggagttgggctcgcctcaacggggattaggaaaccagcgagtttccgaacctcggtgaaaaatccctcatctcttgtcccatttatttgttgcatttacatttgagcaagtttacatagtagagcttatttgtgctattatcaccctaggcttgcaaaccttaacatagagtagcttctttgtgcacttacgtgagactagttgatttaggttttgaattgtgcaaaaccgttttgatttacgcttccgcatacaaaactcgattttagccaaaagttttaaaaccgcctattcacccccctctagtcggccaaaagttttaaaaccgcctattcactcccctctagtcggcctccttgatcctacaatatggactatgcttttttctttttctttttctccgattaatgtgagaatttataggtcatgagagcgaacgaggagactcctttttctatttctttaataatataatagatttggacaggcccttgttcagatttattggactagtatatattctatccaattccaaattgatgcgttgaagacgcctgctgaggtgtgatagagtaggtagacgatcgatgacatatttgcggatttgcctctcggactttattctcaacacgcgcatttctctcacgaccactcacacaaagggaatttgatttgagtgttgtggagtaggtcaatatataagatgaaaggccttgcggacaagatgcagtccgcaggaaagcaccttgatgatgatctcgtctcctacatccttgctagtatggatgttgattttaatccggtggtgacatcagttgcaaaccggactaaagctatcactgtgggtgaactctttgctcgacttgttagctttgagactcgtatggagtcgtggaggctttcgaccgcaggcaaggtggtgactgcggccgcggacgtcggcgcgacaataacattcatcccatggaaacaaatattaattgttagatttgtcattataattgcttccaaattatttctccttccattttattcatattataagatactttgattattttttcaaatttttaagtttaaccaagttaacatggaaaaaaagcaacacatataaaattaaattagtttcattaaatctaacactaaatatatttcttaataatttttttgggttaaaaatattgttatatttcttttatgaagtagtcaaacttaaaaagatgtcaaaatgtattctgatatgaaacagagggatgactatttttaaaaaatttagggtcacaattaacaaataatagtcatatactatgtttattaaagaccgtcttataatatataaacaaacctgcattttggatttgatcgattgatttagttgtgagggaaaaaaccccattaatccgtaccacctcctccaaaaaatactcaatccttgatactctgtaataaatatggccatatatattgctaaatacagtctgcggtctgcctatacttttgatttttttttcaaaccaccctgttaggggttaattaatctaaccatataatgtgtggtccaaaaccgatacacgcatcatcgcaggggagaggaaacggctcaagtgtgtactggttgccagcatgtttgacttggagcttcgattattctatgcgtgtcttgtacccaacgttgcagttgcactgccaccgagggcagcaacttgccacaaactttctttgccctaatttggtacgagcaccaagggattagactaattaaacctattgagaaaccggtcactaatcgttaactacctctacgtatactctaaaaacctcgtgaacagtcactggcatgtagaaccaattacgcctaacctgccaacaaatactataacgttagtgtgtctagctccgtaagagcaagaagaataatagtaagctataaaactgatataagctatagtaagctataaaattgatataagcttatgtgaaaaagagaagtaacaaaaaaaataaataaagaatattggctgttatgcaagagctagtttaacacgtgttgcaagacaaatatattaaatgtataagtaagagagaagaagaaaaattaaagctaatcttataactaatctatcatatatgttggttttaaaatgggctaaatgagtttacaattaaacttgctataacaaacatattctcgtaataagataaggtgagaacacatgacagccgccgaccaactaattaagccccaaacatgagacaaaaacgacctcgaattaatcatgggtggcaagtgcgagcctctgacagaataattggacctcaaatcgatcgcttagttaggatttatttctgacttgtgatctgcgagcgctgtgaaggtggggggtgatcttgatttgtttagcccagctgtggggcaagatcctaagctggctgggtttagcagttttcaaacgcttaaataatgcgtcgccgggtttggtgattagcgctgggaatctcttcgcagatgggaacaaaagtccaacacgacaccacacagggcaatcgggggcagcgtcctgccattttccgctgaaaattttgatcggtggttgacccctcttccgtgtgtgggacacgggtgaaattaaacggcattacgtccatggaaatggttctcgattgatcggtagttttcgtattttatgaattctacaaattgactttatatagatgtttaaaaatttattttacttttatagaaattatgtttgatcactcagcaatttctgtttcgtttatatttgacattctccctccgtaaaaaaacatagtattagaatgtgataacgactctataagaatgtccaaattctttgtattattatatgccacatcttagcacaaggttgtttttgttttttttttgacgaatagagtagtgcgcaggggtgcggtactctctatagtcgtcgcagctttcgattgtgtaacaacagggctcgtttgaaacacgagaggggaattactgtcaacgatcactgtgaaaaaaagcctgtaaattttctcgctgtcgcgagcactagcaacgcactcgcgactcacacatgtgtgtgtggcacgctttatggtggcacgcgtgcgtatgctagggctaggaaggtctcgcaggcaggcaggcaacgagaggcttttctcctctataaaaagtggttactgtgcagaggtcaagccacacacacacacactgatacacagatcggcagaaaggaaggagaagcagccaagcagaggccccggtcttgtcaccggaaagagagaaaaagagaagtgaaattgaggaagaggaggagaatgtgatggcgcagcagcagcggcggcggcggcgcgggggctctctcgccgtgctcctcctcctcctcctcctcgcggcgctgctgctctccctctccctcctcgctcgcgtcgacgccgccgccacggtttcgtcaggtagtactctgttgcgctatacctcgccgtcgccggccggccgtgcttctccctcttctttcggtttgcatcgtcgtcgtcgccgtcgttgcgctcatgcccgtggttctttctttctttcttgcagcgaatctcgattggaatgagggagaggtggcggtggcgactccgctaggacaggtttgcctgccttcccagttcttgaatctttgatcatctatgtgcatcctctcctcctgattacgctactctttaattaatcttgtttttgctgtgacaggaggcggtggcggcggcggaggaggagggtgaccggccgccggagagggtggagatggagtccatcaacgactacggccaagccagcgccaacaaccgccacaacccgcatccgtgacatgacctgccaaccggagctggatcttaattagctactactagttaattatctatgcaatgttctcctcattatctaaaaaaaatgtaatgtgttctcctcagtataatactctctccgtcctacaatataagagattttaattttttatttgtaacgtttgaccactcgtcttattcaattttttttgcaaatataaaaaacgaaaagttgtgcttcaagtacggtagataataaagcaagtcacaaataaaataaataataattttaaaaaattttgaataaaataagtggtcaaacgttacaaacaaaaattcaaaatcccttatattataggacagaggagagagagtacttgttagtgccaagctcacacaccactctccctgctggtcaacctgtacttgtagaggcatgcatgtaccttcacctttgcttcgttttcgtattagaaagagagatcaagagaagcatcgatttctagctttgtactttcgagttcgtattagctgaaagggacaaaatctgaagatgcaggcagtacatttgtcactcgcaggggaaaaaagtgcatcgactaaatttgacccaaaattaattcagcagcttcagtcacaactaaaaagttcagagagcttgggagctgagcagaacaaacaattcttgcaaacgtatgtaagttgagtccgccccaattcatgcaagtttctagcatctatagcttctttcataattaaaatctccccacaaacaacccagcttttcatccgatgatgaataatgctgagatcaaggccaaagcggtgactggtgatgacgccaaccggcggatggagcagccgctatcctgactctgctcggaccaggggctcttatgcaaatactcagacgctaccattggtaggctggtagcgatccaatgttttgcaaagattttgcttctctcatctcttgcttttggttaaatcttatctctcaactctaaaactgggtataacatctcctctaactttaaaaaccgatgtaaattaacacctttagtagttttgaaacggtttctgctcacgtggttggtcaactggtccacgtgtgttgatgtggcatcccgttatcaaagaaattgaaaataaaagtggggcacacaagtaagtgacaagagtaaaattttaaaaattgtgaggcccacttgttagcccactactcccttctcaatcttgacgtgtcaccgctggcggcagtggacagtgacggtgatgacatgcatcacccacaatgacaacgagcactgccgtcgcacacgctgtcccatactcgtgcttgaagagccccccgtggcggcgttgaagttgggtccggagacggcagtgtggttggcgacggcaggggtagcaagggaaagagagtagcgaagaagatttactgcttccccatgccaccggcctgtctcaccttctgagcgtcctgctgatatgagagtatcacctacctctgattggctcgccagggaagagaggaaagagaaagaggaggagaggtgaggaagaagatgaaagaggaggaagtcattggcatgtgggtcccacctgctgactcagtgagtcaaatctgccacatcagtagaaaccactccccaaacacccaaggagttgatttacgccggtattcaaagttgagggaggcgttaaaccggttttgcggttgagggttgtgattcaatcagaaccagagatgagggaggccaaatagacttactcattttgcaaaatgtcgtacactggctttaatgggctaggcccacttgtccattgggcgcccccctataccttgggcttccaaccaatccatgggccgggaaggcatcggacggccgagatcctcccatccatcgcggtgtcccgatcgcggccgtcgcaaagtcgcgcacgggacacaagccgaggagggttttgaaaccatcctgggttttccaccttttccagcggccgcgacaagtccagcgaggcgcttcctcctctcctctcctctcctctcgcgacttcgcggcggctcgctcgcctgatccatccgtgtctcgcgcggcggcgccatggcgggggaggcttcgccgcccgcgccaccggagatccccacgaggtgccaccactgcgccggccccctctccaaggacatggtacgcgtgatcccgctccccccaccccaccacagctcgtcttcacctccccgggatctctccccttggtcgtgcaggctccgctgcaggagtcgtgggtggctggtgcccctgcgtcgcgttcgagtggggtttagttttcgtttggcgtccggaattgggtcgtggttctagttggtaagttatggtgccatggtggtgttggctgttcatgtatataggttgtttctcccccttgttgatttggcctgcaccgtggtttgtttttggatcatgctgtgtggatggctacctaccctaggacaagtagtttcggctcgggagggaagagttttgtttcaggccggggtcaaactaatttgtgcgattgaactgattcgtcgtgtgtggttgcttttgaaggaaacgagcagctggacggtgcctccactggttcgagatagcttctccatggtttgtgttcctttgtcttcaactgtgctgcacacataaattactctctctttttttgtggttgcacaactttatcgaattcggcttttctttatctgtttttcttgtgttaggttgatactattgtacattcttttttctatcttgtaaattctgatcggtatgttgctaaagttgattagatttgtttcatgacatgtatgtgatttgttataattacaaacttttacataatactaaagttgtcctagaagatctttgctaataatatttgtgttatgttctgacagattggttctgctattgggggtacagctggagcattttatggtttcaaccacagtaagttgctaacccatttcattcagttactcatgcacaagttggtattttgcaggaaagtaaatcattaggtttctaacaataccttttagcaccttgtttgcacttaatttactgtggggggttctaatagttagcttactgtggggagttctaatagatagcaatatcccctttgcttgcttggctagtttactgtggggagttctaatagttagcatacttataatagtcatttgccttattggtgaacctcagtcatttcaaagctcagaaacatatgtggacaagataatctgtagttttttattgtctcggaaatgtattgttcatgttgtccactcaatgatgattgttatcttctttgtaaaaacaacaccttgcacactatagaacacctttcttgtacatcctctctgtgtccatgtctatatgcatggtaattcctcctgttttaagttattgattgcaacttttgttggcggatgcatcttgaacaaaattgattgaccatgtttgccctttcataaaagttgatatatcttctgagcagcactgattttgaacttcttttgtagctatgccttttgttcgacggtacataaaagggccaatgtggatgcattttcttgttggtgtaagtgacaattctttttcaaagtttatattatattattatcaatctattgagcatgaattaggctgtgttcgggagtgagggttgggtcctagaacgcaaaacgaagcagtgtttagcgcatgattaattaagtattagctaaaataaatttgaaaaatggattaatataattttttttaagtaactttcatatagaaattttttataaaaaacacaccgtttagcagtttgaaaagcgtgcgcgcggaaatcgagggaggtgagttgggaaagtagagataagaactcagccttagagtgttgcagtttttagatggtgtattattttttcacttcctgattatgtttcacaatctctaggtcatctcaaaactagaaacacaatttgatgccttttcttgacacctccgtttctatgtaaattattttaaaacactacagagaaagcattcaaatttcatgttctatctcttatcgccaaaacatctcttatgttcttttacttggacgggatcgtgagttcaaattcacgcgtatggtcacagactcacagttgcatccaaagggcagtctcagccaaatgctgtgcagttccttctggttcaacaaatgctgtgcagttcctgactttcgattaactaatggtgataattactatattcacaacatttaattgactgtctcatggttattacagataaaagtgttctcgctattactgataaaagtgtataaactgcgcagagatgctaccttttgaagcaaactgtggacattgataactctgatctttttttaaaaaaaaaaatcttgcaggcacctccagttattgtcttctcttctgcatgtgctgggttagcaggtcagttactactattttattttattttggttttttggccatttaactatttttttgctcatagttctgttgtctacaaactcaaattattatttgagttttgtgatatcgtggattcgtggtcattatattaggtttcaagccgatcttatttaagttttctgcagagttaatctatcttcctgtttgttttattcctgatgatgactagttgcgatgtttctatagtgccttgatacctgctcatcatagacagttacttgaaactatgagtcttatgactacacatacatattctgtttttaaggatgttctatgcactctttaaaatatgtatgtgagtacctttcttgttgtttacatgtaaacaatgccaggacgtagtgttatattgtttatgctgatagatcttatgagctcgtgaaacattgactagtcatctgccatctggttactgtgtggtccatgttatttctcattgacgaacctagcgagtcaaggttcatcctggaaatgttttattctcttcctcaaatcttatcttctattcaatggatctccatgaaattgttcgctacagatacattgattggaggccaaaaaaaaaaatcactaaagcgcagcaatgacacatgtggttttaataataatagaaagaactaatagttggaatattcagatgtagttcaaaacctcattaaaattgttgatttttgccatgtcactgtttttattcactatgcgtgatggatgatctgaaggttgatatgtttgtaggtgggacaataccagcgcttgcacagctggtatcatcatcctatcactcagccacagcgtcgtcctttgcccacacaacttctcgtgatgaaatgcataaggccagaagctcctcgacattgtgatctacagtggcagcaaattgttaactggaatcctaactatccaaaacaccatatactattataaatgtgcatgtgttaccacatatcatctgttttatgaggaatgctcttgtaaatggtaaaactttcccctgtggaatagtgcttatatatgttcccaattttgctatttatcaccatgcacaggctgttatttttgttatggtgtcgcaataagcctggagtgttgcgaattgtgatctgctttaaccttcaggatgccattttcgtttgcaatatatatgcacattaccttttgctctctacttgtctaaacatttaccatgtacgatgtctgtcgttttgactgttttacgcgcatgccattgaagtgagtttttacttatgtgatctgtactcctgcctcaatttatttgatggcatgtggcagattaaagtgtgttgtgccaccctaggaatctaatctaggatacccctgccggtgccggatcaccgtttgtgatgaccgtgcatgatagggtgtggcatggtgtccaatgtttttgcatgcattgaatcgtagccatcatacattgaattctcgcgcctcgtttcggatgccatttgatctatctcctctcgctccatccatttcatgtgccaaaaaggccactgatgatgcaaaacagtggcgatctctggctgaatcctcgcggaatggcagtgtgtggacgtgcctctctttgcagccttgtgttgtgatgtgttggagtacatgcttacatgtgtacatacgccgaggcactgtgagatgcatctagccacctgcgtcactgcgtgcgactgccaagatctctcgccgaaagttcgacgagatccagtgctctttcaagcactcactcatttggtgctttggcgatgcttcgagatgtttgggaagcttgttgaactagagtggagatagatcatgtatgcttgtgttaattttggcatgttcctttttagaaccaaagggagtaatacagctactatcttaatataattcacgccctatttgggtataactctaggctgcgttcgttcgttgtgatgagttagttagtttgtgtgttttgttttccgcgcgtacgcttccaaactactaaacggtgtattttttgtaaaaaatttttatagaaaagttgttttaaaaaatcatattaatccatttttaaaatttaaaataattaatactcaattaatcatgcgctaatggctcacctcgttttgcgtatcttcccaatcttctccatctccttcaccccagctgacaggattggaatccttgcgtccacaaatattacacatggatacttatggttggattttagttaagtcagcaaaattgtcactggactttatctcttgtagtactccctccatactcacaaaggaagtcgtttaggacattgacacggtcttcaaaacacaactttgacttcttgtttctataaaaatattcattgaaaagtgatatatgtatacttttataaaagtatttttaagacaaatccattcatataatttttatattttcaaactcaacaacttgagagttattcatgatttatattttcaatgtttgacttaaacattatcctaaacgacttactttacgagtatgaagggaatatgtgttaagcgagtgtactcgtaagcatatgtgctcgtctgaattgaaaaattaaaaatctgtcgtaggatgttttctaaactgaaaaaaaaataatatatattttaattatttgcagcagcacaacgtgataatagcaggttgtatggcgcattagccttggactgatcggtcctggccgaagtgcaacgctgtaaacgcagagcccagtgcaccgcaacggaggaaaaccgattggccgccgccggtgtcgtccgcccgcgcgggggactcacgtacatcgttgtaccgcgcccgccgcactccttcgctcgcgcgacgtcaaccacacacaatttcttttagagaaaatataaaaaagcaatccactgctccctccatcacataatataagggattttaagtttttgtttgcactgttttatccctcgtcttttattcaaaaaattttaaaattattttttttttacttactttattatccaaagtactttaagcataacttatcattttttatatttgcacaaattttttaataagacgagtggtcaaacagtacaagcaaaaactcaaaatcatttatattatgggacggagggagtacaaactagtctaagctaataaaaaaattttgagacacatgacacgtactttaagaaatgaaaaccagcggcacgtccctaatctcactaaagtctggttgaaaatccacctacatgtgcgtaatattcgtggacaccaggatttaaaccatattgggtgaagtcatgcactcacaactccaccaccacaccacgggtgcttccccaaattgaacataaattttaattagcttttaacaattcttagggtgaaatgatcttttatagcggttaacaagtaccgctaacggaaacctaccggcagtgatatgtctagcacaaagacacttgtacaatatcattatcggaaagatgggtttgtcaatgattcttcttcgattgatacgcttgtcgatgatatttttaaaatgttctcttttttaatacttcctctgttccatattatatctaaatttattaatattcatatgaatatgagcaatgtaaaaaaaagtatgataatatgaaacggaaggagtataaggaattagatcgcgcgagcgacgcggacacactcatgccgctcccgcttgcccactgacgcgaagcgtgctcgagtgctcgaccagccttcgtctccgctcgcctcgccgtcgccgtacgtcgccctccgcgacagcctgtgctcccgtggctccacccgctcgcctcctcctacaaatcctccatcccgcctcacctcacctcacctcacctctcactcactcacacgcgataaaagagtttgcaacaagtggtctccttccatggacaggtacagggtcgcgccgcgacctgtctacctctccgccgccgccgccgccggcggtgatcacggcgatgggccccgccgcctgccacgcggtgtcgccggcggcggtggcgccgagctcgacatcttctccgccgagcgctacttcaacgcagacgacgtcgtcaagaaggaggagtaccgcgacgaggagcagccgcggcaggaggtggccgtggatgcggccagccagagcggacgcaccgtggcgtgctcatcggaggcgagctggaccagccgctccgggctgctctccggccacgcccagtccgccgcgtcggcgggtgctgctgctaagctccagatgggtggtgccaatggcggcggtttaggatcacggcgccgcttaaataatacctaagttttatgtttaacgcaccctcttgactttttcgcataacggcttatttaaaaatttaatataaaatattttaaaatcctaaatttatattataatttttttatcataaaacaagttacaacaaaactatgcgatttatataattttttttagtaagatgtcaaacgtcatgttaaaagacaacggcttgacggaagtacttcttaaatgccatatcctttatatactttttttcgtgtgaaaacaaatcttgtttcgtttgaaagaaattgggatttaatctaactgcactttgggcccccattttgggtttggcttttactatatcagctccgaattttaaaaaacttttgctgcgtgcgtcttctgtaataatatataatagattcttctattgtgtcaaaagctcctcccaaacttctctaagaagtgggcctcatttttttcaaaattttttttcccgccttttttttaaaaaaggaaaaaacggattcttattggttggtctttttccccaccttgttaaaaccaccaatctttttccaacttctagcttggtgagaatgttacccacctttctacg

SEQ ID NO: 7927 - DNA, 30905 bp, Oryza sativa
aagatataaatcacacttaaagtactatgagtgatagaacaactcataacaaaatagattataattacgtaaattttttgaataagacgaatggtcaaacatgtgagaaaaaatcaacggcgtcatctattaaaaaacggaggtagtatttaacaactcatcttattcaaaaaaattatgtaaatataaaaaacaaaaagttatgcttaaagtactttggataataaattaagtcacacataaaataaataataatttcaaaactttttaaataatgcaagtaaaaaagtcaaatagaacggagggagtaaaacagatttgaacagaacagttcagatttgttttgtaatagatgatgtcaaatccatttctaaattatttatttttttcctaactaagggtctgttcactttgataccactttcaaccttatcaaattttggtaaagttaacaaaaaaaaaaatggttacatttagtttgctgccaaattttggtaactatataagaaatcctaccaaaattttggcaagttaccaaaattttgacaactataccaaaatttgataatgctaaaatttagtaaggttttttttttattaaagtgaacaggcactaagagagtactccaaatagtagtacagtgagtgactgtgaaggccagccagccataagcctaagctaacctaatcctccgtcgcgtagcaagttgacaaggccaacttgcccagcaaccagcaggtggcgcggccgtagcatggcgcacgtacgcgcccaccgcatttccgcccaaacgggggagctatccgtgaccgtgcgcccctatccgaagttgttaagatcattagcagttcgaaagaacgtgctaatgatcttaagtcagaaatcagaacagaacgaagccctaacatagtatgatccggaccggcatcctaacaacctcgcgggcgtgatatatcctcccagggttcacaattccgacgaaaaccgatcgaattcctcgaaatttcgacgtttcgatacggctcaaaattaggttttaattggaatttcgaaggctaaacagtatatttggtcgaaattcagtcggaatttatcaaaaactgattgaaaatcatcgaaaatcgtgatatcaatgagacttaaaatttagtggtcaaccggtaatgtgatcctccttcccgcttgcaggtgcagctcgatcgcgcgcgcacccggcaccgaagcgcagagagatcaggtgccgcggcgaccggcccggccacgacgaccaaaacatatcagcattcaacacgatcccgcgagggcgcatgctaaacaaccttatctttttctttttcttatgtttatagttatcaaccaaaatttaaaattttaaatcgttaagaacacgtgtgtgtatatatatataagaaatttataaattattttttatttgtatcctaataagcaaaaagatagccgttccccaactgccgtggcagtacagcctacaggtggtgtacctgcatatggccggcaggcgacatatccatcgccgtttggtactgtggcgtactgagttgtacgtactactactgtgtagcagccagatcttttttttcttcctaaaaaagagggacgtaacgtaacaaccgattgataaaaaactactaacctcttctgtcgcacatatattttcgaataaaccaaaacggcttattaaacaataaaagttaatttataagtacaacttctatatatttgttcgtagcgacttaaaagctaacactaaaagtaaattacatttaaaatatttaaaaatcattcaaaaagttaaattttagctttttctttggtttattagaccaaccaataaggctctatgtctgatctgatgagggaaaacaaagagcaagtttaataataaatgagctataagattatctcttttttttctcctcctctttctatctcttacctatgtatttaatgtatttatcttgaaatatatgaatagctagctattgatgagagccaaccctctttattttttaaattctcttttctccacagttggtttatagcctctaaggacgggcaattcagtttgtataccgcgtgaagccgtgaaagttgaaacagagccggtgagttccatcgtcggacggtcgccgagaagaggttacgcaaaatatgcaacgatagatcatacgttccctatcaaaatcgcgggtgttttgcttgggaaggcgtacgccgtctccgtcgacgatttaatttgtcccgtccccgcttggattcaatgttcgttgccactgatcaagaaccaataatatggtttaggcatttgcttgctcgctaaattgccctgcctcggacatcttaattcacatcgatcgaagacgacgacgaagaaggggatcagtcctgcatgtgactcactctgatttaacggtgacgccacgctgccttgtgtctagcttccctctcaatatactactactcctattcgtcgtataaagagttactcactccgtcaaaaaaaaatcaacctagaaagagatacgatctctcctagtatgataaatataaacatataatttgtccagatttattgtattaggagggatcacattgcctcctaagttgagtttttttagacggagagagtagttttttttagaaaatctcagataaattagtatcacattgaaaaagatgtcaacgtcttccattaaaggcttctttgggacacatgaatagaaaaaaaaaaatagaaatgagatgccatatgtaagcaaatcccatgaaatacaaaacacaggaatttgcaagacaatgtgtttagatagctcatagtaaaaacttggggatttggatggattttagagagagaagagagagaaatagaggaagcattggacttctcaaagcaatgttaaaatgaggtaggagagctcatgtgcaaaattcctaggaattggagtataggattacaattcaaaggaattttcctatgcttcaaacaagctagatagaaaattttccttaagatttaaatcctttgaaattcaaatccttgaaattcctatagaaatactccatttcaaaggagccataaaccccatagttcgtagtagtgactattggttgtcctgaccatgattttcttttcaatgaattcctaagcatggtttaattactctgcagatactttttaatatttattcacttcttactaaaatatagcaaccaagtgctcgaatagacaccacctaatactaatatttagtagtacgagtatagacaggtccctttatttagaatcgttgagctatgtggtatctactatgttgctactctcttcgtccctaaattaagtactaattaagtatattttgggatatggagggaataactttttatgggagagattttatatgctaaattatagtataattttaatacagacccttgcaattgattttgcagtatatttcgcacaagctagtctgttatccaagtatggacttcacaaacaatgagaccctgtttaaaagggactaaaactagttttaagtctctatcacatcagatgtttggacactaattataaatattaaacgtagactattaataaaacccatccataatcttggactaattcgtgagacgaatctattgagcctattaatccatgattagactatgtgatgctacagtaaacattatttaattatggattaattaggcttaaaaatatgtctcgcaaattagctttcatttatgtaattagttttgtaagtagtctatatttaatactctaaattagtgtctaaatatagagactaaagttaaatctctggatccaaacaccacctgattcggttgtcggttgcaaaaacaaagagaagaaaaaaacatttcccttcaatccccgtgcatttaatttccctcgtactaccaaggaaaaaaccgaaaaatacgttcccactcccacgcacatatggcctgcacgaatcgtcatcactctcttcatttcacgaaagcaactttaatttgctaaaggaaatcagacaggttcggaaagacaaacgagtttccatttttaaaaagacaatatactctctccgtttcaaaatatttgacaccgttgacttttttagtatgtgtttgaccattcgtcttatttaaaaaatttaaataattatttattcttttcatatcatttaatttattgttaaatatactttcatatacacatatagttttacatacttcataaattttttgaataagacgaatgatcaaacatgtgctaaaaaatcaacggtgtcaaacattttgaaacggaaggagtattttcctaaaacatcactttacgtcgccttattcttatatcagtgacactcaacctatccgtaaggctagaaatgaacatcatgtggacaacgtatcatattaaatctttagttttcctaagccactaccaacagtaacttgctccaccataggccagtattttgctacagagcaacagttccttccggctgcgttgccgtgtgatgctctgtcgtggctgtgatctgtccgtccgcttgccaacccgatatgcttgccctccacacagcacacacccatcaatccccaattcatgaaaataaatccctaatccatctgcttgccctctccaccacacacccatcgatccccaattcatgaagataaatccctaatccatcggagaaatcgacgccatcccctctgccccatcgatcaccagttcgccggcggctgcctttctcttccccgacctgcgttcttccccacccaccgcctgtgattgtagggttgccccgtggtggttgccgctggttatagtcgtcgtccagctatctctatcggtcaggctgccggcgcgctggccgcacccatcaaggctcccgattgttgccctggtcgagcggctgccatctgccagcctgtctgctctggacagctgcctccatcctcggttttcttcagtaagtcttttttctctatactgctctttgttgctgttggatgccaatcttgctttctttcagtttgagtcaccgagacaatgcccaggctgatcaatctttgctgttgttaacagccaaaacatgaatctatttccctatgcttccttgcgatagttaggctgagtgaatactaccaaggttgcgattttttcagattaaacactatatgacaaaatgctaatgaacgaaagatagatatgcgcttttccttgatatgttctcattttgcctgtcagtttattaaatatttgtaggccgtcaacttgcagcttggcatttggattattgcagtgctaattttgctatttattttggcttgccatattgggtcgatttagaatatatgtacgcttcagcatggcatttggtcttggtggtttgattttgaactctctgttactgcctatcaattccctatgtgcatatctttttttttaaccttctttccggtttggtgctttctttcataaacaaaatgcattatagcctcttcattacaatttgcaagtacactcacatttaaagaactccatatcaattggtcaaaaagattaattatgactagatgtgtagtgcattttatctgctttcttttatggctcttcccatatagtttaattagtattacctgatatagcaaactggccagtacctaatgtgccactttatggatgcataaatttctctttatatgtatactacttgattgctacacatataatgatgttttggctgctataaaaaatatattactttcattattatagttccagtaaaccactaattactttcataaatcagtttgaatgatgtcagtctcttctgggccatcaacacctaaaccagcttgcaagcgcaggcaacccgagagagcttttataccttcaggttagctccaagccatataaatgcttatttctacatttgaaaccattttcctattgagctctcctatttgtcaacagatgattctgttgtgccatatctatttcctagggaatattcctagcgatggcgttgttctgctggctgatgacgccctctcccatgtttgtgatttccctacaagttttcatttgccatcaaggcgctctatacgtcgaagactacttactcagtctgctggtataatatttgttgttttgatttttttttccgttctaattgtctaccctgttgttttccaaatgtatggcatttctttccatttattatgcataatcatcactaccaattcaacctaccgcagtccacatttacatatcaatttcccatgttattatcctaattcttttttgaccaaaaattgttgctcatattctaaatcaggatttccccacccggatcctgtaacagctgctcaatcacgtcgaaagcgtaagcttgctatggctgccaaatcatctagaggtttgattatattctttatccactcacatgtttatctacatgtgcactttcatgccttatacaaaagttttttttccctaacacatgttgttttctctagaaattaatagtaccactgaaatgatagagcatcggacgcatatccatgtgctacaacggaatgttcgacaacgaaccggtctgtctcagtcatccaccttggttcctatcaattgtggccatacacaaccttttgcaactgtcgatggaggtctgtcctattcctatttccacttattttactgtgtttctctcctaattcttcaacaaatgtaaccaatgatagcatgttcatcgtcgacctcttcagccctattgtctccatctcccacacatcaacgtaagtttagtcatatattagttctctacaactatcatttcatttcaccctttacaaatcatgacaactacaatgctaataatgtacagaccatttgctcatcaattctcgcggttttgctgatgtaaacctgatgctcgacatgtcaaatcagatcactcatacagtatgatgctcgacttgctgttcgactcactaatgtaattctgatgctcgacctgatgtatgtcaatcaatagcacgaaaaaaaattcccaccttttacacacacttatgtcattttcttttaattactaggcactattttctctccatcaaggcttgggcccccatgtcacacttgtccatattgtggggctttcttttggtttgaggagcgtgtccgccgagaacagcacagctcatcaccaatatacaatacatgttgtaaaggtgggagtgtcatcttacctccatataggccacccccagaacctttgcatagtctactcacaggagttaacagatcattgtcagcccatttttttagaacattaggttctacaattcgatgtttgccttcacatcgatgggtgtaaatgtcattgattctatcaatgatggacgaggcccatatgttttcaagattagtggccagctctgccatcgcattgggtcactcataccagaagaaggaagacgaccagagtatgctcacttatatatctttgacacagaaaatgagatcaggaataggataaatgttggaacctatgcaaataggagttttcgtcctaatgaggatattgtggctggacttatagacatgttcaacacccacaatcctattgtccacctatttaggacagctcgtgatagattggctgaaaatggtgatgattgatacatcataagattatttggtgatcccgacaagcatggtgatatatttagtgctccagttgcatcggaggttgttgggttagttgttggtgatgtaggtataagtgatgttggccgtgaccttattgtgcaggaccaagcgggtcatttacaaaaagttgaagaaaagcattgtaaatttatgtcaatgcaatatccaattctatttccatatggggaggatggctatcatgaaaatatcacataccgacgttgtgctcgattacaagctatcaaaagaaagaagtctactatggttgaatactttgcatataggcttcatgacaaagctgatgacttcaatactcctatgcgctgcaagagaggaacccaggcctatgtcatagatgcctattgttgtatggaagaatctcgcctgagtcactatagatccaagacatttcagcttaagtatagaacaacttcatttagtgaggtatccactatggtccattcaggcatcacagaagcatcagatgccgggcagcaagttatattgccttcttcttatattggggggggggcaagatatttatatcaaaattacttagattcagttgctctatgtagaaaatatggttgccctgatttgtttatcactttcacatcaaattccttatggtcagaggtaacacaagctttggctatcatccctgggcaacactcagcagataggcctgatattattaatcgtgtattccatgttaagctgcatctcttcatggacgacatcgtaaagaagaaattttttggccctgtcactgcaggtagtaatttaattgttcatgaatcatgacacaacatactgcacacttcatatattcaaatattttgtatgtgtcattctcacataatttttccttttatgtagttgtgtacacaattgaatttcagaagcgtggacttccacatgttcacatcatattgtggttagataagagtggtccattgacacctgctgatattgacagactaatatcggcccagcttccagatccatccattgatcgagttggttatgatgctgttgcggcattcatgatgcatggaccttgtggtgatgcaaatccgcattgttcatgcatggttgacggtaaatgctcaaagaattacccgaaggaatattatgagaaaacaacaatcctgccaaatggccatgtaaggtatgctcggccaaaaaatgatataattgttgcgaaaaatggaatttctcttgataattggcatgttgtcccccacaacgtcgatttattagtcaaatatgaggcgcatatcaacgtggaaagagttaatcgtgatggaatggaaaagtatctattcaaatatgttgctaagggttttgattgttcgagggttggtctcaagcgcaagcgggcatgtgctggaactaatgagattcatgactatttagaatgtagatgtatagcgccgaatgaggcggcatggcgtttgctttagtttgagattcattatactgatcctgctattgagcgtctccatgtacatatgccattagagaataatgttacattcacagaggatgataatctggaacagatcttggataacccacgcaatcgtgttacgaaacttacagcatggtttgctgcaaatagagaatactctcaggctgctccatatacatatgcagagttcccagaatactttacctggcatggtaatggcaaatattgggctccacggaaaaattgccgcaagaaaattgaaaggatagcacatgtttgtcctgcccaaggagatgtctactaccttagaatgttgctgcacattgtcaaaggagcaaaatcctattctgatctccggaccattgaaggacatgtatatcctacattccaatctgcatgtcaagccctaggccttcttggtgatgaccgtgaatggtccttcgcaatgactgatgcgactcattgggcacttccctaccaactccgtgagttatttgtaacattgcttcttttctgtgatgttacaaacccactgagtttatttgaagagcatctgtcttcaatgggtcaagatgcagcctaccaccttaaccatgccacactaggtataaattcttctgcaccttcagtcatacaatatgtcaagtcctatgttcgttccgagatcgatagcatacttagaaatgttggtcgtactttggcacatttccatttacctgagcctactattcaaagcacatccatccttggcaataggttgctaatagatgaacaagcatatgatctagagaagatatcgattgaagcggctgatcagttaggcaagttaaatctgaaccagagacatatatatgatgctattctcaattctttaaatagtgacattgggcataccttctttatctatggctatggagggacagggaaaacattcctttggaataccctactaaatagtgtaagggctgaagggaaaattgctttggcagttgcttcttccggtatagcatcacttctacttcctggtggccgcacgcctcattctcgctttagaataccattggacatacaagagcatccagtttgttctattaagaagaacactcacttggctcaattaattcaacaaacctccttagtcatatgggatgaggcacctgttaatcacaaacattgctttgaagctcttgaccgaacattgagagatattcttgcatccaatgatccatcacttgctaacaaacagtttggaggcattacagatgttcttggaggagattttaggcaaactctcccggttctaccctatgaaaaaaacaggaaatcttatcttcatccatcacacgttctcatttgtggcagcactgcattctcatgcatcttacggaaaatatgaggcttcaatccccaacattgtctaatactcatcgtcaacgccttcaagaatttgcagaatggttgttagcaataggggagggagcagtagcagattcttcacctactgatcgagaggatgtttcttgggtaaaaataccagagtatttgcttttgccagatgacacaagaaacctttcaggccttatctcttttgtatatgatgcctcaatcaattctcacacagccaattatctctgtgagcgagcaattctagccccaacaaatgaaatcgctgcaagtataaattcccaaatgattgctcagctgactactgaagaaatgtcatactatagttcagacacaattgaagatactacaagtaatcgtgccactcttgatgctctttacccaactgagttcctgaacactataaaaatcagcggtttgccagaccatcaccttcaactaaaaataggagtgctgattatgctgctgcgcaatctgaacccaaccagacttataatgactcaattgacttgtcgtgtgatagaaggggagataattacagggaaggctaaaggatccaaggcatatataccaaggatagtaaccacttcaattgataagaagtggccttttaaattaaagcgccgacaatttcctgtatgtgtgtcatatgcattgactataaataaaagtcaagggcaaacacttagtagagttggtgtctacttacctagccctgtcttctcacatggacaactttatgtcgcactctcacgtgtaacatcgcctgatggtcttcgtattctaattgagaatagtccaactgagcatgtgaccagcactcacaatgttgtttacaaagaaatatttaacgatctggatcaacaaggaatgcatacatgattacaggtaagtcaagcatacgtgttctacctattagtaatttgttgtgtttggttgccttgcccccaatgtgagtcctaggttcttttttctcagacctactaacttgacctgattatattctttgtgttttgatacttaatgtcaaatttacctatcttcattgtttgcaggattctttatctgaaacctctgccttgtcaaagcagcacgcagttggtattattacaatggttcagttctttcctgtctattttatgtgatcttcacactcaactttcctctaatatatgccttctggtatccatggtttcttcgtaagtttgttttcctctttttatattttgcattctgaccactaaacaagttcaatgtgaaaagaagtttacagcattttacaggttacctatataaatttgaagatccttgcattcatgcattaattgccaaaagaaaaaaaaatcttccacaccaaatctagattctctcacggctaatgcttttaagtattctatcatatttggtcacacacctattcctattaatttagtcttggtacaagttcatagtatgctataattcattaagttttccatccatatatatgtttcataacatgtcttaccacttcatttgtcatctcatcaactgtcacatgatattattttccctgtttcaatgtgatcagccacttcaacaactgtatatggatgtttcacacacatacctattttacttaaaaattaatctgttattcactatgctaccagtcttgattatggctgatgctcataatgatactataatgcaggctgccatcatacgaagaaccaagcatccaaccatctcaatgatcattataaatttcatttttccatcagcaggtgttctgctagaaaacatatcaatgcacctctatgccctattatgtaccttttggcttgcaagagtgttatacgagataaattatttgtctcactcacctgtatgcctgccatgtaaataatataactattttaattgccaactgactaccgtcatcaattcttttgtccgatgaaataacatatcttacatatattatatgctttttagtaagtaaacttccagtaatatttttgttgtcatgtgaaatattaaaaatatatgcattcacatttatattaacgacaatgcagtttctaatcatatcagctttgacgttggatttatatttcaaaatctacatgaataccttttgtttccgtgcttcactccatgcttataataaccaattttcattatgtcccgcggcaacgcgcggggcacatactagtttagtatatacatcgtcaagattctcacgtagtccttccatcctaaaatatttttagacgctgttaactattttaaaaatatttgaccgttcgtcttattcaaaaaatttaagtaattattaatccttttcctatcatttgatttattgttaaatatacttttatgtatgcatataattttgcacatttcacaaaagtttttaataagacgaacggtcaaatatgttttaaaaggttaacaatatcaaacatttagaaaatgagggagtattcggtatggtcctagatttacacggcgacatcctagatttacatggccctttttcgagtttttaatttacgtgtttggggtatctttacaacaaaaaaaaagtcacaaacataactcaagcaaccgattagtctcgccctgttttagcatactaacataatttgagatcttatctaaaaaaataggaatttcaacggagacagtttaaataggaatttttcaggaaaccattacaaaagttgtttctacgtttgggttcatcccctcataattccacctcatcagtgcgtgtgttcggccgtccgtagctgttcattgtctatcgccgtcgtccatcatatatatcgtcagatggacggcgatgggggtgtaaaagagtgacgctgaacggaggagggtcctgtgcgttaatgtcagctacttgtcttctcctcgaggccatagtacccaagctcatgattccgcagtgtcttttatcaccattttttttcttcgggcttgttcactttaatgccaaaaaaaaaccttactaaattttagcaatgccaaaattttggtatagttgtaaaaattttggtaacttgtcaaaattttggcaggatttcttatatagttaacaaaatttagtagcaaactaaatgtagccacttttttttgtcactttatcaaaatttggtaaggttgaaaatgacatcaaagtgaacaggcccttcctctccagttactacctccacctccgttcgataaaacaccaacttctgactttaaatctagatgttggttttttatgagattaagagagtaattagtagtagtaaataaaaacagtaaaaatcaaagttaaccggcttggcgacctagaattattaaactgagcggagattattaatttgtaagttattcataaactgattttgcatgcggggtccgaatgatgtgcagtgcgcatgaacctgaacatgctcgtcgacggtagagctatttccccgacttttctaactcaccatcatcgttttttgcgcccactcttttcaaacggctaaacgacgtgttttttataaaaaatttctatacaaaagttgctttaaaaaatcatattaatccattttcaataataatatatatctataactaatataaatatttggatttttcctgtcgtcacctctcaatgatcgctgtttttgtccgatcatgcgacaaaattttcgtccgtaatgtccgactgagcggcgcccaatttccatccctaataatgtctgactgagcggcgccctccctctctgcgtgaacgcaatcgtgtacggtggccaaagaaaaaatcaaagaggatacaaaatcctaatcgtgtatgacaaatcacaacatcaaaaccaaccgataatcctagaaaatcagtttttcattcactattacaagatcaacactacaaaaattatgaaggtggaagcagaaacacacaaacaaatcctagatccctaaaaaaaccaattgcagcagctcgcgatgcggcaaatccaattgtgaccaaatcagcccaaacatctccacaacaccaatggagagcaaatcgggtaaacaccaaagatccccataaaaaaggccacaaatttccaaagaacatcgctcatgaatcctcttactaaccatcccacgattgatggaggaagagaagcaagggtgctcgagtgaaagcaggaggaaaggcataaaaaacaatgttggatctggaccggtcgccccgcgcctcctccttcgtggaaccatcgcaccgtcctcgccatgctccctgccgccgtgctggtccccagctcgggggctgttggatctagcccccgccgccccgcgcctccttctccacctcatgagagaggagaggcctcgccgcacaggggagagggaaggagaggcgcctgccgcggcgcaggggagagggagaggcgtatatcccagataaaacggacacgtatatcccatatatatataccggttttaaaaaaatatataaaatattactggtgccaacactcaacacttttaatgggctacaggtgcgtcacaaaattttcatctgtaaagtccgactgagtggcgccctccatcttcgcacgagtgtaatcgtgtacaacggccagagcaaaaataaataaataaatcttaatcttaactaactaaaagattaataattttcctttcgtcacaaatttttggtccgtaaatccgtacgcgtttaaccgttttaatcggatttcatgcgcgcaggcctagacagagtccggagctagcctggagtccagtacaagcccaaaatgcccaaatacgttcgcacccagtcacaacatatcctaatctgttttcttttcctccattagtttgagagaaaattatatttgaagtataggtagatgatgcctattatagatggagtggtagctggtttagttacgttctttattatatggcgtccccacatatgtaagatgatacaattttctctccataaagcaaaattcaaacaggtaagacagatcgcaacgccgcgagacattacggatcacaacataagacaaatcttatcttaactacttaaaaatttgtaattttctgttcatcacatcatttttcatccgtaacatcaatttttttgtctgtaaatccgattgagatccaatcagacaatccaaagaaagagaaaacgaatggaaaaaaaaaaacccgcataaatcttatctcaatctttgtcaccgccagatccacccacgggaagccactgtcaccatcggattggcctgtgggaagccgcgtgccgtcggcgccagatccgccatcgacgacgctcgcgggaagtcgctgtcgctgttggatccggccgtgggaagccgcggagggcgccgctgctcgcggtgggggacggcgcagcttcactcgctcgcagtgggggagggcgccgccggcaatgctcgcggtgggagggggaggtcgctaccatcgccttttgagatagagagagagagcaaggggatcgggggaaatgatattaaggttagggtttgagctgccgaatatttatctaggtcgggatcaatcgggaccgtccatcagattggatggccctggtttctcccgcgtcaggtcgggcgttgttcccaggccacctagctattgggccgcatatcctttatattaagttgtattatttatatagacagattaatatatccagtttaggggtttttttttggcagaagacttgttttatgcagatatccaattggacaacgtcatttttcaaaaaaaaaaacaaaaaacaaaagtaccaaaacagtgtgaaaataacttcagttaaaaacaaatatttttagttttaatacgccgtagcgaagcacgggcattttgctaataataataaatatttaattaattataagaaaatgtgtcaaatgttttgcgtgcgggacctcacctcccagccccgtactatcttgttcgaaacagaacgtgctgcagcaaaactcttggtttacgtacgcggacagcagtgcagttgcaggttgttacgctttaagaaagtacgatctcatacatgataacgtacctaggcacagtttggacttggacatatatgaatatttgtcgatggtttggacgtttggaagttgtgatctgcaacaaaagtaattaacaatctaccgcccgggcaaggttttttctagtgttaacaagaagagatgcgtaaaagaatcaacagctatatgtacatgcttgtttggtttagtcgtaccaataccaatatcaacacctaaacatgtttttggcactatcaatattttagtagggtccgtagcattctaagtaagtgaagtgggtttaaattgatactaattgagagccaagttttatcaaattaagcatgagcaagctccaaaccaaaccatcatatttactactccctccattctaaattgatctacatatagttttattttagttattcctaaatgatctatacatttgtgatcattcattaagtctattcgttatttgtgtattggagtaaatggacattgatgcatgcatccatgcacacaagtatttataacccacatgcaatatcttgatttgctattggctagaaaatagtgggggtgatgcatacattaagtttgttgctagagttaatatagtataaaaaagttcttagtttttcttgatcttagtgtacctatgaaatatgtagatcaatttaaaatggagggattactccacattttagtatcaatccaaaataatcctacatcaacgaaggacagatcagggcgtaagattcactccttttcactctgtagtcatccaagagcatatgcgtgtgctcttgctaaatccaaaaagaaaagacatgcgtgatcaacaatcgagaacgagagagagagagagagagagagaagaaaccgcgtgcccgattgggccttctgccgactgctcggcctgttccggtgtgcgatgccgcggtggcgtcgagcgtgcatccacatccaattatggaaaaagtccactttcaatccatcggctatgggcttacgacccatgcgccgcgccgatgaccgatctgcttgcggcgtcactgtcacaccatgcataccagccaccaccctgactttggcctcgtcccgacagcatccgtgtcactattcatcggcttggtgtatctccgtcctaaaatataatataaatattttgtatcaaaaaatataagcatttttaaaaattgatatagatattaaaaaaatgattgaaaaattgttgtgatcggttgataagacaaaataagataaaataattaaatggataactattgtgatttgttgagaggaggggataggtggagaaatgtttttttttttcagaacagaggcgccagtaatttttagctgagacggtcgtgcattttgtttgcttgcgtgtgtacgtgacagcaccgagcagttgccgactaacttgaagccgtgaagcgagtgaagctgcgaaacatacatagggaaacagcatgctctcgtgaggagaagttgacttgagcaaatcaaatggtcctatacctggtttaattccgttaaaaaaaatggacatcggcgttggccgccagggtttatggacaagtcaccagatacgtgccgtagcggagacaagggggagcggctgcgagacaggagctgggtggtggccacaacgggcggaggactaggccttgtacaacgctccaccgtggagtgtggtcttagaccttcacgtcggattcgtgtgctcgtgacagtgagaaccgtggtcttgcgatgccgtgcgtgacctatagaggttccggtggtctcatcgcgtctcagctcaggaacaacgacgccacgacctggaaccacgcgttggatgagtccggagagaaatgagtggcttcggtgagagaaggtggtccataagggggaaaaggagaggggggaatgagaaaaggttggtgcacctgagaaaatatcgttcgactggaatagaaaaagtatgtttggtggcataacatgcccacctggattcaagtgcttgcatttacgactatttattgttttaatgctagacgatatactcagtggacaagttaattatggtgacttcattgatataaagatatatcggctcagtctgtatatgagtgtgggtgtgagcatttatagggtgagtttgtgtgtgtttatatgagcaagtgtacccagtaatatatggaatcgagaatacgaagtgttgtgctccaacaaagtcatggtgtccgtatgaattgaacaccggtactagcccggttttgtggactacaaaatgaagtacagtatataagaaaacgctacaacacgccggttcctctctagtactggagtagtactccctccgtattttaataatatatgacgccgttgactttttgacaaacgtttgaccttttgttttattcaaaaaagattttaatgtatgacgccattgactttttgacaaacgtttgaccttttgtcttattcaaaaaatttatgtaattataatttattttattgtgatttgatttatcataaaatattctttaagtatgacataagtatttttatatttacataaaaattttgaataagatgagtggtcaaacattgattaaaaagtcaacggcgtcatacattaaaatacggttaaaatacggtgggagtactacctaacatggaccgtacatcagctgaagcacgaaaaccaccttttgttggtacacgcccacacatgccgcagccgtcaacgggtaaaccagctgcaccagcaggcccctgatggccaggccagccaccatttgaaaccaattgaaaaaggcaaaattgccaatattcaaccagcctacttttgttgatattgcggaggaggggactaaaagtttttcttttactttgtgcatgtacatagagtttttgaaatttactcaactcactttgtactcaggactcctttgaaacataaaataaaagatacaaataaaaaaacacaggataaaaggtcattctgtatgaaatcctataaaaattaaaaacaaaaatttatcaaattggtcgtttggatactccacataaaacttataaagactttagagaaaaagtatcatttaagtagagtagagttaatagaagagagatagagatatggtatcttggactttcggtagtacaagttcccgactcctccttctcattttccgcgtgaacgcttttcaaactgctaaacggtgcgtttttttttttaaaaagtttctatatgaaagttgcttaaaaaatcatattaatccatttttttaaaaaaatagctaaaacttaactaatcacgcactaaaacgctgcttcgttttgtgtgccggctcccgaacatagccttaaaaggaattcaaaacttgaggtttaagctcatgcttgaaatcctccaagaagtggaggaaaaaaaatattcgtccgaaacttttccaaccatcaaatcctacaaaccaaagggcattgaatccttagaaatcctatgaaaatccctcgttccaaattaacctttaacattgcagtttgacatactgaagttcgtgattaattttggatggtttatctatatggaaatttagtgtaaaaagttgtacttcctctgatcaatatgacgttgagtgtccaagacatttagccagtgcggagtagtatacttaataaaaataatgttggcggcataacaaatcaatgtgtattaataatatatgacatcgagaatacggagtacaccctccttttttcatgttacttatctcttagctttgtccttagctaattatttctaactttgacaacaaatttttcaaaactagtatagttttttttaaagaaaacgtatagtttaccatcatgtaaattatacattacgaaaatatttcatatggtgaagctaaaaatcataaatcttatcattgaactatataatttttttagatattagtggacaaatatacacatatttaatttaaaacaaaactataatgactttgtattaacactatgattgtagtacgattgagcggctcaggcaccaccctggttttgtggactatgtaaaaggaaaaaaaacgctgccacgccgtttcatacggagtactacggaagtaccctaacatggatgtaccccttccgttgggtaaaatctaaatagtgctcgcgtactatttgtccttagggcatgtacaacccacagataggggttcgtctccaagaacctcgaagttatcatccagacagatataaagacagctcatacaacccatagacagaggatctgtctgtaagctgtttaatgcttttgcatgtagctttgatcaattgcaaatacgtttgtgtataccattgtgtggctatatatttgaaataatactatcaagcatgaataagatacatgattataataatttttaggaaccataaatataataattatattacaatgcctttagtctaatttcgtcgccaaacttttcaatcaccccttcagcaaattttatagtataaaagtgaggcttgaattcacgttcacattcacagaaacgggcatgcacataactgaagcattcacataaaggagcacatatacataatgcctgtaactgaagcatgcacattcacattccagaaagaaactgaagggtacattcacattcacataagcaaataagtcctctcggcactccaacaaaaactgaaactgaagcatgcacattcacattccaacagaaactgaagtgcacattcgcatttacaaatcacattcacattaattcagaaactgaaactgaatgagacctctcggcactccaactgacctcacaggatgtatatatctcccaggatgtatacctcccagccatgaccacaatcaaatcaatatttagctcccagtatatacctccaatgatcaagctctgaatttatttcctaaattttccttttctgatcatttgcagattctctccgcgcgggatcctgccgcgccgtcgcctcgggacgacgagctcgtacaacggtgctgagcttgcctcttccgcctcggagcacgggtcgtcgccgtcgcctcgcgagaggacgcagctcccgtcgcttgactcaaccggggggttttttttgcataaaaggcatcacaaagacggggcaaaaagacccgctgtacgtgcccttatcccgttaccctttcgtaagccgtccaattagttaatggtagtcgagttacgaacacgtgaccatctaagaagcgagtctattccaatgtcagacaaagagaactgcatgccatccgccagttatcacgtcaattaacactactatttttttatagaatctttcattacttatatattctagacaatatgttatttttaaaatatgtttgaaccattatactgtacttaaaatatgtgacaaaacgaatctaatatcaaatatgttaaaattatttaaattttgttacttcctaatgagttactttcttccaacagtacagttatttctagtattttgaagaccttgtagcattgtagttatttctgcacaccataaaaagatacttttctctagcagtagagttacttctaatatcttatagagatatttctaattttaagagttagttccctgtaggctgtaccagtgtaggtacttcaaataccatagaaagttacttctgttctttcaaagttacctttgtaagcagtgtagttacttctaggatcgtgaaaaattactccgtacatgatgctaaattatatatgtatttttaaaaataacatagagatcactttgaatgaagaaagtatatgtatttatttgaaaatcgtccgtacgttttacttgtaaatttactgtaaatagcctcacgatataataatttgtagtgctataaagagttatttatattacagagctaagctacttctataatttaattaaattactttaaaattgatatatgtttagatatactcaacactatacttgttttatttgttatatattttgagtgaagtgtaatagtgcaaatagctcttaaaaatactatacggtttaggaaatataaatcattaaaaagttttaaaaagatatagtacgagagaataatatattgctatttttaggaagggttactcgttgacacacggcggatgaggtggtcgctctgtttaaccatgtgctgtgtatagacgtgtcccttttgttggtacacgcccacgccgcagcgcagccgtcaacgggtaaataaaccagcagctgcacgttagcacgtacgcctgcacctccaggcccccctgacctgtccccaaccgaaaaggcaaaattgacgcccaaactgcccattttttcatcgagaaaaccagcagctaaggccgtgtttagattttttttcttcttcaaacgttcaacttttccgtcacgtcaaatattttaacacatgtataaagtattaaatatagacgaaaaaaaatcaattgcacagtttacatgtaaatcgcgagacgaatcttttgagcctaattacaccatgattttataatatggcgctacagtaaacatttactaatgatagattaattaggcctaatagattcgacttgcagtatatatacgacatctataatttattttattttattattagtataaatttaatactttaaatgtgtccatatacttaaaaataaatttgccgcacaaactaatcacagacaataaagctgtctcggcaaagccaaagcgcggccgttttcccgggtgccccacccccaccccaccccaccccggcccgcaggtttccgtcccaaaacccagcggcgaccgaccctggccttgccccatgcgtcgtacagacgaaaccgcagtcagtgccgccaccagctgacctgcctgaccaaccaagccggcggctattcatggcggcaccaaaataccacccgccgcccgcccaccgtacccgcgcgcgctgcagtcgcggtgcgatatatagcaacccccacttgagctagaattcccaatccatccaaacccaaaatcggaggtagctacagccgaatcccccaacagttgtgtgcaatttcttgcttgcttggttttcttttccccccactcggatcgatctcgttgttgtgtgaggttttttgagctttggtcgatggcgtcgatcgtgctgctgctgtcggagctgctcggcggcgagagcaccagcgtaatggcggctgactggtacatgagcggacacagcctccgggagttccggcccgtggcggctgctccggcggcggcggcggcggtggccaagtgcgagcggccggcggccgaggcagcgggggagaagaagaaggaggagtcgttcgaggatctcgccgccgtgtcccggatcgcggtcgacgtgatgtggccttagagcatccgtcgccgccatctcgccggagaagaagaaaaagaaaattctattcttgagttttttttctctatttttctccttttttttggttgccaacgaggcatgtgttgtgtactgttctttttgagatcagatttgtaaatatacgaagtgattcttggatgtttttcatgtcattttgtcatcgattttctccttcactcgtttctttcactagttctccactctttttcattccgtctcaaaaaccatcacgattcgctctgaagtcttaacctaaatacgcacttgcttcttcagacaatgcagttcccgcatccagattgcttcataaacattgcagatccttttattcccaaatataacatcaattacaatcgttcgcggtacgcgtcgaacaacaacaatttctccgctgaactctcaagcatacaagagcaagcagatcgccagacactctgacagagagagatgctacgccaagagagtcccggccatcacagtgacagcttctccctggatccggactctcctgttctcgccgtccagctccaagtacaatgttccactccttggcgaagcctgacgaccatggtattgtgccgtttgtacttatcttttttttttcagaaaagtataatgttggcaacaattgtttaccccctacttgtcacaagaaggtagcaaaaggataatacctgaaacgccgtaagtttttgtttccccagctttccaccccagtaaggtgccagaacacaatgtgcgcttccacacacaggatcctgtaagagtatatccgagttgttagtgttttaaaagcctgtgctaaaaaatatactacgagaagtttcaaattttggtcgataaggggcatagagattaacttgccaagttataccaaaagtttctgaacactcaaggaacgatacagccatacagggaatcgtcataaaactatcaaatgcatgataacaagtttatggaactgtcacaagaaatcatgaccaaaataaatttcagtactcagtcaaattcacactttggtcacttcacaagtctatctaaaatgatgtttttttaattactagttgtcgataaccccttgactcaccttgaggtattaagaggttctgattctttggagagattatatcagtcatctctgcatcaatgccaatgtttttcacctagtgtggtaggaactaggaagattaaaactacgcataaaccagaactgtagagacttcaaataaaaaacaccatattatatagagttaagtattgttttcttttatgaaaggagttaagtattgtagtaatcatgcaaggtgtaatcaatttatgtctctgattgatgaaaaatagcttgtgatgatttaacaattttgaatttagacaagcaacattggtaacatcgtgacagcagagaatccttctgtacccatgcaatgactaaaaagtgtaccacatatgagattatatctacatattctggaactaaaatggccatttttaacttaacaagccacattgtctgcataaaaaacttggttgttgggtggaaagaatcggcatacctcatctatcccaaattttgggcagaagaatcgtgaaaagaagtcataatcagatccagcaggtgctggtcccgtaacaataactcctctaccatcacattttttaatttcattaatgttagggataatatcagcaacctcttttccggaagaaagttccacctgaaagccatgccagaatcatttagtactaacaaacaaatgaacaattccaactccttcctctccatcttctttttttaataaaaaaaatccattataaattttccatcttttcagaaaagcttaccaactcctcatttaatattagcatccttaaaagattagcaattctttctcttagggaaataatcgtagcggtagcattgccatggttcatgacctccattttaatctttgaacagacattttttaatcattgacaatgttgactcgcctaattaaatttggacaaataataatttcaaagctattctactttgtaggctaaaaataaaattgtaagattcattccatattactattttcataacagtgcagagttcagagtatttacaaatttattaccaaaaagtagtggtcaaagtgtgtataattcaattgatgttgccaatcattttaaccaaaaaaaaaagacatggtaatatccaaatgtactagttatgaaggcaacattcagagcagcatatatcaaattttgccaaattttgccggatgttgtaacttgtattaaggggatataagaggaagtacgatgaggtcaccggcggttgatgatttccaaacactgacgactcgggcgccattcagagtctccggaatcgacagcgtctccgcggaatcgtactccacgagatcgatcatggggaaatccagctcgatgaacagcttctcctcacccgggacgccgccatcgttcgccggaggcggcggagcaggaaccttcttggcggtcaggatgccggacctcgtcacgaactcgaccatggcggcggcggcgtgctgctgcttcgcgaggacggtggtgaagaggaagtgggcggatgccagcgtcgcgtggccgcagagattcacctgaagacaacgacgacgacgcgtgcggatgaacacaggggagacgagtaagaggaaacctagggttggggggaagggggaggcgacctcggcgacgggggtgaaccagcggaggcggaaccgcggggcggcgtcggcggcggcggcggaggaggaggggtcgcggatgaggaaggcggtctcggagaggttgaactcggctgcgacggactgcatccaccgctcgtccgccgccgccgcggcatcctccccttccaggaggcatacggcggcggggttgcccttgaacggctcggccgcgaacgcgtccacctgcgacgaccgcgccgccgtggcgccaccgacacgtcagcgtcagcatcagcatcgcgcggtgggtcaacaagagaaagggcggatagtgtactgaccacggcgtactggatggcgttcttgaccatttccggcgaggcggcggcgacgacgacgactgcggcgggcggcggcggctgctccgaattcgcgcgcgtgctgaggtggctgcgcaggcggggcacgtttgtttatactttatagagagtgaccagtcgtgctgcaggtgaatgctggtgctgtgttcatcagcactgacgacatggagcttggcggcttatattccttgtaggcactgccgcaccggacaagtgtcactgacaagtggggcccatggacaagtggagccctcggtgtgggagcagttggaaagttacaaatttggaaggcctctcaccaatcacaaaaattttgaagaaaaagttgggaactaggggtgtgtttagttccaaagttttttttccaaacttccaactatccatcacatcaaacctttcatacacacgcaacttttcagtcacatcgtctccaatttcaaccaaatttcaaactttgggtcgaactaaacacagcctagacaaggcctaggtgactggagacagtttaatactactagcatatactcctcccataataccaaaatatagcaacatggtattatattaaaacctacttattcagatttgttgtaatataatatactatatcatatcgaatgtatttactggtgagagtaacttggtactagtagaattctccattcagtcaagatggaaaatgatcaatcagttcggctcccatgacaaacccaatagccaacttcatcatcagttcttcacctgctcccttcttttttctatcctcatatttctgaccagctaaaatgatagtcaaggacagagctcaaccaaccaatttggtaatccagttgaagttagagctcacgtcaatgctgacaaacatgttgcccggcaagctgatttgtaacaggaaaacaaatattctgggcgtagcaaggcagactacaaacatctttacatggatactcgagtagtcgagttttcgtttatttactacagcaaaagcatgcatgctgcatgagaaaacaaacaacgacagaatttcgttactcggatcagatttggtccaagatcacctcggcaccagaaaccttgaagtcagaaggagctacctcaacattgaaagccttgatcttcccatcgtcaacaaaggctgaccacctaaaacggacagcaatacttttagaagagaagtaagaaaaatctatccattaaccagtcacatttcacaatctcttaaatgacaaaacatgtaaattacatcctcaaaaaaaaaaagtgtaccacagcatgagctgtccatggagattatggaatggcatttcaggcttagccaaatgcatacattgtgtcaccagagtactatttacaacaaatgaaagggggcacacaaggaggttcaaaagtgactcaatgttgaatgatgttcaactttgcggaatcacgcaactacatattccttcacaaaaaaacatgcaatacatgcacctggtgaaccataattatgttccaaatatgcacctcagctcttttgtttgaaatttcaatgcacccatagatagttgtgcagctaacaagggcatgctaaagtgcgacacttaggaagtggtttggattcatttattggagtcttttgagaggttagcctcagtgcagtaaattttgtcacaacaacagcaaaatccattggaaatcgactgaataagactcacacttaaatcatgtataggcatgtgcatgcagcttgaagtaattgatcatttacagtcatgaatcatgacagtttaacagtagggaacatgtgtagattagcaatgccgccaatgcagaatgtccttgacaacataaaacatgctcaaatatgataatgaatgcaatgcactttgaagggtaaagctacagtaaggaaaaggagtacttgagttaacccatggtaagtaataagtttaacacaatgatttaattaaacaaataaagcaaaaggcaactgaaatacgttgttttatgttcaattgtaattatataaaacaggcagcagttttaactttttaaggacataaaccaagttaaccaaagtaaaattcattgacctgtgggaacggcggccaagcaaagcagcagagaggtctacttccaaatccaagcttttgtggaaactcccatcaaaatcaccataaaattcaatctggtatcaatattacaaaatcatagcagatggttagatttgaatattatgtgattgtgagcaagtttgatatgaactatatctgcatggactcatgggacaaacattcataaacaatagccatctacaatggtacgagactatgatacgctggtccttattatttttaaagtatagaatatataactattatatacttgaagaatgtttatgtttcttcttacattaaagtgtacattaaacaaatcagaagaaaaacataaataaatttaggtgaacttgaggagatacatgaaattagctttgcaatttactgttttacaggttatatgatgaaataagcacattactggcagacatgtgcagctttcaatcattacaaagtactgaggcagggagagaatacaatagcattcagcatttgtattatggataaagtccaccaaacacaaaggtggatattaatataccatgcatgattagtaaatataattagattagcaaaacatacagcgtgtttaatgcatttcttactatttaagcatatagaatggtaactcacagcatcttttgcctgtagcttttctgcccatccattcagggcataagggtcattcacagagacacagataacagagtcaaccccttttgctttcaacttgtcaatgttatttttataactagggacgtgtgcctgtgaacagactcctgtgtatgcaccctgaaatatgtggtaaagataacagtcacctatattatcagatcagtagatcattcagaaagagaatcgctccaggatataagaatttggaataaacgatgaaaaaatttagacaataaacaaatgatatcaaacatataaagcttcataaatactaaaagacagttagaaatcaactaggaattttgatagaaatgccttattggctggctctgaaagcagaattgtgtggataagtaacatgaaatttttacctttttgtttttactattgcaaccccaaaccatattaccctcactagattgtttgattagatgcagcaccctgtttgctgttcagagaatagagaagaatcgaagaaatggagagttctattaccatttcacctgtgggcaccacgaataccaggctttctaatttctgcactcctaatccgcaaaagaactactctcaagtctggcatttcctactccttaacttcaaatgttggaatttatcttgaaagttgaagtaatcgatgcccaaactacctcttcgccatggcccatggctaatgtatgtcactgtaatgacagaggctacaggaagacgaatccataatccccaatgcgcattcaggatgagtgtatccacacaaaaagcaacaaaccgaaggtcctcatctggtatccgaaatgtatagagtacgcatgaatttcgggaggaagagaggaggggagagcttacaggcaggccgaagatgaccactttcttcccctgcaaaaacacgagggatcatcagaaaagcctggctgagcagcagagcagacgaacgtgggtagtgtagggctagc

SEQ ID NO: 7928 - DNA, 94641 bp, Oryza sativa
  unsure (1)..(94641): unsure at all n locations
gaggaaggtttaacaaagagaccatttcaaaatatcatcgacaagcgtaccattcaaagaagaatcattgacaaacccatctttccgataatgatattgtacaagtgtttctgcccgcccgcaagcgctcaccgcggcaagaagcccggctccggccagcggtgggggctgttctctcgtgactgcccctgcgccggcaggaaggcggtcaccgtcgacgtcgcctccgagccgaggagcccggcgacgccgagaacccacgcgaggtttgaaaacagccatgtcgtcgccgacagcacgatctttaaagcgaatgcgccgccgccgccaccgccatgcgaggaggagcccgtcaagatgaagatatctccggggagcagcacgtttcctcctcccctcgcgaacagtatcttcgcggcggcgccgaacaggggcggcggcggcggtggcgcggcgccgttcgccgctttcccggcgccggacattgttggccgccgcgtcgtgagctccggcggcttcacgttcccggtggccgtcggcgcggcgaaggtggtgagcaccgttggcgacgagccgccgcgcgagtcgctcgaggtgttccggcccatagacgaggagtcggtgctcgccgacccaccggccgatcacctggcgacggtgggcggccgcggaggaggaggaggaggcctcgccgcaggcttcgcgcgcgccccaggggtggcggcggtggcgaccgacgaggaggcaatgagcgacgcgagctcggacctgttcgacctcgagagcttcgcggcgtcgtcgtcgttcccgaccacgtgccgcgggcgcagcagccggcgcaactcgcgggaggacgacgacgacgacgaagaccttccgtacggcgccgcggccgcggccgccgccgccgtcgagccggcgctgagcgagtgcatgtacgcgccgagcgaggtgagcgtggtgtggagcgtggccacggcggagggcggcgcgttcgacgcggccagcgtcgccaacttctccagcgcggcgtccgcctgctgcgtcgaggagttcagcttcgtcccgccgcctgactccgccgccaccgctggcggcggcggccacgagggcttcaccgccgccatgtcgcgcagcgccgcccgcaagaaaggcggcgggttcttgagcagctgccggtgcgagaaggctgtgagcgtcgggccaactcccgtccggatggtccggccggaggtgaacgtcaagaccaccggcggcggcgcggcacggtatcaccccggccgcgtccgcatgccggtccggacgtgaactcgccgccggtgagcaccggcgacgtacatacgttcaacgagcgggagaacgcgaaggcgtgcgctatggtttaattagttttgatgtgtaaatttgtgagtgagaaatgtgttggtgtaaggaatgcacatttgtgttgtaataaaccaagacttttaatttctctatacagatttcgtacgtacatatcccttcagacccttcacagagaggggagggggggagggggggttcgctccgcctctccctatacgcttcttcccttcctcctctccttcttctcttcctacaacatattaaaccataaaaaaattttaaaaaacaaatagttagaaaaatttatgtatagaaatactatatataaaaaatttgaattcaaattcaaattcaaattcaaattcaaatttgaattaaaatttaaatttgaattcaatttgaatttgaatcgggtatgtaaacttttgacttataaacattggatctataaactttaggtgtataaactttagatgtatatagaaaatatttgaattcaaatttaaatttgaatcggatataattcaaattcaaatttgaatcgggtatataaactttagttctataaactttaggtctataaacttaactttaggtgtataaactttagatgtatagaaataatatatatgaaaaatatttgaattcaaattcaaatttgaatcggatatttgaattcaaattcaaatttgaatcggatataattcaaattcaaatttgaatcgggtatataaacttttgatttatatactttagttctaaaatctttaggtgtataaactttagatgtatagaaatattatatataaaaaaaatatttgaattcaaatttaaatttgaatcggatatataaacttttagtctctaaactttatatgtgtaaacttgaggtgtataaactttaggtgcataaataaatttactaaaataggaaagtaatgcggtgccaaaaaggaaacaggtggagggagggaggggtgaggtggggagcgaatctgatcgctaccccttccccagggcgagcgatcgccaaacagcatttctgttcacaagttggtttctttgattatagagaagatgtaacaagcacatgcatcatccgtaaatgcattagaacgatcaggaagaaatactctctccatccctaaatatttgacgctattggtttttttaaacatgtttgattgtttatattatttaaaaaatttaagtaattgttaattctttttctaacatttgatttattgttaaatatacttttatgtctacatatagttttacatatttcacaaaagtttttaaataagacgaacggtcaaacatgttaaaaaagttaatggcatcaaatatttagagacagagggagtagcatatagcggttggctgaacaaatccgtaaattgacattgttatggattgaaattttgttgaacagtcataaacttgcaaggatttgaaatgaaaaattgttaatggatggcctttgatgtcatatatctagacaatcagataggccaaccgctagttttcaacagtatagatttctacaattagtgatttggttttatagatagaatatgtactacaatgctatatatgatagtattaggttatttgttggaccgtttattggttaacatttacacaaatgcaagttggacttttaaaagaaaattaatcatattagagatatgtcgctatttttttgtttatttaaacatgtgttaagggtgtatctatgaatgtgtgggtgtggtattgcgtgtaataatggtgtatgtccgtatcggccatatatttttttgaaaaaaaaacattgaagattctcttctctacccctctctcttcagctccataaagaaatatatatgcaatcgagaaaagttttaaaaaaatagtatgtatattcttcctttaggctgacgtcaccctacgtccgtacaattatataaagacaacgaatgtcttaatgagattgctttcctttattgtgtaccttctagataaacttatctcttttatggccttctgatgcacttgatttgtcaattcaacatggagacaattaatccaaaaacgggatcaacacgatgtgatgtgtggcaatgcccatgttgagtgtgggaggcaagtacgttgactgtttagcatctagctagacgtccgtgtgtacttaactcgtgcaaattaagccccactgtatatgagttgttgttgctttgttgggaccacatttcatacacatgactaattagtgctataaatctacatttgcattaacgttattagacggctgttttgtttttaagttgtgcttgctctctaattatctgaaaacaaaaatggaacgctctacattttatttgacaaaaaaaatccctagaactttttaaatgtcaaattgtcgaaatactctaagatccatacagtgctatggtgtttccaccttgccctttacccctgcacgaataactccggcacgacgaataaaatgtagggtttaattaactctgaaatcctaagtaaacactaactcgtcttgctgtcaccgttgctggagccaggggcggatctacagtagtaccaccagtgtcaggtgacaccgacgacttttgataaaagctatgtttaaactgtctatccataattataacactatattctaaatataattagtatgatatgacaccgataaacacgttatgacaccaatgaactaaatttctggatccaccactggctagagctgaaggagaattgagctacagtcattggagcacgaatctcgaattaaatcccaatattagaaatttttaagacttgggtacaaattttctaacgaatgacatttagcaaattttttttaaaaaatcaccaatcgtgagctaattagtcgcgagtagattgcaacatatatatgccatatcatgtccgcgtcatccgtatggggaagatcgagctagcattctggagtttggtttctcatgaagctttctcgccgatcgtttctaagcaaacatgcataatgtacaaattgtacatcatatgaacccatgcatgcgtgcgctccaaaaattcaaaaaagaccatatacacgaaagcgagacttcacataaataacgtacgcggcattccctcgtccagcaagtgcaaattgctacagtgggctagcaagcaagccaacgagctagctagcaatcaggacacttggattccaacaaaaggataagccggccggcgaccgatcgatgaatgtatcaagtttgtcacccagtgcatcaaatgaatgtatcagaatactaagaagatggatttttgcctcgggagggaatgtcccgttgtttctgataggtctcctaaagttgttatgattttctttaaaaaataacaaaattgataaagatgaaatatatcattctataaacacataggaggaagattaacaaaattgacaagatcaaaattgaccagacaatggacttcgctgcttaaggaggaagatggccaaagagtaaaagatggttgcatgatattggagaagagagtttctagtttctttgcaatgagagggtggaacttaagaagaagattggaagtttaatgctctcttttctttgcaccatggggttttgttgtcttaagtactgttttggctaatctctgtcattgtctaagtgtccgtttatggtcactcgaatttgcgttaaaccttttgtaagggtgtgagcctaagtgctcgtgtaagagacttttaggctgtgtacattttttgggtgtagaggccggtttaatctattatctaaaaaaacacataggattaaatttaacttctaccatttgcaaaaattaaaataaactctactagtatatgtatatttacagttaaattgttatatttatcgcaatttataaaagttgattttttttatattataaagagagagcttgtattattgatggaaatagggattgtattcctggtttattataaaagtcgaattgaacttgtgtgtttgtagaatatgtgtatcacatactagtttatctcattatatatttttttcaaaaaagaactcttaactatttagacgatgatatccatgtaactcgtcgatcgacagatattgaaaaactttgtggactaccaggttcatccatacccctccggcagctgacgaagctacccatgctttgcacgagcacacacatgacacactgtgctcagcttaacctacatatctgcatgcgctacgtggcctcgcgggcggccacaggctgcgtcgccaacaaaattcaggaattatttctggataccgcctgtttccgatgagctacagagctagctatgccgctgctagagtttgaagtgggcaacatgcagcagcaagggatgggggcggggtggccatgtggaacgcgtgtgggcgggcgtcgcatgatcgatcgatcgctgggtattgatttgtgaacaaactggccagcggcggcggcctagcctacgacgcccacctggaactaagagcaagtttaacagtattgtcaactactagccccaatttatctatagacaatctaatagctcatttatacaataattatatactatatacttactattaatacctggtcctacctatcatacacacgctgcgtcttgagtccgtgctacagctggctacaaatttgtagtccgctgcccttctctctcattatttatttccttaaaatatgtttgcagctggcttatagcttgctattgtacctgctctaagagaaacgttgtaaccagctgtagcacggacttcaagatacagtgtatgtattatagatgggacaatgtattaatagtgtactccctcccgttttattttaattgatgttttggacaatgatacagtcaacaaaatatatgtttgatcttatttttctaatataagatatataataaataaatatatggtaatttacttttcttatagtgctttgaaagacaaatatatatttattgttctagttcctttaaactaaacatttttaaagttattgatggtcaaagttataaaagtttgatctcaaccatgtctaaaacgtcaattaatatgggaccggagggagtagtatatatatttatagataactattgtatgaattaactattaaattgactagagatgatttaaagctagtagttgactatacttaaacttggtcttaacaaagctgcaagtatggaacggtggaacccgaggtgttgtggggcccggctgcatgaggtgagaggggcgcgtgggtccatgagctgtggggctcacatatcaacccctcaaagttagagggtagtaagttagagcatctttttacaaggcgagagtatggtttggacttaagacgtacaagaggatggaataattgttgggcttgtttagattagtgtcaatttttttttttgaaactaagattagtgtcaatttttgacatgctagtattttgaaagttttgaaagtttcgcaagtttagacactatcaaattaattggtagagctgagttggtattagtttaggcaaaaattggtatcaaatcaatttgttatttttaaagttgccaaaaaaaatggttgggcagaatttggcactaatataaacaaacccgttatctcccgcatgattctattaacatgcccagcatagcttgattgttctgaataagatgaataataggtgatatgttatttgattttgcgatggtatttgtgggcataaacgaattatggattaactgttacgaagttaattggttgtttttaaaattatcgtaagcaatttatacgtaagcttttctaaaaatcgcacagtttagaatcttgttaagcatcctcgtgatagtatatgagaggaattagggcctaattctgaactgcacacaaaggaaaacacggtttatttactactatttcaatattataagtcgctttaactttttttaaaatttttttaaaaaatggttaaatttgttgaaaaatatagtaatattttttaaaaaatattattaaaatatatttaattttacatttaatggaactaattcagtgtgttgtgtatgttgctaaatttttctatagatttagttaaacctaaagaagtttaattagaaaaaaaaatcaaaatgacttataatatgagatacggaggaagtagatggcaacttctgcttatgatgggcgatctgatcatcttattcagaagagccaatcggaccaaatggtgcggtggatctacaaaagttttagaccataggcaagtatagttatatcaagtgtttactaaaagaaatttatttacaatactataagtaacgctcaaattatattgcatgttcgccaacaagttatgacaactgtccaaggtcgtcaattggtggatctatgttaggtttgcttcgaccttaaaacacatattttcttagctgaagctttgaagacacatcatggatagtagaatggggctgtgtggttgtagccacagttacgacaagatcatcttaagcttgccaaggtgtcaaagattttgacaatatagcagtttttattgacaaattttggtagactgatacactataagaaacgtttaggggtctttccgactagctttacaaggtggtgggttttggagctagccggtctggattcgaagcctcgcttattctatttatttgatattaggttatttcttaataattgcggtctctgatacactaatacactatgagtatatgactaacaaacaaacaggtacatatgccacttagcaatcctcaagccaaaaccgagtgctaaaggtaaaacacacacatacacaaacaaaaaaataataattcggtagctcaaacaagtaggcccgtgaacaccagatctgacagatatacttgcataaaacataacatgcatgttcccagatatcccttttgttttcgtagtctacgatcgatttgtaactctggaaagttggtttctttaaacgaggcatgggtgacctttttgttccagagaaaaggaattcaggagtgctcaattcatgcaagttgaagtgtacatatcatcaaattattctgtgaggaggaatgcaacatgttatccattctgttttcttcccatttattatcgagagacgagtgattgcccaaacttttctcacggattttcaatgatatcatgaacagaagatatacataattaattattatcctccagctcgtaaactggcgaaatgggtccaaacattcattcaggtctctacacctactcctagctgactgtcattgacaaatttgatttgtcccatctctcaagtctcaaccgagctaatgctgaagtagtgttctgttgtaggaatgaaacacaactgagcttgaccattttaagggctcctttaaaatgcaacaattttataggaattagcccaattcccataaaatttgtttccaaatcccatatcttcaaaggaggcctgaagatgtacatcactgaccagccatttcctttctagcacagcacgaaacaacacaaatgtccaaagctagcaaatattcagatgcacaggaattgaacgcatacaagtacacggcacatcaaattatttattatggaggaatgccacagggtatccatcagaattttttttccgccgggccagcagcaaagaaatgccccgaccgaatttatccatcagaattttctcatttatatttcaggaagatgtcaatgcatcacagccgatggtccaaacgttccatcctagttagctaactgtatatattgacctatccgatattcccaacccatgactggagcaagcaagcagttcaactcagctaagcacgaagagggaggagctctcaagccagtatgctacctccctcttcgtgattcggggaatcagttccactatagaaggaggcctcacttgaggcgtccgaaccgccaccattagcctccttgtcagcggatacatgtgaatggtcctgaggcagggtgatgccgtttgatttgaatgaagaacccatcttaatgtcatcggctctcatacgctcagcatagctattgtattcgaaggtagctggattccttcctccgaatgctgagtcgagcttgtccaagtcaaagacgtcagccattatcttctggctctctttatcgctggagtacacaaatttcaccttcttgtaggtctcatggtccaaaaatggcttcactatctgccaacagtaactaatgttaggctaccttatctcatgacaacagagtaacacactaaaaatagattaattttactgtccttgagaatatgcacactttgtaatgttaatttgtggttcagtacctcaacattagggaggtaccaaaacaatacactagcaagtgtggttgaacggtaaaaatcctatatggtaaaaagacggaagaaagaataagtgaataactgtactctcaagatattttaaggttgttctcaccttccagaaggactcaaatatcctaggaggattgtaaaggattgctaacccaagcctctcagggtaacagtcttgcaagacgttcacagtctctcgggtcactttcagcggtgtgctccccaatgtccaactctggaagtctgtcagccagaccatcttctcttgatcttccgtcaggctcataattgctttctccagacagtaaacaagatatttgatctgtccctttcctgaagtagtgttctgttgtgtttcaaagttaaacatgtaaaatcagcacatagcatgcaatcaaaccagaaactgttgtggcatagctgtcacaaaatattggttcataacaaatgatctaacaatgcacacatgcacacacccaattgatttgagaaacaataagaaaaatccggaataataaaattataaccaaagagtgagattctccttttggtttttccaaatgctgattgacttcaagctaaaattgtaaagatgtatgtatccctccgttatccacatggtcgatttgattcatagcaggaaggataacatgatagcattgcacacattgtatggagaagtaattatgtcccttttatctggaaggtataatcccaatctgatttcagagcatactagatggttggcagatgtacaactaatgcagatgagtagatacatacaaagtaaacagaaagcacgagctatatcaaaacaagactgttatgatgttaatgtattcctttcttcctgccgaaagtgcactaacctctaagcctggcctcaggacaagaacagttcttccatgtttgtccttgtagtcagccctatatatctttcctgtctctgcttcatgtgcaacatcatcctgaaggttgaaaggacaataagattacattatgttgtaaacctgaaaatgcagttacttcctaagtatcaagaatgttctgctttagcatcacaatgctttctccccaatgattcatagaatgctatcctcctattagcacaatcctgtctaaattgacactaacagcagttattcctcctgtctactccctctttccacaaaatataagaattccaagcgtaatttgtccataaatataaggattcctatagtgccacttgaccacctctcattgaaattacttcccaccttactcccaactactcttccaccccccccccccaaccatcccccatttagtgaggggcaccaaagtcttttagtcttaaccttaatcccttctaaacaacctagaaattacctatggctctcagcatcaccaatgtttcagttataatgctatttctattacagcccataaagaaatgcatattcaattgatgattaacacaagcatacccagttaatcttttgtggcatatatgacacccgccactttacagctgacttcatcattttacttgctttctgcacgttccagtttcttgctcgaagaaatctcaggcacgaggcatctgaaaggaaatcttgtatttcttctgatgagtgttcaccaagctccttacgcaagtcatttatctgttcatcagtagatagcacaacaacaaagtaaatggttcaaagcgagagtaactaaattaaattacgaagagatatacaatcaagggatttttttcaataccttctcctgctgctcttctagggtcaagtttttctctgttgtagcaccattgcttgacttgaatagaaaggacattttagtacctcgacagagaagggtccactagatacggaactgaaaagcaataaatatcatcagacatctgaagagtactaaatatgcacgaactactttctgttcagcttccttgtatgaaggcaaccatctgaactaaacaacagaataacagcttatgaggcaggtgcgagaaaaaaacttgccgttaacaaaaattcagtttcatacaaaagataacagaaagtaacaacaaatgctactttaaactgatatcagtacatggttagctagctgctaccgcatgtaattcatacgtggctggaagagcagtatcctaaatgagaagcatttcacagaattcagaaggccgtgcttctgaaaaaccagccgattcagttccacagaagacaaaattgcgacccgaaactgatttcttaagttaaattgaccatccaagatgtcactaagttaaagtagcatcaccatataccgtatgagccagatccggcaacgctaagtttcttgcagattttacaagacaagtagccgagtcaagatcacgtcaacgcaaacaatcccggtggcaattgctactactacatcttcaatcctagtagcacgacacaacacagaacgaacacccgcaattcgagcacgaacagtcacagatcgccgccgtatacctaatgctcctcacatcaaagattaggtagtagagaaatccgatctttggccgagtagaagaaaaccaacctggatcgatgcacccccagcccccaacaaccggggaggctcgcggatcagggcccgccgcctgggcacgacggcgagggctggggtggggaggtggcgccggccgaggtgggagagtggtggtggtgggggtgggggtgacgtgaggagggcgagagtggagacgacggtggaactggagggtgagggtgggtggggttttcctaggaaggatggtggtgcggtgcggtgcggtgcggctgccgtggcgtggtggtggtgggcggtggtgcgggtgcgggcgtgggagacgggacgcgcgccgggtgccaaaggcaaaggccccccgcgtgtatgaccggccaaagatgccgggtcaagcgcggggtcggggtgggggtggttaagtatgatgcgcgatcacgggagcgcggagtgtggactggaatggagtgcaccacccaacgagatattaccactcttaggacaagtactatgagcataaagcatagtctcataggtgtcacataagctaaaatagtgaggtggaggagagaagagatgaaagagatatgcagccacctctcagagcatccgcaatggttatctataggctctctacaagatatccaagtcagcatattttcctatttgaaagagattaaatgaagagagagagtaaaactatctactaacctggagatagtctatagaaaaaaacgatgcaatagattagagagatatagatacccatatagacatactattaaggtgatttactattaatctagtctattgctgagatgtacatgttttatagaaagcaccttactttactattgcggtggatctcatgcaagatgcaaccaccacacaaaattcaagacaaaaggagagagaggaagagtagattaggcaaacaaacattggggctagtgtattagaattagtatagatgtgatatattgtacatattacctctacatttattagttgatgatgtggtcaagattagatgcaacatccacctcttttataaaacttgcctttatgctccgttcggtagtacaagttcccagctcctcctcctcgttttccgcgcgcacgcttttttcaaattgctaaacggtgcgtttttttgcaaaaagtttctatacgaaagttgcttaaaaaatcatattaatccatttttttaaaaaaatagctaaaacttaattaattacgcattaaaacgctgtttcgttttgtgtgccggggagtgggctcaggcacagtagactataagctaactttaaacatatatcgataatataaaagaggagggagaagagtaggctacaaatttattcagctgaagcacgaactcgaatacaagtatttgtatgacaggtggaaccatataagtatatgtttatagataactattgtatgaattgactattaagttggttataagtgatttggagctagtagttggctatactattaaacttgctcttacatgggtaattattaaagatttatcactgaactacgagtaataaatctttaattgttatatttaaaagtggcaaataaaagagtgctcgcacaagatttttttttctaaaactagttttacatgcaatacgttatacgtgatcgtgagatttttttttctttcacttttcttgagagtttttttaagataggtttttaaggaaggaaggagaacaactaagctggtggttttttaagttccttttcttaaaaaatataaagaaatatagcggttttttaagaaacactacgcttttaaactacttcagttgcctttgtttttataattttgtagaaatacattatgttttaaaaatatacccgtgtcaccgaccaacgggagattaaaacatcgattttgctatatatatatgtcgacaaatttttccctaaaaatttgacagatgtaattacagtacaatcgtagtgtaattacactgtaacttgcatgtaattacactgtaactatagtgtaacttgtatgtaactttcaaaaatctctctgtaacatgttatttcggtaaaatggaggtcgtgggaacaaattctttcacatacgtgtgtgctatgatttgttttcttcctcaccaaaacaaatcttgtaatagatctaacgattcaaaattatgtgaaacttacatataagttacactgtagttacatgcaagttacagtgtaattacatataaattacagtgtaattacactacaattgtactataattacatctgtcaaatttttggagaaaaatttatcgacaaatggataggtagtcccttaaaacattgttacctcttgatcgagcgacactgggccatgtcgtttctcaattgaaaaacagcataactgacactagctaagacggcaagacgcaacaggcaagtgagcggaggagcacctagcacaagcatatgccagcaggcggtggtgcggcgcgtgcgagcaaagtcacattgaggacacagtctcacccagtaatccgatgtatgatatgctctgttcaggagacgcaaaacgaagtctctattattgcatgattaattgagtatttgctttttttaaaaaaaaatagattaatatgatttttttaaagcaactttcgtatagaaattttttacaaaaaaacacaccgtttagtagtttgaaaagcgtgcgtgtggaaaacgaggaaagggggttggaaactactactaccgaacgcaggaacacgaggatcgactcctctcaatcagcaataaatgtagggcttgttttgcgtcggtaggacatgaggatgtttgtttgttacaaaatttctgaagatatattcatacaaactagtgtaaaaggtttattttctccatttttaaatatttgcactgaggcactattgatacgtgctttgacaacttttttctttaaaaacataaatacttagaatataaaacatcttcttttgtcaaagtttgttgtgcgctgaacatcttagctagtgaaaagtaaattctaaaatgcttctgggatgagccacatcatccagtgaacaatggttattgcatcaagaaaaagacaaaataaaagagaagagagttgagccatcaattataaagggaaaaatggatgatgaatttctggaaccttccaacaatttggaaatgagagagagaaagagcaaagaaagaaatgtagcattggaaaagagtgggggagtcagctagcttatggcatgtgataattttgcactatgcacactcagtagaaattatgttataaataaaatctcatcctttatttataaataataattcgaatttttttataaatggactatcggcttataggcttatattttatctatagataatccttacaacctactaattccaaattactgctgtaacttgaatgtcacaatatcacataacatactaataaaatttgctatgattttaatgttatactttggttcacttctttagcataaaagctaataggttgggcttaagaatgagtgtttcacctacagatacgctttcaggttatagctgatcaactacacttctctcaacacatacttaacataatgaaacgatgtttattgttgccaatttaaattacatgctcatgtacacatataacatgatggttaaagtcgcgcgaacaagcgacattatatgctagtaaagttgatggatgatttggtttgaagccaaaacttgcataccaaaatattggcattttaaacggtcattttggtaatgtttggtttgttaccaatccttgccaataccacataaatattgtcaaaatattggcattggcaaaaacttacctataatttggcatcgccaatagtttggcatagttacaaaccaaacaagacctgaaacttttgttcattgtagcctacccatcttaaaattactattaggaaaaattgaaatatatagtaaaaatttgaaattaccaagtaaacgctaccggagggagtatgtttcttttttttaaaaaaaaaaagaaaaaaaggaaatctccgccagaacgccacccggcatcgtctggactctggatcctcctggatccatgctagaggcctagagccatagattactgatttattgtacatactttcaacatggcagatgttcttctcgaatggctctcggcgttttgttaacacaaaggggcgtaatgtgtcatgtcgagttgtcaacgaagatggtagagggattccatcaggctgagcgcagatcggaatctatctatgagtataaatgataatgatgtggatacagttaattactaatgacgtggacacgctttaagatgctctagtctctttcacaggtcaaatctcgtgttcaatagtactataggagtagcagccaaggagcagtttagttagtattatgtactcctccgtcttaaaaaaaattcaacctaggactttgatgcgacataatatagtacaacgaatttgaagaaacctaactcctcttttttttcatcctccttttttttctcttccaaatttctctctccataaatattttcattttgaaattatcattgtttaagatgtgtagcggcaagtttgttctcatgcaaatgcttttcatctacagtaaaaaaaactttcactaattgaataatcaaaatttcaatttttggtcaatgaggtatagcaaaatacatatgcgacgaattatggaatagccactcgatcgattttgtgaggctattaaaaagtgtacgtaaaggattctccgtgtgatgacgcatgaagcaagtgtaattgggctcaatgctatatatgatttctgactttgttttgccattattttatttatcttgtttcagtttgtcatttaaattggcagagtttctacccatcgtaaaaattatcttcaaacccaacgccatttttgctagttataaacttataaataaagaaagcgctggcctgcacctgtctggcccaatcggctgggcttgcacccactcttgggccttgggccagtgggccgtaagggaaagagagaggaagacacgagcttttctcctcctcttcctctcccttcgcccgcggcgacaaccctgaaccctcctctctctcctccaccacctcccctgcgaccagcggcgcgcggcagcggcaggcggccaccgggatggcgtcgtcgtcggggacgagggaggtgctcatgctggaggccccgccggcgccctccggggcgccgtggcgcgcgccgccggacgcggaggccgtggacgcgctgccctacatcgacggcgactacggcgacccggcggtgaagcgggaggtggaccggatggtggaggaggagatgcggcgcgggagccgcaagcccgccgacttcctccgcgacctcccccccgtccccgccatcgggttcgaggtagattcgcgatctctcatctcctctcctctccttgtgggttcttggagcagctctagttcagcgtcggggtcgttgcgttcaactatcttttcaggcgaaaaaaaatagaactgtatcttttctttcgaatgtgattcgcgttagggttatagctacttgtaagaatgaaacgggttagaggctggggggtgtatagggttagtagttgtgtactcgaaagtgagagcacattgctaaatactgtacattatcctcctttagaactgtgcttataactatgttttggtggcggaattttggattatagttgagctaattaactgagtatatgtggcttgcttggatttgtatagaacttttttttttgtaaagcttaatgttttgctctgctataatgtctgtatgttaacgttgatcctgaaaagaacaagagagtatttttttctgttgccacatgcttcaattgattagctcgtatggaggacagatgcctgatggtccgtgccttcaaattttctgaaataataataattgatagttttgactagatccaccctgctgcaaacagaaaagcaacatattttggctgcaaatatttaacttttttacttagcaacatttcttgaccaccaaatgaacctattgatttgatcggttacttgaaattaagtatacaatttgaggcaccaagaactgaaatataagctcttttccatgttctgtgtgcattgagctaaaccgacaggcaatttgaacctgtggcagtcaataatatgacctaaggtatcaaaagtgcacacggcagtcaatgaagaatagttattataagaaaaaagaactaaattgaatgggcattcacgctttgatgatttcatctaaataattcttatgagatgtaccagtctaggtgtttgcatcatattaactctgctccataatagttgtcttagagctcagagagcaaggaaagggttaataccttttttttcacaaagtttgcccttttggatgatataatctgtgcttatctgtgcaattgagtcatatttgaagatacatacagccatttaattcgttgtaggcttgtattgcttattgaaattatacaaaatatttgaatcacaatttgggtttcatttttttagaacttatgcctcatcatgtgaatatgtttacaaccttatgagtttttattatttgatactcattttgcacatctgttctagaatcatcctatgcttgctaaagagtacgagcgtgttagagctgggaaacctcctgctaccatagagatgtcccgctatggtttggagccacccccagcgaacaagaggaatgatgttgctgcatggaggcaggctctaagaaatgctcagagccagctgcaccatcaaatcataaggtaagagtagagagccacagggtactgaactaatgaaatttaccatcaaaggtgcagtatcgttgaacgttgtgcatttgattgtgataggatcacagggaccagtgtcttcctgtggcatgtccttttgataatttttcattaccataatagcttttaagctttccctggtgtggaaaacatagacttcgagaatagtatcagagtagataggatgggctgcttgacaaaggtttctgcagtctgtttaaaataacaagcagtattattttgataaaagagcatgttttttggatacactgacaatttgtaaattggaggattgtataatgctcatagcagaagacttttccttgtactttactaaatgtatcttgggtaaattaagatatttgatcatgtattgcctaatatcagcttcaacagtttacttgacaatgggagctcctaggttagttatgattgaacatgtaaagcttcgatcatgttacttcagaattcgactgctgtacgcactgtgtaggatatactgcttttttctgaccatggtttcttatcatctatggagtcagcatacttctatgctattattagttttgaaataaagttaatattgcaggatagagaatctggagcttatgctgaagtatggtgttgaggtttggaagcttcagaatagacaaatggaatcagttttgtctaggtaggctattgtgacataagtttattatctttgaatttggagctacgtatcctgtgttattcatgagattcatttagagccatttcagtactcctgtttgtagactctggtctcatatgttgatagtgtagcttagctgtttaaacttccagtaaagcacttattttgatatttgaagcacttatttcgacattcttgtaagtctcaatgctacttatcactgtaacaatatggatggtagattatttttatgcctgattgcatggtatctaagatgtcgaatatagcatttatcattctagcagcatatgatgggttgatctctttataggatgcaaaagatggctgtcgaatacaatgagaagatagaaactgtcaaccgcgagaggaaatttcaccaggtaattatattactcctgctcttgttcttaaccacggcatatttcacagccaagctgatcatttgtgttttgatcagcaaaacactggtggtcaactccatgccttgacgacggaatggcaggagctgtgtcagaaaaatatagctattcaagctgcatgtgttgatctgcagaatcagattgatcagcttaaacttggagctaaagaattgtactccccctctctccctactttcctccctctctctccacatccacatgactaacagattccttaacaggggaatgcccatcgatgacagcaccggaactaatcagcaagcatcatcagccatttgaggtactatttgttattttgttctcaaagaaagcagtattcttaggagtattgaagttaagtcaagagacaaaatctaccttcatcatgcttacaagtttttaccacagcacagatacataggtagcaatggaggtgagacaattccatgagatgggagctggaggtttccatcaaggcacatctttttgcatgatctgcagttgccaaatccaagataacaatctaggcgattaccttgacaacccgcacttgtgattgtattccgttatccatttttcgaggacttgtgtgcatatggagacctgatagagaaacagatcgtatgcatgctgtgtttctgttccaagtgatctaacctgtgtgagaggcagaaatctcatcactgaaatagaatgtaccttgacattgaagcgtcagttaaggtttttgttatttatgttgacatgtttgtgtactcttcctgctgttaccatacagttttactaaacatgagttgtactaaccatggaggttgatatggaaataattactacctccatcctaacatagaagtaccgacaggatctttgttcagatcactagtaataggagatggtccattccatccatccggttttaggtttttatattttgaaatggacgtagtattatacttagcatgtcatggattgaattattgaagtaagcccccaccttcctggtcggcgtagtcccttgaggccatctctaagtttgtaatgaaaaacaactatagttcacctagagcgtgaatactctattttgattttatgaaccacacctcaaaagaaaatcttagttttgaaagcactaaagcaactagaagttcattttccggcatttattttttttgtttaaaaaaatactccatgtaagaaacaaatcttcagctttaaaaccaaacattattcaactactataaaagctatcaaatttaaccttcaacatggtttcttctcatgttgaagaaatgtttttgagttattttaaaacacagatagatcatatgatccaattaaccctattctgtgaaagggcatctagcctaatggttacaagagtctcagtagcacctgagtaggggtggaactgagctggaaacaagataaaacttgagctcggctcggctcatttcctggctgcaagccttcttattgaaacacctcttcatatatattttataattattagaaaaagtaaaaacaaatcatcaacatataaaatttaaataagtttgtttattcaattcttcaaaatcttaatgataaatttcaagttgacaaataataacgccatataaagtaaaataatcgatataaacacacgatggcctaggctcacgagccaaaacaagcggctcgcgagctagctcggctcggctcattttcagcaacgagctgaaaaggaggcttgggcttggcttgtttggcttacgagccgagtcaagccaaccaagctcgagccaagcctaagctgagctcacgagcctaagcttttttttccacctctacacctaaggtcctgagttcgacaccccatgggaacgaattttctaggatttagcggcgctgtactttcagtggtaggcgacgtacccgtcgacagcgaggtgctgacttcatcaatctctccaggatttgccggcctagtcttcgaagatgctcataggggtagggtttgcgtgcgtgtgttcatagggtgagtgcgcgtgcgttgagagtttctgcgttgtactgtgtaattcaaaaaaaaaaaaaccctattctagctacaaagaaataagcatcgaaacacaaaggttcatttgaaaatctctgaaatttcatcaaacacccctgtccaaaattcataaaaaaaatttgagctgtggcgccatctcccatcccacccagcttttgctgtaccaccatgccgcgaccggagctacactccaatctcccactcgatccccacaaaaacaatttgggtaaattcgacaacgccgctacactccaatcttccactcgcatctcatctcgcatcaaccatggccgccgccgtcgccgccgccgcctgccactccccggcgcgcctcgtggtcacctgctcgagctccgccacgcccgcgccgccgcggcgcccgctgcgggtggccgtggtgggcggcggccccgcgggcgcgtcggcggccgaggcgctggcgtcggcgggcgcgcaggcgttcctcctcgagcgcaacccgtcgggcgccaagccctgcggcggcgccatcccgctctgcatgctcgacgagttcgccatcccgcgtgacctcgtcgaccgccgcgtcacccgcatgcgcgtcctctcgccgtccaacctcgccgccgacttctcccgcgcgctgcccccgggcgcccacatccccatgctccgccgcgaggtgctcgactccttcctccgccgccgcgccgccgacgccggcgccaccctcgtcccgggcctcgtcacctcgctctccctccccgccgaccccgccaccgacccttacctcgtccactacatctcctccgactccggtggcccctcctcctcccggtgcgtcctcgaggtcgacgccgtcatcggcgcggacggcgccaacagccgtgtcgcccgcgaggtcggcgcgggggactactcgacggccatcgcgttccaggagcgcatccgcctccccgacgaggccatggcctactacgacgacctcgccgagatgtacgtcggcggcgacgtctccccggacttctacggctgggtcttccccaagtgcgaccacgtcgccgtcgggacgggcacggtggccgccaagccggagatcaagaggctccagtcgggcatccgcgcgcgcgcggcgggcaaggtcgccggcggccgcgtggtcagggtggaggcgcacccgatcccggagcacccgcgcccccgccgcgtggtggggcgcgtggcgctcgtcggcgacgcggcgggctacgtcacccggtgctccggcgagggcatctacttcgcggccaggtcggggcgcctctgcggccgcgccatggccgacgagtggcggctcaccggcgcggtgacggaggccgggatacgggcgggatacctccggcggtgggacgacgagttccgccccacgttccggttcctggacctgctgcagcgggtgttctacggcgggaacgccgggagggaggcgctggtggagatgtgcgccgacgagcacgtgcagcgccggacgttcgacagctacctgcacaagcggatggcgcccgccgagccgtggggggacctccgcctgctgtggcgcacggcggcggccatggtgcgctgcggcgtgctcggcagggaggtcgagcgcctccgccgtctcgagcagcaggccgccgaccaggtgctcctccgccattgaagatgtgtgtactgctctgctctctctctttctcatgttttgtagtagcaactctgcatttgcaaattgcaatagtatcttacataaagatgctgctgctagtaataagcatggtaatttttgggatgctttaacttctaagcaataatatgacatttttattcagtttagtggaaatcccagttgtcatgaattcgtgatgattgttatgtgtaccagtactcaacacatagggaatttagtgggcattagcaacgattaattgaggaaaagaactgcattactcgggtatatcgtatatgaatatatgatatagttcaagctgacaattagtctcttaataataccggaaggggttgtagagagtagctaggtaacataacaaaccagatctgaaaagcctaacgaagaaatacaatatattcaacgaacactccagtgaaataataatccaaatctcagtatcaaaatgaccatctcctccgttctccagaaaatgcaactgctatgtaatgtggtattctggtcatccaatcaggcctgcagtcaattgaaagatgagagcgtgacagatactgtaaaaagaacaaaaccaccaatcaaattttatcaatataacaaaactttggaaaaagagttggcatagctgtgttcgggaggaggggttggtcaccggcacgcaaaacaaagctcgtattgttgcatgattaatcaagtattaacttttttttttgaaaaatagattaatcatatagaaagtttttccataaatcacaccgtttagcagtttgaaaagcgtgcgcgcagaaaacgaaagaggtgggttgggaaaatggggggaagaacacagtaagcttcaaaccatgtaccaccatctttcaaacaccctcatggtacaattgcatgacagagtaatgtggtaatggcacataggaactaccttgtttgcaatgttgctcgagagccagtcaaggccctcatataaaccctctcctgttgtggcgcatgtactctggatatacctaaatgacagcaaaatccaacaggttatgatatgtaaaaatagcataatattttcaaggaaaaaaacgaaagttattgatccattgttaaggtgattctattcatcatgtaataatgagccacataattgtataggtgaacatcactaaaaagttttatagatctaggatggttcttggtgaaaatatgtaaatggcataagatacatacggagtaacacagttattcaccccctatgactatttagttgataaaaaagagttgaaccacaaagtggagtaaggtaaaccaaaaggctgattcattaaaatattaaaacataaagtttaaaattgaaagatagaaatcgacaaaccagaatacaagaccatcaaacttagaacaaaaataggaatggatgagatgagaagtagacagcctacaagtgacaacaaaagcaaccatatattaccagtggcgttggcgcagggaatggagaccaagcttatctgtgatctcagcagcattcattgcattaggaagatcttgcttgttagcaaaaaccagcaacaccgcatccctcaactcatcctgcaaatgccatatgactgaatgcttaaagcagtgattgaaaagaatttgtatatgtatgtaacatagtccaagtgtatctgaaagcaaaattcaggattctaattgcctaagaggatagattccttaaccatatggaactaatacctagcaacattttgcataggcatgtcttaacttttaagctctgaaaagcatatgctatgtgtgtaatagtgtgtattagcataccatggcatattttggacagcatatatttatttttaaaattctgggcaaacggtatagtaacaaaaaattatgaggatatgtcggaagtgtaggaacatgcccaatatctctattgatgagttaataagtattgcaagcttaggaaaaaaacttaaacctactaccacttatgaggttatctgaaaaaaaaagggtacttgtgtatgaatatgacgaactaacaataaaatatgtgacatcagaaaatgagtattttatgatggtatatccaatttactcattttactaaatgtcatggaatggtgccatactatgttgtcttgtgaggaaaaattggctgcacttaaactaaaatcagtatgcgttattctgacatttataaatcaagtcactgatgatgcatcctgctgcacaaactatttggaggtggttatatgcttaacaagaaataggatgaagttaacaaaaccaaaaggcatgttcagcatacatcttatatgacagaacaaagttatccatgtaacaggttaagccagaaacatgaacatgatccttaaacaaagtttacctcattaagcatcctgtggagttcatcccttgcctcaaccacacgatctctgtcgttgctatcaacaacaaagatgagaccttgagtgttctggaaatagtgcctccacaaaggtctgatctgtagtttagaaaacataatgttatgagaaaaaaagtttctaaaaccctagagctgtggccatatattagtatgaagttcatatattccctactgtctgatgtgtttaaaatagtccaatacagcacaatggaaaatctactgctgattgcagaaataccttctgaagcgaaaagtgattttggttacaaaaagcaagaacgaattggtttttaccttgtcttgacccccgacatcccagacagtgaagctaatgttcttgtattcaacagtctccacattaaaccctagacatcaaagaaaaacagtaacttgatttgctctctttacaagcattatttcaaaaatgaaaaactatctctcatctgtctaacagtaatattttgcacttgcacatagagccatacaagcgtgcaaccatgtttgttcatatttccaacattatcaggttgcaatatgaaaatggatacaaaataatgcaagtgagccactaaatacaattgtaaactaagacatccaccaagccaccaatggaaggaatccagccctttttcatacaagggaccttacttctatgtgatctgtttttctttttgactacactatagtttgaacccaacttaccgacaacaaagtaggagtatttgaatgtacttaacagacacatccagtcaaaacatataaaatatcaaataggtttttacctattgttggaatggtggtgacaatctctccaagcttgagcttgtagagaattgtggttttaccagctgcgtcgagaccgaccatgaggatcctcatctccttcttggagaagaggcggctgaaaagcttcgtgaaagtgaggcccatcttgccgcagttgtgcaagaccttaaacaatcaagaatcaatatgagatatgatacaaaagcacatgcagcaaagttcttaaatctcagctcagataatgtaagaccaaaaccaaaatgggctccatagttcagttagttaaatcacaattcattcaaacgaaccagatcttttgcaaacgagaaaagtatataaggatatcgacattaagaagtactcccgtcatgccgttgtcttttaacatgacgtttgacatcttactaaaaaaattatataaataccataattttgttgtaacttgttttatcataaaaaaactataatattaacttagtacttttacatatttatactaaatttttaaataagacgttatgcgaaaagtcaagagcgtgcgttatacataaaaacctgaggtattatttgaaacggcaccgtgatccctcaggcaatgcaaagaaaacagcatctacagactatgatttcacatcccacgagtaaacaaaattcacagaccagtctgctgtgcgaaggatctatgcaatgcaacgcaacgcaacacgatgccactggaattaaaatgaacaatatacaagtctaacacgtgaaaaggggtcggcaatggaaacggataggcgatcacctcagccaaagcaaacaacggatcgccgaccagaagctcatctacggactaacaattccgcaccccacgcacgaacgaattccgcggacttgtagaggcctcccaaggatctacgcaacggaacacaacacacagcaccacgccattttctcgaggaaaaaaaattctggatcgaaccgaacgagatctacacacgcgcgacgccattggaagtttacgcaccacacgctacgaactcactcggctacacagatctacgcctccactccacggatctgggcctgggcagcagcagcagcatcgccgattcgccgccagcgccagcgccaccgcatccctccccagcaatgccccgagggcgaggcggagatcggagaggagaggagagagggaaaggagttgggcgtaccaaccttgctggagatcgatctcgtgcgcgcgcgtggcctctctcatctcctccccacctcgtcgagccgaagaaaaaggagacgacgcctcgacgcgcggtggttgcagcggagggaggcttcgagccgccgcggtgggtggacgcggtctacgtgagccgggtgtggtggactggtggtggtggtggtctaggtagagtgcggtgcacgtgagacgggtgcaggagagagcggtgcttctcatttgaagcttcaacgtgcaaccgacgctttctctaagtttcattttttaaaccattttaaaattgagggagcttctaacttctcccagctgtcccaaatagtctagattttcatttagatttcaagaatttgtaattgtagaatccagaaaatgaactaaaattctcataagttgactaccaaccagttgtttcttagaatttttaacttttcaatcaggaccaaaaccaaaaagtctacaatgtcctcactttatcaaattctaatataattattcatctgcaattatttctcattttttatttccaatacaattattctttatgttcacaaactccgatgcaatgattattttaaaaataaacttattatggaacggagagagcatataagcatgtgtacatgtataaagtcgtataaaattcaaatgtttaaagtcagggtggaacccttggccatgataccaataggaaaattcgattgggctgtgtacccaaaacgttggggcagagctgcaaatttattgtgaagatgctgttgttccgctagtttgcagtcacaattcattcagacgacccagatcttttgctcgagtatacaagatgtacacatataaagtcgtgcagaattcaaatgtttaaggtcagggtacttgggatgtaaagtgttctctagcacaaaatatatttggcatgtgcgcgttggaaatacaaaatattcactctgctcataagataaaattaaatcaatcaatacctaaacacatgagaaaatagttcaattctccaacatcacttccccacaccttgaaaactaggaaaataaatacatacgatctcctaaatatcaaaaagaaaaatagatacattctcctctccctaaactgtagttcactcttttcatttcatctcctatatttctacaacatactattataaaatataaaggcgacgaagagacgaactgaagaacatgaatcaagtcttcggactgggattcacagcatcagaatcagcgaccaggccaatctgcatagggaagatgccatttcagtcaccagggtgctccacagcacctcatatatctgtctgtatggtataatcctgatctttttgaagaacttatgatatcaccaaatacttgcaatccaataaataagatcttgtagggttaatgctcctgctgacgctatctaaagccatattgccactaaagaaatgaatttactgtcttgtttgcttctaacgccgcctcaatatccggcaaagcaacagaatagatgtgctactattcaaaccctagaattggccccaagaaatgggaaaaccaaacaaaatgcagcatgcaaagaggtcaacttttccttagctcattttctcttgattttcttgcattagtttctccagttccttctgcccagtagatatcagtgtcttcacagtatcgaacgcagtcagtttaatactgcatggattgaggaatactgtgagcaatgagaagttacgtgccagtaaacatactattacctatcagtgttgccataaatttaaatatatagttgaccaccactgtgaaaagaaaaggcacctgctatttggtagattttttaatgcatttggaacaaaacctctgtatagtccaattagaccatcacgttccacaatgcctgcattcagcagagacaaatttaagaaatgcttcagtttagcccataaaggacaagaccaagctacaagtgagcatgtagaactggcatctgagagctgaagtgaacgttatgcagtaagtaaaagatgatgtttatccaacaccagaaggactatatataaatcagctacctggaatagcatccaaaaccgtgttgtagggtgatcctttcatttgcatctgccttctaacagtgtccagaggataacacatcaaagttgcaaatgttgctgaaagaagagcagttgccagagatgtctctggtctactcttatacttctctggtacagatttcttcattcttacatacagaaaagaatagagggtgaggtgaatatctacttttgagaccaacttttttatatgatgaggtagaaagaatctcacaagtcaaaaacacagaagttcacagcaatgtaaggggcgattcctataagagacggacccaggcctccatagaaggaggccaaaccttcgtctctcagcatgttcatagcaacctaaaagttaagtcatcaggttacattaatttccagaaacgaaactcaagcttataaactagttacctgagacatagtactatgtccagattgaactgctagcctcagccgaagaacatccagtgggtaagttacctatcagcaagtagccaagtatatatagaagtttcataatgatcagaacacaaacaaacaaatcaaactagatataaggacaattgctcaggagtaaataaataaattacaagtgtagatgtcatgcccgcacaagcaccagcagcaagtctcccaaacacagtaagctctccgtcctttctccggaaaaatttctgaatgcaaagcaggtacatggaaattgaaatgacaggaatccaaaataggtaattgactgatgataaagagttggcgttatcaccttgtaaacttcataagaaaacagttgcaccgcactgtaaggaactatgcggataaccttaagtagtttataaagaaactaagtgagaacaggaccaacagaataaaataaaccatgcatgagccacaatctgcatgatggggaatatcaagcacctgtggaagattgcctttccagtaacccttcaagccctcttccttccctatctctgcaatagcctgcataattgtagatgtatcagattagttatgtagtaccagatatacaactctaagtaaaatctatgaaaaagatagctatgcttctcctccttgtttgaaagtggaaagtgcaagttcatatatccaagagaaattagaaacaattatgttaagaagtcagaccgcacatagaaacaacatgttaaagcatatgcgaactggcagtactttgtgtctaactcatcaacacatgaagcaccagcatggcagcatctgatatcatattaaaaacatctaaacgaacaaacatcatgaagccataagtaaaacttaatggcatgccactgcctatttctgaaaaccattgttaccctcatttctgaaccatacaagaagcatcatgaattcaggacacagtgagtatgttacagtgtattataagtatattggaacaaattatggctttccctcagatagcaaccacgaattggtagtggtgaaacacatcagtttcatgactcacaggttcttttttaaagaaaaatgctccatgcctcacgaaagcctttttcatgatatgtttcccagaatagttttcaaatttctaaaacgtaattttgagattgtgtgttaatttttagtaaaccacgagtttcattgttccatatcagttcacatacaaccgcaagaccagaatactgcatatttgtagtggagagaagagtaccccattgttatgttcaacaccacacacacagacagaactcggttcgttctaacttatccctgatgtattcggaagctgcacttatgaattcagggaatttatcatgcaattgcaaatgacaggtactaaaatagacagggttgggatcaactccatggctagatggaaggcattttatagcaacaacagattgacattgttgtcatgaaaatcgcagacgatagtattaacattactaaaatagacagtgttgcatcagctccatggctacagaaaagccattctatagcaacaacagaattacacactcttaccaacttagaaatttatagcaaactgaagagaagaggtggaggacatcatcagagttacctcgaggaatccgatccctttcttggtgctctcccccaccacccgcacgctgtgcgtctacaaagaagaagagcaggaaatgcagtgggttacagaccacgcacccacaggccaccccacagcaaggagagggagagaaatcagaaacccccgggacgggaggggcggggtcatggtgtgccctacctgcatgaggagcttgacgcggtcgagcggcgcggtgatcgtcttggcgacggcccccgcggccgcccccgccgcgaagagcgcgacggcgttgggcaccagcgccagcatcgccagcgggtgcctcaccagcacccccgccgccggcagctgctgctgcttccccttcccntcccccacctccccctcctcccctccccctcccccctcccgcacggtgagcgacgcgaacgccgggccacccccacccccacccacgcggagggcgagcgcgcggcgggcgtggggaggcggcggcgtgggtgggggcctccatgagtcgcacgccgccgcatccactcgccggtggctcatcgtcgtcggtgggcaggcggtggccggatctgcttggccgcgagaggcgaggcgaggcgaggcggaatggaagagagaattaatgcggaggaagaagaagaagcgaagaaggaagaggggataagggggggaggaggattgatttcctccccgttttatgtcgaagctcgagagagcggtgaggaggggggttggttgtttaaaccctcgcgcacgccggacacgcgggcaatgcactcctctctcttttttttctttctttttcgttttcttttcttgagaggattaatggtgtatgagtgtggcacaatgaaagggacgtgtttcggttcttgccacaatgtcagcaagtaaatgcggttttggttgcccgtctgttcggcatttgtgccgtacatggacatgggaaccgaatcgtggaagaagggacagctaattgggtccgttttttttttttttgacaaattgacccttttggaaaacttatttcgaaactaacccctgccaaaaacttcaacaaaaaataggccgtcgcctcagcgacgttggccgtgtcagcgccaacgggactggcgctgacattgtgccaccgtggcggccgggccgatccccagctgacgtggcagctacctcagcgccaaccggactggcgctgaggtgggacttggccgcaacccccaaggcccagaccagcaagcctgctggatggcttgcgggctgggacctcagcgccagcccacctggcgctgaggtgggacttggccgcaacccccaaggcccagaccagcaagcctgctggatggcttgcgggctgggacctcagcgccagccataatggcgctgactattggaaactcagcgccagcccacctggcgctgaggtgggacttggccgtttcggccgtggcccagcccagcaagccttctggatggctgggctgggacctcagcgccaggtgagccctgctaaactttagcaaaactttgcacacaacagaggcaaacatcaaatcatagaaatttacaggcagtaatatatccagagaaccatacaaaacatacatccatccatcaatcccaacatcattccatacatccatagaatccatcaatacatccatatatgaagtccatatatataagaaataaaaacatcccatcgatcctcgtctatacatccagtcgagtccatacatccagtccatacatccatcgaaccatgcatcaagtccatccatctatccatccatccattgaaccatgcactcacctcctcctacctctagtgcgaggacgaggcacgtcgggggtgtacctccagtcctgcgaaggagcccgccggcgtcgtggtcgagacgggccgggctgcgagatatctggctgtgacgactctggtgcgtcctctagctgcgagggaccgagctcatccgcctcctcttctctgtcctcatccccttcttcctcctcatctccttcctccgcctctttgtcttgctcgccctcctcgtcacccacctccccttcttcatccccctcttggtgggcatgagcatgttcgaccacatcagtcgacctgcagccgagccttgctgccaacttccgacatcgctgccgtagtctctgcataaaaaataatccatgttaagttatcgcttttggaagaaaacaccgtagtttcatctctttccaacgattacctgtagggcgttgcggagggtgccgccctctccttcggagccaggagccgtgcctagcgccactcccgcgtcgttgacggtccgcaagagctctcgagcctgtaggattgaaatgaagtaagtcacaacatatatggcattgaaatgaaataatatacaacattaatgctagaaactaaccactctgtcgcgaacaggtcccgtctcgaccgtggtacctagacgggtacgagtatcgtactcgttctgctcctcaacatcctcggggtcatccgctatgtcggctagtgtccaagccggacgtaggacaagacggtaggtcctgtggagccacgccaagtacaagtcgaactccgtcccgttgtgctgaccctggtctggtaccccattctcctcgaacttctcccattgcgtgatatgatcctgatggtagtaagcccaatcagtcaccttcttgttcttccgacggtccaccctgcacgtatgcaaaatgtccaactcaaatatgtagtaaatgttgaagtgactgattgggcaagcaaaataaattgttaagtgaaattactaacttgtgtaggtcgatactcgtggagaaacggtgcgggattgtttgaagcctcccgaattgccgcatcacgcggtggcacatctggaactccactgcatagaagcagatcagtgggcaccgtagggtcttcaacgcatcctctatatggcacatgggattcagttctagctcgagcacttcctgtgcctgatatggcatccacaccacctgcagcaacaaaaataaaacacattgaagcacatttagtactatatagtaagaaaccatcttcatgtgtgatagaaccccgaatagcttacatgttctggctgtaggtagtccatctcgtttgtgtagtggtagtacgccaaattcctgcggcctactactggagatgggaccgattcccacaggtgagctacagtgggacgtcggtctgcatcctggtgcggccaagcctgatgggtcctccacatgggccgaccaactggaagcctcatccacatccaaacctgcgtcacatacgttagcttccaacatgttagcaagaaattgaaatgttatgaaacataacatgcgtgaacttacctgtagcaaccaaacacagcctgctaggttcgcgtccccgccttgccttcggcaagcatcacagagttgccggtacaaccaggctagggcagccgacccccagctgaaggtacccgcctcgtcccagtccgcgagcaacggcagccacatccaagaagccatgtctccaccagagtcagggaacagaatactgccgaagatgtacagcacgtacgccctgcagtatcgctgtactgtagcctcgtctgcctcagcgggacactgaccgaagttggctcgcaaccaactcaaaggaacccctgatgtcttcgtctgcctctgaccatcaggtgccactggaggctccagaccaaggtactcctcgaccctctccctccagttccccgacgctgtgtcacctgtaaccggaaattaaatggaatcattagtaattgcaaaaaaattaacaaatgaatacgaagactcgttagtaattccctgacgctgtgtcacctgtgaccgcctgaccccggataggaagacccaggatcatggcgacgtcctccagagtgaccgtcagctccccgcacggtaggtggaaggtgtgtgtctctggacgccaccggtccactagggccgtcagagcagcggcgttgtacagaggcaccggtcgctgcgccatggtcacgaacgccaagagcttcgcccgccgtaggtacgggacgtaccggtcgtcgaacagtatgtgcgccgtgtgacctctgactcgaagggtcttcaagcgctgcatcaatagacaaacataataacataaagttagcgacaatatatcatatacaagggttgtggaaaatacatcatgcaactaggaactttaattttgggattgaccaagaaaactgaaaagaagatctgtgtgtttacatgctctgctttgaggctcctgaactttgatttgagatatctctatgatggatgatctatctgtacaaactaaaatcaaagaagaaaaaataaattcgatcataaaaaaatggaatattgttgatgctaacctctccgctggcaatctgtggggcccggtgcttctcctcgtagaaatcctccaaccccggaaagtgctccatcctgcaaatgaaaatggaatcattagtaattgaaaaaatattaaatgaaaaaatcacaatgagaacggaaaggaggacaacagaaagtaaacattgatgcaacaatatgaacttagcaaatgaatgtcatccaatcccacctgtgtgctaccctcaccacctccccccgtcctacggcgctttttcggtcgatccttagacttgtctcgcttcgggcacctagttttcttatggcctagttcgtggcatagcgagcatctattttgcatgaccggctctgaatttgtattgttcggcttttgtgaccgtcggttggctgagcctttgtatgctttgtccatatcgttcttgaaccttcttgtccttcttcttcctcgtgtgttgttctttaacgacaagtcgggcacgaagaactctccatcataacttggccactgcgatggatctaggtaaggttcaaacctaggggagtacgagtcctgcacagccttattggaagcttcataacacattcggggggccacctccacatccaaacctcgcaacttacaaacggttatcatgtgggagcatggcaagtgatggagctgagggaactgacaactacatgtgttatctctcgcaaccacgacgtagtgacgtccaccccattgaaccccagccgccgtgactccgccttgctcgctgacctcatacttcatcgaagggaaatcaaaacatgctgctctttgccccaaggttcgtctttgctgctcctccaacatgtccttaacttttgtgggccacttctttccacacaggatatctacagttgcctctttgtgtctatcgacaaaccaactattgcacttcgaaaatgtgtatgccacaatagctgtaaccggcagtttccgaatgcctctcaatacattattgaaactctcggccatattactagtcatgatgctatgacgacgcccgttggtatcaaatgctcttgcccatttgaccttaagtggcatatggtcttctagccacttctttggcctctctccgaccacacccatgaggcgttttatctcatctaggaacaatgctttctcatttatttgacatatgcgctcaagatctttcatctgatcagtcgtagctccagctgtgtagaagttagcacagaagtgcctcatgcaccacctgtggtgaatggttaggtgatgaggcatgatgtggatgatggagttcaaaatgccagggtgtctatcagaaattatacacacttctctattaggaccgatcaacttgtttctcaacatgttgatgaaccactcccagttggatgtattctccttctctaccagagcaaacgctaagggaacaagatgtaacccggcgtcgacccctattgccgtgagcaatgtaccttggtatttaccggttaagaaagtgccatcaattgctagcaccggcctcaagtgcttgaatgcttctatggactggccaaatatccaatatgcacgtccaaatactcgcctctgtactccatccaccatcctggacttctcgggatgagcctcaacacggaaatgcatggtagggttctttgctttgatggcacgcatcagtgtaggcaagcgaacatacgcctcgtcccaatctccccaaatgaccttcatagcaacttgcttagcacgccatgctttgccatacgtaggccgatagtgccatatttgcccaattccaatccaattcatgcttgatgcgagacattaactcctcaaaggtaggcttcgcaaaaaacactaattgtctaactgtcattccctcaaattggcttccatgtgtactttcatctaccacacaaccaccataatgaagccggaccaatctatccatctacaattttaaacccatgcataaacattaattacttgaaaataatatgtaattaccattgcaataccaatacttcaaaagctaacaacatgtctaatttttccaataaataagtacattactcaaatactacacattattgataaaaaaaaaactctactcctacaaattacctacccttcaccacacatcaacccctttcaaaccctctcaatcaccacaaatccatcccacatcctaggccatcaccacacatccatctcccatcaaaccctagtgcatcaccaaacatccatcccaaatatattttgtcaaatgtatcaataacaaccaaatggataaagatatgccacttccacacttcatccccacccatattatccatctaataatccatccttagccaactattatcaaaccacgtctacaaccaaaacaatgcaaaatatccaataaaactttggggaacttagggtttatagaggggtttaccttctcttccgatcccaaactcaatgccgcacaaatcaccttcgattagagaggtttttgggggagattgggcgaggagaacgcggtggcgaccgaaccctaggcgggcggctggggaaaaaacagaggaagaactggctggggcggcctcggccgggctctaagtagccaaggtcagcgccaacttacttggcgctgaggttgggcacctcagcgccgaagcggttggcgctgaggtagctgccacgtcagctaggggatcggcccggccgccacggtggcacaatgtcagcgccagtcccgttggcgctgacacggccaacctcagcgccaatgcgcttggcgctgagccgacggcctagttttggttgaagtttttggcaggggttagtttcgaattaagtttttgaaaagggtcaatttgtcaaaaaaacggtaattgggtggtaactagaaccaatacgtacttcatatgtacttaaataatacttttaaatattagaatctacgatactatttaacccatcctataaacaaaacctccatacaaatttataggatggtttaaatcttgtagtaggttgcaacattttgagacatggatagtatagtaatatagtagctggattagacctaacctattactaatcttatctagatcttgttatacccctctaaattgatttgaagtactaaattgtgtctaatctggtttttcggtactaaattgctatattttagaatgagattcattcaaattctaagtaaatacaatccaaaaaataaactaaaaaccagaacagattctcaaaaattaactaactaccaaccaaatgtttatcagaatttagctccctaataaagaagaccaaagagttgttgggtggatggttggattgagcgtggtgcatagctgcatatcaaaggctgacatcatttgcagcaaacgcataccacaataatactatgcatgtacgtgaagtgtttttttcgtgaggattattaaaagtttaagttttttttcctgaatgaacgaggtttattaaaagttgagttcaattatactagcacgcatgtagttagtctatattgagtaccactagagcaatgatccagctagccaagctaaaacgacatctagatcaccccaagtaaagcatataggtttagaaaccattcggatacacagcaaaacaaaaagaaaactcatgtcccagctattctttagaaagtccatgggataaattggagcaagtctatttgcttttcccttttgctcttggaaatttgcagatcaacggtaagattacatatagggcataaattagttgactttctttgccaccttttgatgtttgttattcacaactgagcactattaaatatgatatgtccacggtgtgttttgtttatttcttctcatttcaggttttctacaatactgctcagtactatttaggattctcgtgtcatattgattggccttcttctaattattttagcatttcaatacataaacagttgacaggtatgtataccgaattagaagtatttatctatgtcaaggttcttttagtaattgtatgatgtccataatgtttctttcaaaatataggatcatgtcctgtccccccaacacacacacaaagagataaaaatagaatgtggttattcttaggtacccctctgttccaaaaaaaagtctaatccttgctaatccttggacacatgtgtgtcagattcgtagctagagtttgcctttttatgggacaaagtagtaggaactacacttttttgttgttttgcaagtttgaaatttgacatttcattttacatttattattttcatgtagagggattgaactttatttttccaagtctttgaaatcacttcttacagaattaagcatttcatgttcatacattctttcgctctattagctcaaaagatattttgttgcgatggttcctacaaaatgttaagagttattgcacctgcttcaccttttgtaatatcacatatattgtttatatatgcgtgccaggcaaattatatgtgtcaaccgctatttatgtgatatatgctcctttttttcgttatatactattgattagggattcttatgtatgttttatatagcaggttgttaacgccaaaatttggtaagattttgtagtggattcggttaaggaaaaaacacaatcagccgatggaaagcttatccagaagagtccaagttcaaggagtcatgaataccatggcgtggcagattaatttctatctattaattaggtagagtttagttattttcccttatctttaggaagttttgtctagtgtccgattaggacttgtatctttccttgtctttaggaaacatggtgtcgcgtccgatatgaactactatctaaccatgggtgtttctttgtaaaatgtaatctatctcttgatcaatacaacttcagcgcatatcattggacatctacttcaacatattatcatcggtcgattggattgattgtctttatatcatatttatctaagcgttaaaatttagatcgggcatataacctattgtttaagaccatatcgacatcggctagtactgatacattggcttaatggttgatcggttctttgaacatcaatttatctatcttgtcaattacaggatcaaactgactggcacacccaaacctgatattttaggacttgcactggagctaagcaaatctcccatgacttcaagtgtcacgaagaaatttcacgtcaacacatgcccatatatagatggatgtttgttcctcctttttgttgcaagttttctgtgcattatattcttattagacactctccaggcccattcatgaatgatcctatgtacatgtaagcttctctattgcctttatgtgtacatgaagattatttcgtataagccttttcaagtcttacttcgatacctcagttatcttgtatagttaggtataattatgatcaataattatttaaaaagtctatgaatgatatcgtccattcaaatatatgatccaaatgactacaattattctaaaccacaatagaaataatgatgtcggtatatatatatatctctactacctaaaaaaatcaaaacgtttccttcgtccatcaaaacaaaaaaaaggaagaaaataactaaaaaaaagtctgactcccctgcgttcgtttgccagggctggccctccggtatggaaaacggagcgatccattagcgcgtgtttaattaagtgtttgctaatgtctttttcaaaaatggatcaatatgatttttaagcaattttcgtatataaactttttgtaaaaagaaaagaaccgtttagcattttaaaaaacgtgcgcccagaaaacgaggaagaggggttgggaacaagcgggaacgaacgcagcctaaatagatcagattcccccttaaaaagagggaaaatatgagaaaaaatagcgaacaaaacaacaacaaaaaaaatatgtttcctttaagtggccaaacaaaaccgtagatccaaacgggaaaaaaaaatacgattcctataaaaggcaaaaacaaaaaaaaagtggtgaaaaaaacgctagatccgattcctataaaggtgaaaaaaaaatccaaaacatctttaaaaaaaagttcgtccgattccctaagaaagtggcgaaaaaaactgtttgtaaaaaataaaaatgggttcgtataaaataaaaaatacacacgagaaaaaaaaagggcctaaaaaagtttgatttctattcgttttagtagtcagtatatatatcttctttatctctaatctaatctaactatttaaaaagagaagttttcatcgtacaactgaaaagaaaaaatgcacaataaaataaaaacagttcaaaaaatacgggagaaaaaagtcataaaaaagcgcaaaaacacgctaaaaaggttttccatcttccaaaagaaataaaaaaccgagcaagaaaaaaatatttccatcgtcggtaaaaaaataaaaaacatgcgaggaaaaaactgtcagaaaaaacgcgccatttcaaaacaatggtttgaaaaaaccgcgcaagaaaaaaacaccgtctattaaaaaacaagccgctctgaaaaaattatcagaaaaagcagtaaattgatgcacgcttgagtcggaaaggatccatcgattttttgccatctaatacacggcttttgtttcgtcatctattctcatgtattggaataaaggaaaaagaacattcgaaaaaaaagagcaaacgtgcgagaaaataattgtcagaaaaaagggcaaaataacacgcgagaaaagaaaagcaaaaaaacatgagagaaaaatacggttttcgtcatcagtaaaaaaaaagcaaaaaaaaaacatgctaggaaaaaactgtcacaaaactgcacaagaaaaaaacaccgtttataaaaaaacgagtagaaaaaacaatcgggttcaacacgagaaagaaccgatgtttctaaaaacggttcgagaactctaacgtaacgcgagaaaaaaaaagcatcatttctaaaaaaaggttagagtaaaccatccgaatcaacacgagacatacaaaattgttgtttatgataagaaccgctctggaaaaccatcggactcaacgggagataaaattgatggacgcttgggttggataggatccatcaatttttttctatctcctacacggtttttgtttcctcatctttctcatgtattagagaccctgcacgtctctgcacgtatctgtatgtagatatcaatatttgaataaagtggaggaggaacctatagaaataaacatcaatatttgaataaattgatcaaatatttaaaatattaggatgagataactaatttaccatttattttagttaattacaacactttgagttcacagatatcacttgaaagtaaatagataacaggatgacaaaaacgaataatccaaaataagaattaacagatatcacacctaaaaataaacttacacaaataaatataaaaaatgcattatcatttctagtgtaaggatatcaaacttaatatgaaatgcaatccccagcacaagacgtagatgtgtacatagtccatagtcctaacacaatcagatgtagagtacatataccatcctaatcctcaacacgagaaatacgtgtacatatagtactatgtatagttttaaaaaacctcctacttctcggcacgaggaaatcagggcatgagaaaatcgggatcgatccataacatgtctagtgacttgacaacgctagaactccaacaaacactgctagcacagatccaactaggaaccgtgtgcactcaaccacgcttatgcaaagatcatgctgtctagcaagcagggcagtgcttaaggctgcaattccccccacctcacatgcaacacatgagcacatgcattaacatagatataacttaatcaaattagggagcgtttgttgagggggaaatgagttgtaagacctcatttgcatggccagcattgagtcccatataaacaaagcattaattaactctatccatttccaaaatatagtcagttttataaataattttcatgaaactgttccaaagccaagtaccatcatccactgttgtttaaaaatgtatttgctagtactacatgatgaggaaagtagtaaaatgctagtagtgctttactacttcatttattgccaggcttatttttggtccattattgattggggagagatataaggaaaagatattaaaagaatttcattttattctcaatttttgctacacaaactagtaatagttgtaccttgaaactgagagtataatttattgtttattgtcatgctctatgcatattaatcaggagagtataaagggactatatggcacagctccagcttcacccctcctagagctagagctcagccaaatgtttcagctccacaaaaaataggagtggagctgggtggagctctctcacaaaatggtctagagttgtagagctgggtttaagagctggtgtgctaattcaaggagcaactcaggaactccaaagcacctcaaaccacatatccaccgagcaactccagcatctccaaaacaccgcaaaccatatatccaccaagacatacctacgcatgattctttgtagacgagcacagcgcgaccaactgctacgagtagcgcctcttctatcctgccctctccgcaccgtcgttgcaacgatgtaatggagcgaagcccacaaggaggcaatgggggcacatgcccccttacgctcatagaacaaagcgtaccttatagtaataatagttgatctccatggttgtgggttgctcatcatcaccaatggagcttaaactaaagtggagggagaacctatagaaataaacatcaatatttgaataaattgatcaaacatttaaaatattaggatgagataaccaatttaacatttattttggttaattaaaacactttgagttaacagatatcacttgaaagaaaatagataacaggatgacaaaaacgaatcgtctaaaataagaattgatagatatcacacctgaaaatcaacttacacaaataaatataaagaatacattatcatttgcagtgtaaggatatcaaacttactatgaaatgcaatcctcagcatgagacgtagatgtgtacatagtcgtaatacaatcctcggcacaaggagattatttgagccagtgaacatatcatgttgatcatgaccatcgtgataagtagggtagtggatatgtgtctcacgccacaaaagaattggtgtgctaattggagaagcaactccaggaactccaaagcacctcaaaccacatatccaccgagacatctctgtaagacaaatccagcaacccgaaagcaccgcaaaccatatatccacaaagacaaatctccataaggtcggtaagcatatccatcaagacatgcatacgcacgattctttgtagatgagcacaacgcgaccaaccgcgactattagcacctcttttatcttgccctctccgcaccgtcgttgcaacgatgcaacggagcggagcacagatgggggcacatgcccccttacgctcatagaacaaagtgtaccttatagtaataatagttgatctccatggttgtgggttgttcatcatcaccaattgagtttaagctaaaatggagggagaacctatagaaataaacatcaatatttgaataaattgatcacacctgaaaataaacttacacaaataaatataaaaaatgcattatcatttgcagtgtaagatatcaaacttagtatgaaatgcaatcctcagcacgagacatagatgtatatatagtcctaacacaatcagatgtagacatgtgtacaatcagatgcacataacagtacgagacatgtgtacatataccatcctaatcctcaacacgagaactatgtgtgtacatatagtactatgtatagttttatagatcctcctacttctcggcacgaggaaatcaggatccgagggtccataatatgtagtttcttgacaacactaagaactccaacaaacaccgctagcatagatctaacatgatataaaaggcatcaagtggaaatcctctatgttcaaatttgaaatcaactagttattgagaggatttacagcatgtagttgaataaatttggaattcttgtaatgaaaagaggtctatattgataaatgcgatggagaatgcaaatgatgagaaaagggctaaacagatggaacatgaactgggatagtgaatacaaatgggaaaaacataggtggcaaattattcatatcaagtttcgatagagatgagccaagagaagtttggagtggagggaatgaagtttttgtgtgctcctctttttggcctgatgccgatggatgcaggttttatgccctagcttattttgtagttttttttagtcgatctggtcgcacctgaaccaatgagaattaggccaaaaccttttaatttttttctcctgaacttaatttttttattttttttctcctgaacttaatacttccctaaaaatacttccactgaactaaagtatataaggagaaatggtgatcaagctaataaatgaaacatggtgtaataaaaaaaacataaacaaacatgtgagattgtgataaaagcaactgtgactatatagcagctcatccctcatgcggagagagagataagggggagaggggtgtttataacaaggataagcatgcattcatgataatcttaacaacactaaacagccttgactaacctggccaacagttcttgtgtgcacaatccagaggaaggcactaaatcactacatgtcaatcgatagaagagacaaatacttgggatgagcccctgcaatatgtccacaggcaaaaaagttgacagacttgcttaggagcacaccaaaagccagaccaagtaaatacaagcaccaaacatctattttgttttgtattttttatacaacctcccaatgggaataaactaagcatattcttattgatttagttgattgacatggatgagttattgaaatatttgttaaatctatattactttcaactgaaagtataataacaaaaacaaggaaggaggtttccgcatgtaaaagtactaaaaagataattcaaaacgtgttcagactttagtagtacctcaagatacatttcatcgagcagtccttgagcaccaaaaacctctaatgcgttcctcctcttccttgttctctttgtatcctcctattctctggccatagcagcagtgcacagcagcacatacatcatgaggtcaacgtagagcagaagcaaatcgacaacaaatcagaaagagcaatgcggtggcagtaacataatagcagcagcagcagcaacaacatcaacagttgtagctgtagctgtagcctgtagcggggcagcaaatcgtccctaccaagcaaagcaagagcattgaactcattttttttagcagacggtaggagcaaccgcataggagttggcaagggatgtgaagacctgaaaaaatttgaaagccttggcaaatcagttacagcaactgtcaggcgactcaagctcgtgctgccagccgttgtcgctaccatctctccccctttgtccgcaggaaaccaccgctattgtcgctaccatctttcccctttgtccacaggaaaccgccaatatccccatccattgcatctgtagtgatagatggatggggatgaacggaagacgatggataattttataagatttcatctcttcctcctcttatggtgacgacgttgcgatctactatctaatcccgctttgcttgccctagggtcgcgctcagccctcaactcatgctcactgccttccttatggcgaagatgcagagttgaggatgacgacaaatcgacagcaccgacagcggtgggcaggcggcgatgtcgagcggagttaatgtgtagcagccacagcgcactgtgttgaggggagatggcgacacgagacgaggcgatggtggtgggctaaggcgcacggtggtgggcctattggcgagccggcgatgacattggctgggggatggcagtggcgacgagccacctgggaaggaagaggggtggttcaaggcggcgacgaagtggaggcgtggggtgctcgaagcagggaggttgtccattggtttcactaatcctgctactaatccatcggctaatccaactcacaacgtaggtcgttagatgagaggatccaacggttaggaatgatctgggtatattttgttaattcattttgactttttccgtagtcaaacttaaccaagtttattaataacatatttgttttgtatttaaaatgctatgctaacttgattaaacttaaagtttgattagtcaaaacaacttataatatgaaacagagagagtagatgcctactaattgacttactatactagtaatatgaacgtgctaatgctatggcgatatttcataaaacaatggtgatagacagataaatagaatcatgttgagaatcaaacaactaattatacttgttgctcacagtatactgatttaatacaagacttcctaattcataaaacccattgcatgatcagtttcacttgagctatcaaagcgtaaggattctttgaaaaacaaaaccacagacaacagtgggagaccatagtttacagggtcaacaatcatgttttctccttttctagcctccaaaaataggaacattgattcaatagttttttaaactcccaagttactctaggaaggttgactatgaagatcgtctgagttctaaaccagagatctaccgctctttacaaactgaccaaaatcaaatctatggagctttcccccgaatttagaatggatatgttttacacactttttcaagaacacacgaatgtattgcatgtccttcatacaaaggaagatagggttagacatatcgttactatggggtagtttggatacagggttagtctctgtcacatcggatgtttggacactaatttgaagtattaaacataggctagttacaaaactaattacacggatggaggctaatttgcgagacgaatatattaagactaattagtccatgatttaacaatgtagtgctacagtaattaatcatgaattaattaggcttaatagattcatctcgtaaattagcctctatctgtgtaattagttttgtaattagtctatgtttaatactccaaattagtcagagcgttcgttcgttgggtgattggagagaaagcacatcgttttccgcgtgcacgattcccaaactactaaacggtgcgttttttgcaaaaaaaaaaaaattctataggaaagttgctttaaaaatcatattaatccattcttgaaatttaaaatagttgaaactcaattaatcatgtggtaatggcttacctcgttttgcgtgccttctcaatcttctcttttcctctcctcaaaagtaaaagagagctgaaactcactgattctaaagtttggatcactgaaggctgcaatatggactgatcacttcagaaaagagtcgacacttcaaatttatctacattgatcacacaacctaatagattcactggacaccaatctaatgacatatattttgacaaaatatgtagcagagaaagtactaattattcataaatcacatcatgagctacaaaaacaccatgaactttgcttaccacgtagagcaacaatcgacagaaagctaggcttgcactgttgtttccagcttcctatagattttcctgcaaaacctacaaaactataaaactggtgaattttcaacaccaaacatggccaatgatatgtaatcatgaaaaatcggtataaatctaacggccttatcttgttgcttatgcttatgcttattagccaaaatttgatttttcaaccttaaatttggagttgattttgtggtttttttcatcgtagtttattttttagcctttgcttttagatcgttaggaacatgtatataaaagttttattcacaaattatttctcgtttgcaaataagaataagccaaacaatgggatgtaaaaggctaacctcaataaatggaaatcttcattgatcatgatgaataaaaaacatgaccagagctacagtactatacattaattaaaaacaatattttttgataaaaaaacagttttaattactgcatccaactaacattaataggtaactcggtaaaaaaataggaacattgattcaatagaataagatgctaatagctctcccatccctactgtcccaagttactttaggatggttgactttgaagatcgtctgatttctaaccagcatcttttaaggtgttggagaggttgttgtaaaaccacagacattaaaaattacatgatttagtataagatattcaattgttaagcatccctgtcacgaaccagggggctgctgcaacaccagagtcagcttctgctcctaatctcataccatttgtcgtgatctatgaagtaaaaattgtcattcagataattaatacgaagagaggaaaccttataattccttctagtggcaggccacacagttctaatagccttcacctccacttttgcagcaatgtggaagtaattttacaaaattttaactaggttagtagagtgcagatgttcagtgcaaaattactcgtctattttaatgcgcaccagttgtcttcccataaaacaaaaaaagtagttgagccttacaaaataaaaacttagatgcagggtgttgagcattatcggtgattaggaaatagttccagttctaaactagagtgtttacaaactgatcaaaatcaaatctatgnnnnnnnnnnnnnnnnnnnnnnnntggatatgttttacacactttttcaagaacacacgaatatactgcatgcccttcatacaaagaaggaagatagggttagacatcgtattactatatctgaataataagaggatgatatagttaaagcccttcatcatgctcagaagtaaaagagagctgaaactcactgattcagaagtttggatcactgaaggctgcaacatggactgttcacttcagaaaagagtcgatacttcaaatttatctacagtgatcacacaacctaatagattcactggacaccgatctaatgacatatattttgacaaaatatgtagcagagaaagtactaatcattcataaatcaaatcatgagctgcaaaaacaccatgaacgttgcttaccacgtagagcaacaatcgacagaaagccaggcttgcactgttgtttccagcttcctatagactttcatgcaaaactataaaactggtgaattttcaacaccaaacatggccaatgatatgtaatcgtgaaaaatcggtataaatctaacggcctcatcttttcgcttatgcttatgcttattagccagaatttaaattttcaaccttaaatttggagtcgattttgagttttttttcatcgtagtttatttttcagcctttgcttttagatcattaagaacatgtatataaaagttttattcacaaattatttttcgtttgcaagtaagatgtttggcttattcctcaaataagctaaacaatggggctgtaaaaggccaacctcaataattggatatcttcattgatcatgatgaataaaaaacatgaccagacctcaattaatcatgtggtaatggctcacctcgttttgcgtatcttctcaatcttctcttttcctctcctctcaaacactccctaagaggataatatagttaaaacccttcatcatgctcaaaagtaaaagagagctgaaactcactgattcagaagtttggatcactgaaggctgcaacatggactgttcacttcagaaaagagtcgacacttcaaatttatctacactgatcacacaacctaatagattcactggataccaatctaatgacatatattttgacaaaatatgtagcagagaaagtactaatcattcataaattacatcatgagctacaaaaacaccatgaacgttgcttactacgtacagcaacaatcgacagaaagccgggcttgcactgttgtttccagcttcctacagattttcctgcaaaactataaaactggtgaattttcaacaccaaacatggccaatgatatgtaatcatgaaaaatcggtataaatctaaaaggctaacatcaataaatgaaaatcttcattgatcatgatggataaaaaacatgatcagagctactactatacataaattaaaaacaatactttttgataaaaaaaaaaacagtactaattggtgcatccaactaacattaataggtaactcagtacaattagcccagcagccatttttcctagccacaactttcaccacaatgcattttctacaattggcctcatttctgttttgaaagcaataatgagaacataaaacattgggagctcaatttaattttagagtaaatttcacaaaactacatattttatggttcaagttgcagaaaaccacacatattttgatacttggcacttaagtacatatattttggtagtttagtttcacaaaaccacactatcgatgaatggattcacttgtgatatgacgacgtggttgtttcatctagtatgaggacgtggcatcatattaatttcgtgcgatggctgtaataggatgccatgtcctcgtcctaggtgaaatagccacatcatctcgcgggtgaatctgtacatcgatagtgtagttttgtgaaactacacgaccaaaatatatgtactcaagtgccaagtgtcaaagtgcgtgtggttttctacaacttggaccacaaaatatgtagttttgtgaaatttactcttaattttatgtctggaacaaattacgacctggaaaaatcagaaatgcatttgccgaggaaaaaaaaccagtgaagctgcagccaggtatttgccatgccgctgccatagcctagcatatatggccaacataaactgtaaacataacctagcactctataagtatatggccaacacaaattgtaaatattaattaattcaacaagtatatgacagtcaatacttccgttgtagcctaaaaacaaacatataagaaaagaatgcatcgacaattatattctctagcgtgttcagactttcgatatacatattgacaaggcctcacataaatttgaaagtgagtattaaactaagttcataagtgatcttaaaacaagtaaaaaaataccatttggagtgcatcttttggaacccctgattgcctagctttgtagcatgagtcttcaaaggagcaatcaacttcaaatgtctggtccaaaatttcccctccggtattcataatatatagaaattgtgttcatcaagggataaacctagtgaattactgttgaaacacaggaaacaaattatctccagagcataaggccaatctcacagatagaggtacaaaaccttgattgagtctaacattctacagtgcggactcaatatacacacatgacagtccatttctattttagagagaaatcaaacttcattgtaaattttcattgatgttaaaaatgaaaaataaacaccagtttacaataatgcacatagaatctatgttggcaagaaataaatcattgcaacggagaagaaaccaagtgtcattattatttccatacaaaaaaagagttagagaaacatcagaaattcattgagtaggaccacatcaatatctttacatttgatgaataatatctttacattgttaatgaaagtacatcaatatatattgtggtaaaagcagttctcaaatgatttgcaaaaaaaaagagagcatatagcaccctcaaactatcaccaacatggccttgcatgacacacttctgatgttcatggaagtataggcaaattatcatggggtgtacaatataccagcaccctgaagcaccatacatagcccttgcacactctggaaacaattgatcccaataaatcccaaaagtatatgggtgaagtgattccacactaattaacagagttgtattgtataaaaaccaaacaataatcaatattgatgcagaagtacttaatagcaccaattgtggtatacatggttttgagatctgcagttaaattacagcagttacaccaattgagtttcacaaataaaaacgacagacctagctacaatgtacatctagtgtaaactaaaatgcaatcttaaaataaaatcatgtttaccttcaagccagggcagatggattgaaattcaatctttaagattcataaaaatattgcccctcaaataattcctagggtgacaaatacattctgtatacagaactaaaaaactggagtcattgcctcacatcttttttgagaaggttgaaccaacttaggagcaatttaagtaaacaatattcattcaaactcattttcttttctgaatctatgaccaaaataaacacggtttgttgaagtttagtgatccagcaatgggaacaatatttatcatgtaaacgcgccttaatgaggacaaagtttgtgcctttcttatgagcttctcatatcaacctgccataccacaaaaaaaatgccatacaaatgacaaggccctgagcttatttattttccaagacataagaaacaaagagtgatggctgaaatgcatatataatttagtatgaaactaaagaatgtagaacccaaaatttcctagcactggtgaggggataaatgtacaggatacttcaaaatttatatcacgcatagaagaacacaatattgataaagatactgaaaaatggcaagaacaggagaggttttatgcgatctttaaatattgataaataatacatggttaattgaaagtactaagaataaattaactcaacattctgatagtcctgatcagatttgtagccttatttagcaaattttaacttctttgctatgagcaagcattgcctggtggttaaagtcacagattgcacacccgtataaaaataaactgcaaaggagcagcttaaatacctctgttcatttggtaagttcaccgtatgctatatgtagtaatctccaatatgggacctttcatgatatccaaacctgaacaattaaaaaacagaagcctcccaattagctcctagaaaccacagttcacaatagtacactgaaacaacacggaaaaagttgctctttttttcctaaagtaattatttagtaaaagcttgtaatgcttcttctttacacattccacaataattggattgtcacatgctatagctaacaaattcaggggagtgtacgtcttatgggacaaagggtctatgggagcactattcattacatggtacagtcgacatgtaatataacagctataatgataatgaccttatgatagtaatgaaaaacagatgtatacttcaatgaaaactcatgagcaagcaaaataatgaatagcactaagcatggtttctcaatttctcttctgtccataaaattcctcaatttctcttcctctcccacagtgaggatgataagcttcacagcagtcccagaaagtgaattttatggcagaaaaggaaaaatcataatttgccctgaaagcaaatgcaaaaaagagcctatgtgtatattatcatgggtaaacatatatgactattcagctgaacccgttgtgtgctggaactagttttgctgaaagatggtagtgttggttatgggacctggcattcttcactaaaattccatttaaggttttataacagagtaaaaaaaaactgatgttagacactatactgaaccgatcactgcatccggcaagctgtacacggagccaaccaaatgaaattattcgtgttggccatttcagttagcctttatgtacttgaataataacaagcaacaagagctaatgatctactgtcagatgggatccaaaccgctaggcaattcaaccagtcttatcagaaagcttgtctttatcatggattgactatacatgttagcaatttctgttgcatattctcaacttggacgtatgcatcacatatcaccaacttgaatgcctacaccacagatctatataaacaacgaaatgaggataaacaggtcttaccttcacaacaggggcatatgaagaggggaatgggatcagtgcggcgtcgtgcgatccggcgcaaagaggaccaccgtggagatcaacggagacaaacggatccagaagccagacaccttgtcgattgcagactgccattgcgcgtggagaaggggagtcggcgatgtaggccaccgcggagtgcagtggtgggcccaactttttgaacctgtgtattcgaaatgggaagggttaaaaaaattgttcatacacctaaaagcctaaaaattagcttgtatagttctgaaaattaaacaattatggtaatatggtatgaactaagcaagcaagtatactaaatcaatgaattgtagttcccaatcctaaaatcttcattacaagtatcaaattttgcgattttagtcatagagacaaaaaaaggaataatgagttttatatccttactgtcgatgctaagtatatttaaacatagagaccattataagtcagtcagatgatataatactagtactctagaataaaatgtcatgaaaacttgggccaagaacaattctgttatataatttctagatgaatgaataatatagtgtactgaaaactatgatgtaccaatcaatcaaaacataaatgattcaggcattggattactgaaggaattcctgaaagttgaaaactcttgagaaataatctggtgaagtggtgatgacatgttgatatatcccttctcttttgctgatcttttcagccttcgggaggaatatttacctgctgaggaggtgctgaggaggtggccgagatggcgtgccggcgccctgcgtggcactgcagcgccgcccgagccgctgtggcgctgccgccggtgcgcccctacctggctgcctcacgagtcgcgccgcgcggccgcgccgcagttgccactcgccggctcgccgcagccgcacggcacgaagcgccggccggtcgagcccgcgagccgccgcctccctgccgcagccgcaccggcacgccagagtactggaggtagttgtgaggtgggtggcggagggaggccggcgcgaagaaggggggagagtcggcgaccacgggatggaggtggttgtgaggtgagcgggggcggggagatcggtgaggcagagggacggcagcgcgagtgcgacgcggcggaggtagcacctggcggcgcttcgtggaaggagatcggcggcggcatgtgagaaggagagaggattagggcgtggaggagagagagagagacggcgagcgtgaggaaggcgtcacacgcagaagagtagccgttggattaagatgttaccgttaggtggccgagatgtaaattgtactccttctatccgttggcacgcttgtacttaagaagtatcgtatttgtttatttattcgcacaattatacaaagtacgtgagtatataataaaagttttttttcgcccattaaaaactaggtatctgttggttactccttcatatatttacaaaagaaaaatcagaaatcatctccttttccgtaggacgtttccggcctactccttcccttttgttcctcgtgcatagagatggcaacggagaattcaccgtctggggttacatccgcgtcaccgttcccatggtgatgaaatttcaccgtccctgtccccgccaactatgacggtgctacattttatccatccttgaccttgcacggtccgtcaccgcatgtgctcatcttgcttcgtcaccgtcggagctaatgggagaggtcaaagccatggccagtagccggcaagggagagaaacggtggggtggcggcggagatgggttgcaataggtccctagctacaggacacgcgggtcaccgcgggggacgaggacggggagtggagcactgtccccgcccccgcccctgccatccccgatggtgatgagttttgcaccactagatttcctgtggatggcagatatcatccatcctcatcccttaggccttgtttggttaatcccctttagagagggattggaggggatttatttcacacctattatggtgtggaattattccccctcaatcccctccaaaccgaataaggccttaatgtgtgatttcaccgtggggaatcgatgatcgtccccattgccatctctaatcgtgcggcccatccggcatgcctttgtttcaggctgtgccctgcctcgtgttgacaagtagggttgatgggaaggcggcggtgacggaggcagccctgcgccggcggcggagctccacatccttcgatctgaggtggggaggagcggcgaacttgcagtcggatccagtgtcgccgccaagctccccgctatggtcgccgcccttgagttccgcgagctcctccacactgacgacctcctgctccccggctccccatcgcctgcccctgctcgcccgccgcgacctcttgcttcatgccactggctcgacaacacttgcaagctccaccaccatgaccttcgccatcgctgtcgagcgacacgaggtccttcgaacctcctcgctaaggtccaagtcctccgatttgcccgcgatgcagaaatgacaccagtcgacgtcgcttgctgctccccgcgctagcgaaccccgcagcgtggccgtcaccgttgagggccattagctccatcgcgccgaaaccacactgttgtcgtcgtctccatgcgacgtggggcaaaggtcgatgcggcgccggtgcccatgcgaccggagggacgactggcgctcgcagccaagtccgtcgccgccgccgtaggtcccattgccggcgtgcggagggggagagggaggacaagggggagagagggctggcgccggctctgacgcacacatcgcccatgtggtgagggagggacgacagcgctctcgcggcgtggggaagagatgggacgggcagggaaggaagtagatggatagagtttggggataggagggaaggggatagatttggttgtttttcggaaaaaaaaaaaccttgtgtttttcatgtttacagtgctgcccctaagagcagaattttctcttcttcgtgtcgcatttctttaaaagctaggggtgtactgtataaaacggaacatggtgtcagtcggtggaagtacgtgcgcgctattccgtccaaacacgaggagtctttttttttataaacaccaccatgcgtcatttactacaagaaaggttctgcgtgacacacatgcaggacgagactggcacaaccggtggaggaaacggcgcaaaaaaaatcatgtcacccaatcgaggagcttctgcacctgcaaattacataggacaactactgaggagccaaaaaaaatccaaaaagggagaaaaagggtagctctaggggtttaatatattaatgattaatgatgtaggtgaagtattttctctccttttcttaataaatttatatgcaagttacttacaatttaactcaatatatacatttccgtgcctaaccaaaataaatattctataatgattttgaggacttcacagagagagagagtgtgtgtgtgtgttttcttttttaaaaaaaacctgtcgcgtgaatgggactgcattatgtcgctgtttatgtgttgggtttggtaccacggaccacggcgatggctgattggatatgcatttagggcatacaataggaaatgtatatatggaaatagatatctactgtacttgattgtgttgtcggtagttaggacttagtacagtgtttagttgttcacttgtttgcatgaatttcacataaaaccataaaaaagaacgtatagagttacggaattgctataaatatggcgtcatatttatagcaattagtttacagtcgatcttttaccgtacaattagttcagcgatttgtgcatgtccaaaactgctaacaccatcattactactattgttgatactatacatcgatatacactatccaggacatactaatatctaatcattacggagtaaaatccaagatgccatgcacagatggtaggcaaaaggacaagaaaaggagaagccaaggaagatagagagctcacgtcaatgtctgtttttaaactgcagttacatatgtaattatagtgtgattctattgtagttacatatcacttacacaccacttacatatgtaattaatataattttaggatttacatatataattttagaacttacatatataattttgggacttacattgtaaatacactaaaattacatattagaaatttataatataaatacatgccggctatttttttataaaaaaatatggcgtcataaatatagctactccctagagtatatggagagtctataattataatgtgtagttgcacttgaacagtgcctagaagcactctgccagtcatacttgtcactgcagcacccttttgtccatctaacctagcatgctttttgttggaggattttggtgagttggactgggccattctatttttgtaagtgtttggttgaaaaactccatgggttgagttagacccaaaagggaatactatgtatatatccaggttggcttgatccgtggaaaaattggtgaactgttttgacccacctcctttagcgcagtacacatgaggcgtatgcttgtgaaaaagaagaagatagtgaaaatacacgaaacgagatgagacgttatcgcatcattaagtattaattattttaaacttaaaaaatagattaatatgattttttaaaacaactttcttatagatcattcttttataaaaacacacatacttcgggaagcatgtgcttagaaaacgtgaaaattttctactccgtgtggtgctggtgaacttgcttgagctttttcgtcgacacataaaatgatacaggagattagagtatgattaatcaactattaattattataaacttaaaaatagatttgtttgtttctttaatgaaatatatgatatttatttatttttaaaaaaacaccatttagcaatttagaaagcgtgctaacaaaaacaagaaactttcaatttggagttgataaaaggaacgcagactaaatgaatgatgacaatcaatttcgcatcctccagaagtatctaaagtatcaaacctcatgacctcatcagacaaaatggtcaagcctgggttagcttgagccttagaaaatcttattggcatgagtataccaaattagtataacaatattcacaacaatttcagatcacattctctatcgaatatcgatcccataaagattgcatcccacattcctttgaattctagtgaataacaagggaccaaaagcatgccacattcctctgaattctagtgaatagcagaacaccaaagaagcaatgctggcataaacaaatcttccggttctcttctctctccttttttttaataaatccccaaagggacacgaatagcttgtttgttagtccaaaatatttgtgccaattgtttgttttcactctgccttttagcgcctaggcaacttttctattttatcaatagagtatcagggaaagcttcttcaacttcagccaagttattaccaattatttctgccccaagggcatcaatctcatagcgcacctcctccatgtgctcgtttatgctggtcactgcctcttgaacaccttgtatggcctctttaagagcaccatcatactcagcatctgcctctgcatcctccgtgccagcagcctcggttatctctttgacatgcacacagacatgttgagccatattgcttgacctgcaatctgcatggttcaccaggcgttccgaaggacgaccagctttcttcaacacctgaattcttgccgtctgaaataatcagagattaaaaaaaaaactttgttcagtgaattgagaaatttccaagctgagacctacagatagattgtgcgtcagatcaaaccaaaacgtgattagccacaacagctagaaacaatcgtttgtcaggcttctggactagttttgagtttaattttatttagcagcaatgccatgcgttgattaatgaaattacttttccctcacaaagaaaagatgatgaaaacaaaagtatatcagaaaatagttcaatattaaatcaaggtattgctgctagttgctagacaagcaattcaaacaccctaagtaaacataacaggctaagtgcaaaatatttcaggggtcatcagtaagagagtaataggtgtagttttcaagcaggaatatgccatcctattgcaattgatactatcatgctcaaacagattagtcaatgtgacattaacctttgaatgcatatcaattactattattgctaaatcagggaaacaagtttatattacttcctctgtttcataatataagtcattttgactttttttttccagacaaacttctttaagtttggcaaaatttatagaaaaaaatattagcaacatttacaacaccgaattagtttcattgaaaccaacatttaatatattttgataaaatgagtgttttgtatcgaaaatattgctatatttttctataaactttgtcaaacttaaaaaagtttaactaggaaaaaagtcaaaacgacttataatatgaaacagagggagtattttatttgatcttagagcaaagtataactccaaaccagtcagcactttgaattcaggaatcgggatgcatgttaaatttgttaattgaaataggttgagttgctatttgtaaaacggtcagaacgaaaccataaaaacaaaaaatttagttctttgtgtgattaatcattccgacatagtagcttccttacgccacaattaaaagcaaaaaatatagtaggtaaccaagtaatttggtttttgaaaggaaatcagttttcagttgaaaataaagcataaggctgaaccatgtcaaatttcataacaacacaatggagtcatagacaggttaccagatgcaacttctctttctcgtgtgcctgcacatccttcagtaagttggcaagatcgccacgacaaatttctggcgttgataggagggctaccatttcgagaacctatagggaataatatgaaatatataactttgtatgataaaaggagatgagtcaggtgataactgcctaacttgtttcgagcaatcattgaactccgccgtaacactcgcgcatagttgttgaaaagctaattcacctccattagccatgtattcagaaaaacccctgcataactttcaaaatgagataacaaaaagaatggtcggaaccctcaaatatgacgatgctgttttaaataaaagatttccatcacagtatccaaaataaaccatgtatgcgatacaattagatttgagcgttgattttcagcacttcaagattgtatgcttgtgagttgtgagttctactttttaagttacacttcaacatgaaacagctttgctggctcaatgtagtgattatgattttaattctgtacaaaagatgagttaggttaaccagcataccaacattatttaattgctgttagcaaatacgacagtcagtgacatctttccatatgtgatatcgtattttctgttcaacatgccacttgaagcatataatgagttcagtaataccgacgcattcctttcgtttcgttgccataatttcagttattttagcgttgcataagggtgatactacttccgtgctccaggaaaaggttttatcattttgttaataacttaatatctccaatagctcatcttttctagtttaaaaacttacatacccaaaatggcttgctcttcatattcaattcatcgcctcaaaaatcacattcagagtgcaatttatcactaaaaccacaaagatcctgcctacaggaatcacatacacagcactctaacctcggcttaaaagttaccagggcaatgaaaaatccccccctgattctaaaagttactccaatcctagggttttaggggcgggactgcacaagttgcacggacccagcaagcagcgagatagtataatatataccttcggagcgtggagtacgcctcggcgcggcgctgctgcacggcgaggaacccgcggagcactccggccaccctcgcgttgctccgcccgccgccgccgcagtccatggcgtcgctgccctcagcggcagccgccgccggagggcactccgccatcgggtcgccgctggcgctggcgctgacgctagcaggatccatctccgccacgctacggccgcctccgatctctccccccttgatctcagctcttcacgaggtgagcgagatttttgcgtgctccggccggcgtcccgccctcccctccccttcccttctctctctctctatctttttccggcccagagatcgggtcggttcaggagttttttttaaaaaaaaaatcagttaagttaggaatcgaagagcaaaccgaatggacatttaacttgccacttttaacatgtgctaattaattatttatacttattgtatatgacatgtgggtccttatatgtatatgatatgtgggttcagtgacaattcttttatcaccactaatagataggagtgacaaataattaattattccgaatcatttctctcggttgttaaaaaagaaaaatcagtctctctccttgttaagccgtttttcttcttgttatgaatttcgcgtgtcaaatagtataagattggggatttatttataggagtataaattactactgtacttgtaagtttcactagcctggtccagacttaggctgtgttctttcctggttgatctgggtgattgtgagtgagttttgtttcgttttccgcgtgcacgcttcccgaactactatgttttttttaaaaaaaattatataggaaagttgctttaaaaaatcatattaatccatttttgaagtttaaaatacttaatagttaattaatcatcatgtgttaatggctcacctcgttttgtttttgtgtaacctaccaatctcctctatctcttctcctcaaacacacccttagactattaaactttatcacactttatactttatgacacagttgcttatttcgttgtcacgtggtggcttgccacagtttttttatccttcgacctgcatacacattcttgtgcaaaaatttaccaaatctatattcactaaggccttgtttagttgaaaaaaaaaacttttcacccatcacattaaatgtttagacacatgcatagaatattaaatgtggaaaaaaactaattatacagtttgcgtgtaaattgcgagaaaaatcttttgagcctaattgcgccatgatttgacaatgtggtgctacaataaacatttgttaatgacaaattaattaggtttaataaattcgtctcacaatttcttaacgaaatctataatttgttttgttattagactatatttaatacttcaaatgtatgtccgtatatctaatgtgacaactattcccaactaaataaggcctaatttgttagccacaccatagtttagcatagagaatgaagcaggggcaaaatttgctacgggttaggtcatgtttaatgtaggttaatgagtggattattcaaatgaattatgtatttgattatagaataaattaaatattttaagaaataaatatagtaaatactccctcctctatataatccagatttataatatataatccagatttataatggtaggttatatctattttaagacggaggatttgtactgatgggttatctatttttgagactattggagtagctcaaaacaaatactagtctaagtaactcagagcgtgaaataaataatccatttcaataatccaataaatgttcggtttcatatgcaaaacgatcacaacaaaaatttaaacgttaattttaggccctttttttggggtgtgggtgcttcgtgttagacttttaaccgcttgtaagacatatatatatatatataagtgctaaaattattcttcgttgctctttcattttcttccccgcagcttatcgccttcactcaaccaatcagagccttgttccgtgaggatcgaaatgagggtataacagaaattgcttcatctgctggtcctgaacatctcacgattagcaaaatgaatccttgttacattggccagtcccccaaatgataatccagcggtatacagttcgcaagtgccatggaaaaaatggctgcgtcgctgccgttgccggcttgccgcaacaacgtcgcaactcgttcacccgtccgatggaacaccggttcctcgttcctttctgggcggatgtcccatgtcgcttcttcatccatgcaccgtttggctgaccccattcctaaagaaagatgggatggatatgcatatgctggagtagattatctggcaaaccagcataaaagcaaacacaagatggaatttgcgtgacaaaacaatgtcctcagtattataacttgacctggttaaataattggaatcggcttaagtaaacaagcatgagctacatgagtttctgtcgttaaggctagataaccaagctaagataacaagctattagacaactctactatcccacatggtacaatgtcatgaatgccatgaactctaattcagtgcattatgatgcatccatgcaaaagagggaagcaatttctatttgcttgcaacagcaatgaggtgcttagcaggcaaatgttttgcctcgctgaatttcaccaatagaagccatattactggatttaacttcaaactattacagctagaaagataagtgataacagcactgagtgacagatcactaatctgaaaatgtcttcaagaataagagaaaagaaaaaagaatggaaggccggctagttaggagtttaacagaataaacactaatcgatgttagaatagaacacaggtgcaacagttcaacacaaagggcggcatgcatggcaacatagccaactaccatagcacagcagtgcaatttatgaaggaaaagcacagtttcatctgttagaaagttctaaaatgcaatatattcctgtagtcaagattacctgtatgcagaacaataatgacagactgggttgaaaatactaaggttactctacacaatgaaaaaagatcaactctttgtttagaaacatgtctgcatgacactcccatgcgggttaggataaaataagtttcgcaaatatgtaaaaaataatagaaaaggagctctgtacataaagcatgtgaaaaggtaacctgcattgggttcacaggtcaatttaaataatttaaaaggtaacctgatcttatgctgaaaatctgcacttatttagccaaaacgatgtagaaaagatccatggttctttaaatccacacaagctcttttacaataaggtcacaagccctgatggccattcgaaaatctaaatagttgtacatactgcttaattttgaaagataggattgaggaaacaaagttcttgtgaaaactttgaccactagagtaatcgatttgccagaaacagcttaaaacagcaagtttataagtgcgaagcaggaacacgtagaatcatctggccacagtaaaatagttataagcatcctgtaaaatagcaaggtgaataaaaataagtgaaatgggtctgcaaaaagttaaaatttgtatgtacaaaaaataagtttctgaaaaaatgatatacatgtactatggtgatttactagcagttaaaaaaacgttatggaagggttatgaaataactaatatgttacaacctagctgaacagttgcactgcatacgcatcaaaataaggttaggagcaaactgagtcacatgagaatgacaaggcacaacatgaaccatgcatgattgcgaataattgtgaatgactatggatagtgcatgtaaatatctttggatacttttggtaaatccgagagccagacatgataaagaaataaaccagaaatcaagcatcatttaactaaaaaagagaccagaaaagcacgtgatttcacctctagcaaccagcctacgcatatctcctattattatttagctgtacttcaatttcttttgattaatagaatatcaagcttcccaaatctttcccaagctatgcctaatatagagtatgtgcaatagaattattggaaacgattcaactaacactaacataaggcattaactccctgaaattttgattgcaaaatgcagacttcagattcttatggcaacaattgtggcattaaagaaattaacacaagatggcatgttatcctaactttcattgtgcatgcgaagcatctacctaaatagcaataccataaaaagagtaccttggctcatgcaaaagcaaactcagtttaaaagcaaccaagaagagataaataatatagcgactcataaagggaaagctatttctttaccgatgtaaaaaatgcaagatcaatttcttggcagaaaacacatgtgaaaactatttgtaggttcctatggttgggacacaatcacctatccggatcttacctaatgacccatgtaatttcttcctgggcctcctggtggagtactgccatacccaccaccacccccatagccgcccaaataaccaccagcaccaggcatcccaggcaaaccactactacccagtcctgcagaagcccctgggttaggcaaccctgaaccatttgcaccaactcccaggatgttgttcagacccaaccctccaccctgggaggcaaggatagctgtcaaggcctgccccagagcaggattcacccctgggccaccagctacacctggcaatgaagtcaaactggatactggagatggcatcacatggcccccaacagcagcaccaggcaaagaatgactatgagctccataaccaccagcgcctttcctcccgcctgaagtgccagcaccatacaaacccccaagtcctccacctttgttgggctttggtccatcaattgccttctggcagtgcagcacaaccccctcgaattgcttgtgtggctcctgaagcgctttcttagcactatcgagggtcttgtagacaaatagagcaaagcccttcggcttcccggtaaccttatcgagcccaagaggaccctcctcaatctcaccatactttgaaaagaactgcagcagtttctgcgggtctatgtctgcgccgacattgctgacaaaaattttccgctgcgtgtactccgacactggcggcaatgccagctgcgctggggctggggctaccgctggggcagggttagtggccatgccgcccggcggcacaggaccaacagaggcgagctggcaggccgtggtgcggttgccaatcttcttctggggctcacggagcgccgcgcgggcgccggaccggcggctgaagaggatgaaaccgtagcccttgcacttgcccgtggcgcggtcggtgacgaccctgaggtcctcgatctcgccgtaggcgctgaacgcctcggtgagggtctccgcggtggcgtcccagccgaggccgtggacgaagatcttccgcagcgccgggtcggcgtcggccgcgcggtggacggccgtgagcacgtcctcgtggctgagcgccgcggcgctgagcagctcaacgagctggtccttggggaacgaattcagcagcgcctggatcgagtcggcgtccctctccgccgcctcctcctcctcctccccctccccctccccatcctcgtcctcgtcgacctccacctcctcctccacctcgacctcctccacctcctcttcctcgccaccgccagcctcacgggacatcatcctctcccccgcgccctcgctggataggcccaggggctgcgacgagggggccgggtcctcggctagggcttcgggctgggaggagggctcggcgacggcggcggcggcggcggcggcggctgcggctgctgcggccctggcggctgcggacctagcggcggcgggggatttggaatcgagcttccgcttcttgcccatggcgacggcgagcgcgaggcgtgggggaaccttggggctagggtttcgacggctgtggaggggaggggaaaggggggctgtgtggtgtggagtctggggctcgcgactcgcgaggccacgcggtcgtggggctttcttggttaacggcgacggaacgggggctacacaccgtttcccacttccgtgtgtggccagtttcggtcgtttttcccaagacaacaatgccacaatgatagatccaaactataaacagtacttgtactattagaacgtaagttcatcttttctttttctcaatatataaacttgactttttgagagcggtagatatcactatacttttgtattgttaattttgtctataatttttaacaatcatctgccttgaaccattttttttttgaaaaaatatatatacaagagaatatccgaatccattttcaagaatgaaggtgttcaacaatcatagcaatataacaatattaacaatagaatatacgcgagtcgaaaaattgtgcttctttagatttatcgaacctattagtgtacatatttatctttctaaattagcgtggaatcattgtaataattaagtacggctttgtgcttcttatttgcagcggccggtttatccattatgtaaaaaacttccgtgcacttaaaatagaaaacaaaaatacaaaatatccagcaaagttgattttgccccaacgtatgtacagcagtgcgaagaacgttgaaaatcttattgtcaagaagtgtccaatccaacaagagatgtaaagattaaaagtaaaccgtataaaatatcagtaataatatgggtttagctttacgctattttttctataatggaaataattccctagcttggtgatcttttttttatttagattttcctttatttctattaacttaaatggagatatccaagacgtcagacaaaagcatagatattggttaatagaaaccattggagtggagataacgaaatcctaatttaagtttataaaaaaacaatcttccaagctccatttaacacattccatgctgtagtacaccagcaacgatttcaggcggtgaacaagctggaagctaagagcaatagttcgtctaacatgtcagtttggggatctagcttcaaaggcttcattggtcaaagtctgaggcaccaaaaaaagagtaatctggatcagcagatgagccaagcaaagggatgtactctgatcctctcacatgaacactgaagcaagctgcaaaatacataaacactgtcaaacgtctacaaacatctagcgatatagtatcccagacaactgcatatgtcaaaaaggtaatactgtactaatcaactgcggacacatgaaaaaaaatgatgctagcccatatgtaaatattttcacaaatgagtggaacccgattcacacgatacactgaaataatttattttccagctgtaatatcaagtttgtgaattttgtccatactaaaacattaaacaaggtagaacaattgctatagttcaatacggtaagccgaggcaaaatcaactactcaactacagtctaacatgcaccccccccaccccccctgcaatcattcacgaggttaagaaatgactgacgaaagtcatgttaagcattttctattttgaactagaacatttggattccatcaatccatcacattaaacacttaaacttgactagtacatgcttccaagttccaaaaaaacttaaaatcaacttagttagctagttcaagtgggggcgtccttagaaaacaaaggattcaacaaaatgtcagagttatgaggttctccgtgcatagagaactaagccggttaaaaacgggattcgatatgtcagttgtaccaaaaagaacactagatcttggataaaggaacacgtcatcaaacaaaagtgtgccattttaagaatcgggaaaatatagttagaatttagcagatatagaaaccacatctttggttggcacaaaaattattaacagtcatttactagtataaatgagcattagaaatgaagatacctctgaactaaggaaagtgcatgttaactactaatctatatagcatgttaaagagtacaagtctatataacatgtctgtatatagtttcacttaaggaaaagataatatgtttcatctattattcatgttgtgataagtattgatacgtccaaggattttatgtattttcaaataaaggtcataaatgaggactctggtataaagttgatattgttgggcatcaaagaagtgataccattctcaattttcactacactttgcagcatagtctccatcttcttcttcatctcactattgtcatccatcagaggcaccacaagggtcagctccctgtatatatcacgtacaaatgcacaaatgtttttggcatattcaacttctccatcagatatacggccaattgcaagcctcatcagctctcctgacagatcggcaacctaacatattgacagcacagaaataccctcaacaacttcaagcagacaaagaaaaggatatttagcagaactaaattttggacagttgcatttacccctaaaacatagtcgagtacatttatctgtaagggctcaacagatttgtcacccagctctagcaaagaatcattgatttcagcaagacttaataaagtgccagtcttgcaaaatctgcagaatgttgcagcttcaacatattcttgtacctgaaatagtcatgacaaacatattggatccgttacaaacctagaacagaaccgatgtaaaggaacaacatttatactaacaccaaaggtataggcccttctgagcttccagaagtcggtcccttgcagttcttttaccaacttcccaatgtattggttaaccacaacagtgagatcattttcagcttttgaaagaacctcttccttgttattcttacttatcctgaaacaaatcagttcagttataaattaagtatagcagcaaataaaattgcaaagcagtataacagagagtaggtcaatttggttattaactatgaaatcatgaaagagacttttgagatgagtatgtatagttctccaatgttgtcagatgaatggacaattttgacactaaataataacttgaatgtatcatttgcacatacagcttttatcaattgccaaaggttgagactagcaataacttctcacaacgtgccacgagatgaaaataagttcatctaaaatcttgtttctgatcgccttcgatttggaggaaacaaatactccataaagcttagctcatggagagttcctgattgtccgtacagtgagagtaataagttttgcaaaaccagaatgacgtttttacactaagaataaactagaatttactggttcattgacattccacaataattttagtatcacatggcatactaattcataacaaactaaggtaatgaatgatacaaggggccctaagaatcacattatctgtcaaggaaacatacatggataattctcttcctttatttaatgaagcaatgtaatgccactagcacaattgtttgcttgtcaaattacctgtgaacctgaaagatggcctttttgctgttcattgtcaaatcccgacttgctttcacaagcctttcccttttatcattctacatatggaaaactgatgagataatataaaaatattgctaacttaagaaagatacagcctgctactaccataactgctttcagcatgtacaaggggaaaaaaatgttcaactgaagaattacacactaagagtagcagtgccgtccatatcacacactaaaccaaatatacatatcttaagcagagctacctagcatctagttcaagcagctttgaggatcagtttggtacaaatgtccaataacaataagttttgcagtgtccacaccccgtgaggtcagtaatctttacttgtcaaaacacttctcctaccctacaccactaaccggcactccaaagtgatcgacaaggctatctcgtcaataatgcactcattagcagaagccagtgatcgcataggctcaacgggaatttctccgagcacctggcccgcacaagatcttggcaccagatcacaccaacagtttccccaaaaaaaaaatcatgcctctactctactctaatatacgacagcgtcctctttgagcgcgccgctgcaggggggaggaaatagctcgagaagagagaacgtcgtcgcacgccaaggaggcgagggacgagcgctctaacgcgtgcgtacaacgtaccagggtgttgaggtactcggcgtgcttggcgaactcggccttcatcgcggagcaccccgccgaggccgaatgcgccgtcgccgccgcgtcggtggccatcgtcctggacctcttgggcgccgagccggcggtggaggctgcagaggagggggagcagagagggtgagaccgcggagaggggagaagaccgaggaggagagggaggggagtgtccagagcgtacgcggaggagggctcgcgcggagggttttggcggggtgggagtgggactggggcgccgccatggacgtggtgggggtggtggtgatgggaggaagaagggagggggcggtgacgccgcgcagggagaggaggcggcggtggcagccgcgcaggggcaacatctgtcagattgtgggccccgccccgtctcggcacttccgtttcctttgcctcacttggtgcgatttgtatttgtaaggcataatatgcttttttttattattgtttttttagaaaactaaaaaaaaattcgaataaggccttttttaatggtggtgtttgaatcagggactaaactttggtccctgtcatatggatgaatttggagtattaaacatagactacttataaaactaattacataaatgagagttaattcacgtgataaattttttaagcctaattaatccataattagcgcatgtttattgtagcatcacataggctaatcatggattaattaggctcaatagattcgtctctcgaattagtccagggttatagaatgggttttactaatagtctacgtttaatatttataattagtgtccaaacatccgatgtgatagggactaaaaagttttagtgccatctaaacagggtcttagttctcaaaaaaaattccaaaaaacgtcacatcgaatctttggacacatgcatagagcattaaatatagataaaatgaaaaattaattgcacagtttgcatggaaatcgcgagacgaatcttttaagcctaattagtccatgattagccataagtactacattaacccacatgtgctaatgatggattaattaggcttaataaattcgtctcgcagtttccaggcgggttatgaaattagttttttcattcgtgtccaaaaaccctcttccgacatctggtcaaacgtccgatgtgacacccaaaaattttctttacgcgaactaaacaaggcctatgattaagttcaggagaacccacccaacccaagtacatcgacgaagagatacacggaaagtattgaaccgtcttatcataaaagaggctaactgaattaaagaaacaaactttctaatgaaactgaagagtagcataggagcagatcgatagggtattgtgtcatttgtcgcaatgattgcgtccttaggccttcgttaacgtgcaatccgcttgacatacaggtaatttccttctgttgcctccacagaatgtacacgcattagaggtttgttgttgatgttgcgtggtgtggtgttcatcgttaaatctgaagagcactaatcgcaaccgcttggaccaagggtgcacaagcagtctatactcaacccgaacaatgaaccctgcatggttaccgttgcatagaaaacgtcgagaaagatgttccctaaatccaaccaaccttaatcaagagagaacttggacggtggcagtagaacatctgtcttgctagatcaagctggagtacatcatatgaatattgagagaaattaacctttggaaaccttaaaccattaaatgctataacatgtagacttggttcaccacattcagttgaacaagcatgaaatccacaccaacgtcatagtcttcgttaagcaatacctatctactcacctactccatcttgaccaccgaccatcatccgtagcccatccatcaatcgagggagctagccaatgagcagcaggtttggatcaagcaactgttggttcgggcaaccccaccaccagtggaagggcgcagaagtctccagccaaccccatccaaatcaccgaaaagaggaacctgaacctagcattgaggcatcggatccatcggaatatggctgcaccgaaacaacagcttcaagcctccatgatgatttagccaataaagtcgatgaagggactatccaccatggtctagcatgcatgacacttgagatgtcctgcaacacataccgccaccatgggtcctaccaccttcagcaaacgctatggacatgacaccaaaacaggattaaccttaaaacacaagaggacttgacatggaactcgaacactaaactatactacacttattaaagaagaaggcccgacccctcgtttgaccatcaccgacggaaagctgtcggaagcaaggtggaaaaggggtcatggaagggttttactgtagctctctctctctcttcacctttgatgttctccagaagcctcccttgtaaggtaggctgtttaaatacaagaatatgggtgtggaaaaagacacaagatttatggaatatataatattgtttatggagtttttatattgaatattgttcagaactatattaactcatctgtactacctgtctaactccgtccatactatattaactcattaatactacctgtctaactccgtccatacaccagtgtatagctgtatagccataagtaactattaattatcccacaaaatgtaacgttgagacaattttctgtataacagcaatagacttatgccactttttttttataaaaaaattgtagcattataagcacccaaggaactatgtataatttacttaacaatataaatattttgcaaagatacacaaattatgagttaaaaaaacatgtgcttttgcgattttgctatatatttgtcgacaaattttctcccaaaaatttaacagatgtaattacagtacaatcgtagtgtaattacactgtaacttgcatgtaattacactgtaactatagtgtaacttatatgtaacttgcaaaaatctctacgtgatatgttatttcggtaaaatagaagttgtgggaacaaatccttacacatatgtgtgtgccgtgattttatttttcttcctcaccaaaacaaatcttttaatagatctaaagattcaaaattacatgaaacttatatacaagttacaccgtagttacgtgcaagttacagtataattacatataagttacagtgtaattacactataattgtactataattacatctttcaaatttttgaaagaaaatttatcaataaatgtataggtggtcccgtgcttttgtattgtgtttgcgtgaaaaaaggacacggtaaaacaagacgttggaaacccagtcacccacggccacagcccaacaagcccacacaggccacaggagggtccaaccgtccaagggacagacgacgacgagcacgagccccagcgaaaacaccgcggcagcaccgcagcagccgccacccgtgcatccctacccgctgctggccccacccgtcatatacaccctcatccagccggtatttcctccccacggtcggggccccacatgccagccagcgctttgcctttcccacatcccctcctaaacacaaaagtccccataggtcatctccccctcctctctctcttacctcacgcgctccacgcacgcagagtcgagacgcgcacgccaccctgtcgctctctctctctcgctctcgccctcgcctctcccctccccatcaccacccaaaaccctagttacccccaccctctcaaaaccctaaccccacctcaccaccctccccggcggcggcggcccttgtggctgtgcacccatcactccaccggataagctctagctatctatcatccaaagcagcttactagtctgtgctctctctgtgtcggaaggcggcggcggcggcgcggcggctggtggtggtgggcgggggaggcggcggtagagcggtggtatctgggcgttttgtggcgggggcggctcgggcgtcggcgatggaggagccgaatgtgggcggaggggcggcggcggtggtggcgcctgagggggcggatccggctggcggcggcggcggtggaccgggcgcccccgcgtctccctggaggaagaccacgccgccgcctgtggcgggtgaggcggtggtcatgggggccaagtcgtggcccgcgctggaggaggctaggcagaaggtcgccgccgcggaggccgcggcgaggccgggggcgggcaatgctggcggcggtggcgaaccagcgaagggggcgcaggcgcagcagccgtcccctcccccgccacagtcgcaggtataatctggtgctcgtggccagccatatgcttgtttgctatggctttctatttttgttagtttagttcttaaggaaattttagtgtatggtaaagtttgctcacttcggtagatgtttatagtatttgtctctctatacgaaataggtataggttgggtctgggtatgcattggtctactggtgagtagtaaagtaaagcttggctgtttttggaaccacgtatttcaggttcaactttctcgagtgtgttcaactgtccatgttagtttttttgcttgacaagaccgcttgtccgcttatgttcaaagtaggttacacatgcattttgcattatgatgtaagtttgctatttgtcttagaagtaatgttctctctcaagtcaaccatgccccgacagcaagtggttgatagattataggtgtcatattttgatacgtaggatttgtgcattttttgtaacctattatcagattttgtttccacacaagttgtgatccaattggatctttgtatgattttgtccactgtgtctgtagccatcacattattttaggtattgctgtttggtcgcaaacttgcaatcattccaatgctatctagacggttattcaatcttaactgaacatgccttttatagctatctcctttgtaagactgctgggatggttacctaactgactcccatggaagcactttcttgggtgctatggcaatgcagtacatattgaacttatttatcatcgtgggggtaaatataagccttgcatttgtggcagttttgtaacgatcatgatatacatttatcattgttaagatgcatgggtggtctatcccatgaaactgatttgttccaaggtccactcggtaagatcaggaaaacatcattcttatttggtttggttccttgccttccctgtaaaccaaatagttgtcaaacaggtgttttgtgtttcacatgcagactaaggataattgtatgcttttcatcaaatggtttaaagtcccttaggagttattttttttattttaatgttttatgagctgaatatacattattttgtcactgttctacacaagcattttttttgctgatcatataagcattcttcctgttctgatttagtctgatgcaaagggggaaacacttgtttgtaggcacctaatcgcacgcacaagtttgatggccatggaaatcccaacaagaataatcaagcataccatagaaatggccccaagagacgttctcctgctgcgaatgggactccatcttatcctgccgcgatgccatatcaccaacatccagggcaacctttttactaccctgttattcccagtccagtgatactacatgaatatccttacccaccttttgctgttccggttccaagtcatgacccgcatgctggaaaatctggatatgagaattctatgcctgcttatgttccagtagatcaagctggtggcaatgaaggtaaccggccagtgcctccacaaccaaggggagaccttcatgcttggaggcctcctgttggtgcaagaccccagcctggccttgaaggccgtggccattttaatcacaattggcagaatccccagatgttcggtaccagggaaaacacaagtgtaccacaaggtgctgggccaagagctttcatgagaccaatggcacatctgcctcacactctgggatacataaatggtccaccataccctggtaatgctatgctcactgtaatggcatctcctttcatgcttggtattagagctttttttgcaccaatattaaaaaatgtgttgacccagggccaatgcctcccatgtattattacatgcctgctgtacccatggagccgatgagaggtccaccacgttttgtccaaaaccaaccacctcctcatcctgttttatctcctgaattaagagctaaaatactgactcaagtggagtactattttaggtaaattcttatttcttctattgagttgggtagctattttatattgggttaagtctgatttactccccctcaattatcacaaaagtacgatctaccccccttaactctaaacaagatattttacgccctcaaacttttaaaactgtacgaattaccccctttgcactatattgggtagtttttgcataagtggtgtctatgtggcaacaaaatcagtggaccttttttttaagacctatggacccacctcccattctcctttgtctgtgttctctctctgtgttcttcctacacgagcaagagcaaccatccaaatcggagatctctcaaaaccacatccggcatggcagcaacagttccatttctgtgactcgcctgatgcaatcaataactggctttgcttgaagggatgcctcccactgaatccaaggccatatgtcatcgaagtatccagctgcatatgactgattacttcctgattgatctctctgttgagctatgatgcacacctagatggagctgctgcacatggttggagctcgtcaggtgtccttttcctgaaagttcgcgaggagatcgccagcagcttgaatgggcctggctgtggatagatcggggaaatcactagcagcttgggctccgctgtcgctcccgcctcataccagtctgccactgttgtctccatcgtgctgctacagtggagataggggcagggagatgcgactcggttgctgctcagaaccagatgccatcgcgcctaaagtccaaaggttgcaggagggagaggggagagaaataagaggggatgaagaaggtagggagaggctgacaagtgggtctgattccacgttggatgccatgtaggcttaaaaccaccatatggttagcagaagggggtaaatcgtctggcttaaatagtactttttccccaaggaagcatgatggttgatgactagaaaacaggcatttgagcatttacactacctgatagagttttcatgcaatttcagaaagcagtgacaagttagtcccattgtatgtctattgaactttggaatatatgaactacaatttgattttgtcaatttcattgttgttatcctatatgcaaacactgacatgctgcactactaaaactattttgtatgtatgtgatgcacatgggttatcatatgcacttttatcatttgtcattcataaggtcttttatttacccattatgatgcttttcagtgatagtaatctggatcatgataattttcttaaatctttaatggacgaacatggctgggttccaatttccaaagttgcagacttcaatcgggtatgtttttctcagtacttaaacttttgctatttcacctttatattatgccatataactactctgctagtttggcttgtttagttgttttgcagcttaagaaaattatcaaggatatacatctaacaactctgttattgcttggttcatttgcagcttaagaaaatgaccacggatatacaactgattgtagaagcattggcaaactcaagtcttttagaagttcaggtacgtttaatgcaactattgttgcttagatccctcttagaatgtcatctctcttatttatcttatgccttttgtataccaccaggatggtaatatgaggcggcgttctgactggtcaaagtgggtttccttgtctgggacatctcttccgagtccatcttcaaccagtatggataacactactggtgaatgtaataaggatgcttattctgaagatgaaaagaagcctcatcctcgcagcgtagattgtgttggtatgggggcttctgatgagccatcacatgatacactcagtagttcagtcacttcactgaataagggcttatcaaacattagtattgataataagcctaagagcatttctgcatgctctctgaactcacaaaaacatgaagctgcttttaggactggtgatgttaaagttcagaaagtaaacacaaagatcaaagtgcctgattctcagagggaaagaggtttctgtaatgatttcataagtgactctcctagcttcagcggcgatcaaagcacattcttgcttgatgaggaattagaattggagcatgcagagctttcacatgatctctattcgcacaaaaggtgaattttaactagtttatatatgatctgttacttcatttcatgagctataatttgttgttttattagtttgttattcatttggtagtttatagtgttgttattgtgatttgagattaaggcgattttggttgtaatttaggcttcctactctggccgaagtgattattattttatgtattcatttgtacagttttatgaaatgaaagatgtatccaggccacttatgtgagatgtgtgctatactgctacaccctccttttccatcagttaatgtcctattatttgatgaaactggatattcttctgtgttcacattttggagtgttaggcacatgtattctcagaagttcaaaaattgattatatattttttcatgtaatactgcatcttttatctactacactgcagattctagaaatggtatgcatataattgattctctttatgtttgtttaagcagggtcgatgatgaggaagatgatttttatgttgatgaccaagatgtgaacaggctaataatcgttacgcaggttagatttcaagtagtattttgtattgctagctctgtgtagtgatatacctccttcagtttgcagctccttgccttcgtaatctgaacacactgggcttgcctttttttatgcaccatgcaccaataagttttgggacagtttcaatggcgttggatgtttaactatttctaattttcatgttatgatgatttacctgatttcttattttttgtatttataatagtcttgctatttcccttgctacgaatcctatttgagcagattatgttcatgcttaataattacataacaaataaatagttgattgctaagtgaaattttatgctttatagggacatgccctttttatttcatgatttttgacttgattgagatacatttccatgtactgtgatataccattattttaacattatttgctttataatgacttgaattttctcatctctaaatattatatgttaattagcaccttagcatccatcaagcaaattttgcagcacgctatcttgtatgctttcaccatgttaagcaagtcttgtcttggtaatagtgcaataaactcttgtcaactatctgcgttacaggacggacctcaagcattttcaaaagaggaaatatcaagaatcaatgaggggttatattactatgaggtaatattttagagcataaaaagaacaagattatcagtaattggggttgtatgtgcattttaggggccaatataatgttgacacagtgctgtgttgtttgggaactgccattcactccaacgcttgtatttattattttattttaacaattacatgctcaattttatgcaagtaaataagctttattttgggcatgcaattcaacccagtaggccagtatcctgttttatcatgaagtatccataaaattaagtaaaattcctgctcaatttaatacaattgtccaggctctaattcaggttttctgttttttagattatcatcccttttctttctcaagaattgcctgcatttgatacttgatacatattatagctttgagttatatgttagaaattagaaatgtcccagtagcatgaatctttccatgtatagtgctggatttttttttttggtatggctaatcaattctttgaatttttgaatcatttgtactaaactgagtgttgggaaaaaggtacgagacaagggttatcttggagctaaatcgaatttaagtcaagccaggttgatccaaacctgagctgttcttgcctttctttatcccaaagccctttctggatttatgcttgcctataaaattacattattctcatgctaatacatgatatttattcttgctttagaatcacgcttataatcaaagaagttcccaagctggcaccatagatattgattctaaaccagctggtggttcaaaggggaatcccattaatattgtaaacaatggaattgaagattctggacagcctatcccacgaaggaggcacaacagaggcaatagaaaagcacagtcctctcataagcagaggttctttcctggtaactttgcgaataacaccaataatagatctcactatggcggtgtatcagagagccccccaagcaattcaattggatatttctacggatctactccagaaaaccacaggttaggttaataaattaattgaggttttatttctgtaaaacaaatacttatctctatgctttgtggctggtcatattgtcatatacctgcaccattcttagcaagagatttgaaaactgagtacatgatttgcgcatgacatttaagtttcaagtttatacacttgcatggacaaatccatctctgccaacctgttttttttattgaaggtggacagacacccactgttatcatgagtgcctttttcattgaagcaaagctattgaagttatcttaactaagtgttgttgtttagctatagaagttcaaggttgagctcatctcctcatggaatccctactggtagctcgcctgttggttctgtgcccaaatctttcccaccatttcaacacccaagtcatcagcttttagagaaaaataaattccagcagcaaaggtaagctgtcagtatagatctcaattgagttgcagttctttctagtactcattcctttgcaagtgtattactaccctttattcgttgtttcatagtaaattgatccgttttaatgttttcttctgcatgtaaaggtacaataagttcaaaaatcgatgcatcgctgaacgcaagaagttagggatcggttgcagtgaggtgcaacttcctcgcacatctctctttctatggcaacgttctaactagatatacataaatctgaccaagctcatttattactctctttgaatcattttcttcatatgtgaaatcatttggtgttactattgttttggcaattattactgattatatgccgcatgaatacttgttctgtttattgattatatactgatgctcttctatcttccaatgtaatgcaggaaatgaattcgttatatcgtttttggtcgtattatctaagagataattttaatgatgatatgtacaaacattttaagaagtttgcactagatgacgcggcagcaaattacagatatggacttgaatgtctcttcagattttataggtacggtacataaaaattttatagtaatattcccatttttttccttgcattccataatatagcagcaatgttcactgcctgcttgtatttacagttatggtttggagaaaaacttccaacgcaatgtgtatgaagatttcgagcagctgacactcgaattccatcacaagggtgatctttatggactcgaaaaatactggtaatttgcatttctctgttacttcctgtcccctagtaatctaattatgtggctactgtccttggggaaatatttagcacagagctatttacacctgagcaaacaccaaacagtatgcaactcaatggtgcatttccaatatcaaatattcacaaccttatgctgtggagtattggcatgataaagttgtacatgctcagtcccagcacaaagatcatcaacaagaaataccatctggtgtcactaatacgttacctcccttctcccacatgtgaacctcacactagatcgtattttccaatttatatttttttgtggtggcactgaaccaaatcttcttttgattataacacacgctattgttacatgaaagctggttcagacctggatagcctgggtacgccctgaaaagggtaactgaaaatgaatcttaaaattatgctggactagtggaattggccaacctagcagttgtaagatttttgagtttgcgatactttgttgctgacagatctgctttttgctaattgaaccagggctttccaccatttccgaaatcaagatagcagccccattatcaagcatccagaattggagaggctcctaaaggaggagttccgaaccatcgaggatttcaaggcacggaaggcagcagagaaagaaactggcagcagtactgctgccgccgcaggccataacaaggctgatgcgaagtaggtcctagcatggcatgaaattttggtggtcatcccacaaaaaggagaaagtagcaaaaccgtttttgtttggtgaaaaacttaaggatttgagtagacacctgtgcagattttgttctcccctgccgacgatacttgtgtggccttgtccaggaaattttcctctcgcattttttcccattacattcctggcgcnnngccctgtgggatttgtacataaagataataattacttgttgattaaatggacaaataatagagcctggagttaaaatgacacggcattgtcgtcttgccgttgcttttggaaggtttatcttaggaagtttcttcacctgtggtccggaggctggaaaccaagtcacggtcatattgcctttgtgagcttctctccatggaccatggtccttttcgaagtctctttcacttctctggtggcaatgcctttatttttgtcgtcggccgcacgttatatgtcagcacaaagtgccatattctcgttactggagatccggcgtactggcacgacgaggttttctcggtttgtgatgccttttgctgttgcagtaagggcctgttcggagaagtttccagctgcagcttctcccaaaatctctagctcacccaagcaatctagattgtcatccagattttaagaatctgtagttgtagaatccagaaaataaactagaactctagaactcagaagcttaaaaacccagctcatacagattctcagaaattggtcaccaactagaaaattcttaaaatcttaaactcccctaaatagggcctaaatcgtttcttaataagtactagtgccatgtgtctggggttggaaatggtaaaggaaattttcgattgacggagcacagtttccgtataaggggtattgttactcttttgttcccaaataaacactatgtttatttatggatagaggaaatatttcaaattcattaaaaaaaatcaacttctaagaacgagataaatgactattcagatttattctcgtaagttggttttcaggaatggaggatatgtacaagtttttcgattttttgtttgcaaaccgacataatggacgttggacccaaagccagcacggacgataggagaaaatacagtggccagggctgaggctctgcgtcatatggatccgagcctaagtggagtagatgctctcgtagttcgaatgagtacccaatgccagtgtcaaaggaccacctgttatagatgttagtccaaataatcttttcaatattgttagccatctatcgactcaatcataccaaattacgataaacaaaataatactacgagtttacgtatagcttatatctccagactctaattattaaaacacctcaaccaacatggcacatcggctactacaggtttaatagcctaactgtcatccttcctctatatgactgctacattgtcattatcattgttacattgtaatattcactctgtatttaaaagaataactagaggattagagtctgatgctaacttaactttatatcgctattaaaacttcaagtttaattttactttagtatagtatagtcagcgccatattttcacttctctcttagaagtcatttgatattgtcattcttgtttccaaaggccggtgttctatttaggttgtggtggtcttggagtgaaaatatttttgtcacatgtgattcattgtacatttagttaagaaattttgtattgcaactttttttcgcttgctgtttttcactctccacctttactagtaagacgtttggtcgctctctaaaacgtgtctaataattcgtcgatgattaactttagagattggtcctacccaatccccaaacggaactaactactactgtagttccggaattatttgatgatagaagacatctgaccctagatttaattagaacagtaactaagttggcgtgtacctaaaacctctgcataattgtgctacgagtcattcctaaatggacagaatgaacagctcacacatggacggtgacgagtgacgacaagccccagctagatccgataattttccagctcacttgggagttcaaatgttaaaaatctctgtaaagccgttattgcgtaattaatcgaaatgtgaccttagcaagttggcaaattgtgaaaaacgcctactaaaccaccaatatttattacttctaaaacgagccaatatttttgtaataagacgtagccggatacagactgacgtggatattgattgattttcatcattaaaagtacagtgtattcttaaaaacgattattcatgttttttaatattgaaataataatttctggcctctattcatgatgttgtacataatcgtaaaccgttgttcatgtaaatcgcataaacggtgatgtgggtattttaagataaatgggaatgtgcttaatatacttttggacaaaggaagtatctgtgtgtatctacacaaacatttactccccgatttttgtcgtccaaaacagttcttgggctgtgttaggactttggagtactggttgataactcattcccctcacaggaaaaacaagattaattaagtattagcttaaaaaaatagattagtaagattttcaaagtaaactttttatatattatttttaaaaaatgcatcgtttatatgtggtgaatggttgaaatcaatttaaactagctctctataatagtcaatactatagattaaatgtatttaggacgtgtaattactctcagttagagttaactaaatagagtattaccatatatctaacgctacaatagtgttgttagtgatgggagtgaggatgttagcatgttgcctcccaccaactaataatgcttttaaagagagaacaatcccacctactcaggttgattatatggtggacacatcccttattaagatcaactccaaggctcataatgctagaaaaagatatgaacgtacatgtataattgtgtcgcccaagcagacattataagcaacagaaaattaaaaagaaaacatacctactctaaaaactttagggagcatttgtttgcacaaagacaatattaatagctgtaatatttaaagtactatatttaattaaacaaatttggtcttgtagatgttgaattttttttataaacttgatgaaaactaaagaaatttgataagaaaaatcaaaacgacttagagcagatacaatagcaggctattagccagctgtaaacatattttactaagataaaagatgagagagaaaagcagcagactacagatctatagccagctgtagcacggactccaagatgtaatgtgtgtatgacgtatgtgaccatatattaatagtatagtaagcaactattgtatgaattggctattagattggctatagatgaattgaagctagtagtaggctatactattaaacttgctcttataatatgaaacatttggagtaggtacgaggcaagaccactcctaagctaagggcctgtttgaggagctttcagcagctgcagcttctcttagaatctttagttaccagacgctccctaaaactgtccagctttttacccagattctgagaatctatagctatagaatctggaaaatgaactagaagccagaagctgggtttcccagtttctccagattctcacaaactagcttctcagcagctgcttcttagaatctcaaactcatccaaacaggccctaagagcaattgaaaccccacccaagcaatcatcacaaatcaattttttagcttttcaatataagtctagaagtaagtgattttcacatgtaaatccgtccccttgacgaaattgaagtacactccttgtcgtttatcgtgtaaaccatccatgcatctccacgaaaacgagaatgactatcaattgcttgaatcggatagtttcttgcggatcttgtgcaagttcggaattccatttcaaaggccggaacttccgattcggcatgtttcaccggaaggcttggctgcggtgtgctcccgtgttttcgtgcaaacacctaactagaaatccgtatgattgtaatatacatgagaattaactaggattatcacacaattttccatgtacctaaacgttcctaaccatcaaacagctctaggtatcgcatgatacttgagtatcagccgatacctactaggtatcagtcgagacctcagagatattattccgttcgaatggggtatcagccgatatctactagatatcagacaatacatgtaaggtatcataccatccgaactagatactgttctcatttgccattttagtaatatgccacttcaggcttagaacggttagaagttgctgaggcccatgaaatttactcgaaaaggaagcaaaatctgatataaattcggtgaggccaccgccggccaccgcgtccctttcatcgcgtggctttcccacacatcgctgtgtctctggacgccatgacaaaacaaaccaaccccttcaaaataaaaataaaaataaaaataataaaaaaaaacaccacccttatctaaattattattattattatcatctcctcccgctcccgctcgctcgcgccattttccagcccaaagccaagcgcctcggctcgctctcgccgcctcgccgcgcgccgcgcgctcgccatggagatcggtggcgtgctcgtgtcgctgctcttcgccgccttctccctcccctgcctcctcctcctcctcgtcctcgccgaggccggcctccgcctcgcctccctcgcgctccgcggcggccgctacgcctggcccacccgctccgacttcctcggctaccgcatcgcccgccgccgccgcgccgccgtctccggcggcgccggcggggcggacggcgaggaggaggcgcagccgacggcggagtgctgcgaccgccttgccgtggcgatgtaccggcgcgggcgcgacgcggctcccgtggactgcgtgttctgcctgtcgcgggtggacgacggcgaggaggtccgcgagctccggtgccgccacgtcttccaccgcgcctgcctcgacgcctggctcgtcctcccgcgcgccacctgcccgctctgccgcgactgcctcctcccgccgccgtgcgagccgccgcgcagcttcccgctcgactactacgacgacgacgacgacgtccacttcggcttcaacgacttctccatcacctcctccaccaccaccaccacctccgccgccgccgccgtcgcctacccacacggcgtcgcgctctggcccatgtaataaatgtaataatcgccattgctgccgctgccggctgccgccatgcgagaagccgaggagcagagtgttctctctgtttttcttcttctttttttttggtttctttttgcatagttttttttagtaattagttgctaattaatttgggactgattgcttgattaatctaatgtaatctaagatgatctggctaggtggcccatgtaaagtaatgtaataatctccaattctccattgttgctgccacacgagagaagccgagaaacacacagggatcttttggctagctttacgaggtgataggctagacgatttgaatttgaagcctcgttctttctagctatttgatactaaatctttatctaatattcacgtcttttttagcatagtattctctctgttttttcatattttaggggttttttagtagttaattgctaattaattttgggacggattgcctgattagtgcaaaagacgatcaggcttaggtggcggttgctggctgctgtcctgtcctgtcttgctctctctcccggtaaatatcagcgactgataacgatgcctcacctgctactatttctcggatcgtccgtacatctttcatctactacacgagtacatggccatatgcattcatcacgagaaaacgctgcataatgcaaaccacaccccgtcccactaatgcttcatttctgggcatatacaaatactacctctatcctaaaatataaaatattttatccacgtagaagtagtgcttcattcctgcaatcctactgatgtatatatatagcgagaaatgaagtgttatgccaattcagaaaacacaaaaaggaaacagtaatatattatttgtgagcaatttaattaaaaatatggattagataccacctaataataggaataagtttgctgggatcgtgaaagaggaagtaattcgttggatcggttctcctgatccatcctccattatcaaaggatcagcggagtcccaatccatggtggaattccccgctccatggtggataatatcacagcaaatcgatggattgacctaacctagtgtgcaaagcacgtagactaatgcaattagggtaggtggcggtgtcaccgagcgagccagccagccagccggagttgacaacaccggtccatcgcgatcacgattatgcagcccccctacagtagtaatttctccatcacagtaaaaaacaatctagaagtacctgaagtagatttgacactatttgacactatttagtactccatccgtttcataatacaagtgatcttaagtttttacttatactacttcctccgttttttaatagatgacgccattgactttttctcacatgtttgaccattcgtcttattcaaaaaatttatgtaaatgtataagatataaatcacacttaaagtactatgagtgataaaacaactcataacaaaat

SEQ ID NO: 7929 - DNA, 11101 bp, Oryza sativa
aggcagctgcgaggggcccgagctggcctcggggactgagacgggctcgagagctggggtccattctgccacaaaatcggcgagggcctggctcttgatagcgtggcgtggttcaaagtgcaaatcaaactcagaaagttcgattgcccatttcaccacccgtccagtaccctctcgattatgcaagatttggccgagggggtaagacgtaaccaccgtgacccgatgcgcctggaaataatggcgcagtttcctcgaagccatcagaatagcgtaaagcatcttctgggcctgagggtatcgggtcttggcgtcccggagggcctcactaacaaagtagacgggccgctgcacctttcggtggggccgatcctcttcgctaggggccacatccctggggcgctctttgtccaagcggcctcgcggggcgcactcgtcttctgtgccgacgacctcggggtcggaggacgacaggggcggccttcccacagtggcctcggggccgtcctgggggtcgggggctcctggcgtcgtcggacaagcgggcaaagggccaactccggtcgtcaggggccttaggccaccgtttggctcgggggcctcttctccctgctctctcccgggtcgagtcggcacagggttatcctcggggtcagagggcgataggtgcggccttcccgcagtggccctctggccatcctgggggtcgggggcacctggcaccgtctgacaagcgggcagagggcctgctccggtcgtcgggggccttgggccactgttcggctcgggggcctctcctccctgctctctcccgggccaagccagcacagggtgggggtgcgcggaatgaggatcgtcctcatcgcgctccacaaccaacgccgcactaaccacttgcggggtcgccgctaagtagagtagcaagggttcatttggctccgaggcgaccagaactgggggagagctgagatacgccttcaactgagtgagggcacgttcagcttcctccgtccaagtaaatggcccggagcgtttgaggagcttaaataagggtagcgccttctctcccagcctcgatatgaaccgacttagggcggccatgcaaccggtgacgcattgcacatccctaagcttgctgggggggcgcatccgctctatagctcgtatcttcttggggttggcctcgatgcctcgggtagagaccaaaaacccgagaagcttgcccgcaggtacaccgaacacgcacttatcggggttcagttttatgcgggtggagcggagactctcaaaagtttccgctagatccgagagtaaggtctcttggttgcgcgtctttacaaccaagtcatcgacataagcttcaacattacgtcctatttggctacccaaagaaatccgagtagtacgttgaaaagtaggacctgcattatttaacccgaagggcattgtcgtataacaataagttcctatgggggtaatgaatgcagttttttcctcatcctccctagccatgcgaatctgatggtaaccagagtatgcatctagaaaacacaaaaggtcgcaccccgctgtggagtcgacaatctgatctatgcgaggcagggggtaagggtccttaggacatgccttgttaaggtcggtgtagtcgatgcacatccgaagcttgccgttcgccttgggaacgaccaccgggttcgccagccactccggatggatgacctcgcggatgaatccggcctccagaagtcgcgccacctcctcgcggatgaaggcttgacgttccggggcctgccgccgtactttctgccggaccggcattgcgcccgaccgcacggcgagacggtgctcaatcacctccctggggaccccgggcatatccgccggtctccatgcgaagacgtcagcgtttgcccgcaggaaagagacgagcgcgtcttcctatttgccgtccagaagaccaccgatccgtgtggtcttggacgggccgtcgcccagggcaacctccttaaccgggacctcgtcgcatgtgactatccgctgcctcggggcggcgggggcggaggtgccaagcctctcgtcgcctccctcgggcttggacgcggcggtgaggtggtccgcgcgctgctccatacaagcaagcgcgactttgaggtcgccatggacagagatggggccaccggggcccggcatcttcatctggagataggcgtagtggactgccgccatgaacttcaccaacgcgggcctccctaggaccgcattgtagggcagactgaggtccgccacatcaaagttcacccgctccgtgcgaaagttggcggatccaccgaaggtgaccgggaggtcgataggacctagcggccaagtgtgacccggcgtcacaccgataatcggctgggacggccggagccccatccccggggccttgatagcgtcaaaggctgcgggggaaaggatgttgagggctgctcccccatcaatgaggacacgccccagcttcacgttgcaaacagtgggggaaaccaccatttcgatctgtcctccccgggcaacgcacggtgggtggtcggtctggtcaaaggtgagggcaacctccgaccaccgcgtccggcgcgtcgcctcatgagtaggggccgcggccagaagctctcgcttcatggccttgaggctccggcgagaaacgtgagcacacgctcccccatcgacagtggcaatggtggccccaggctcttggaaacctaggtcatcatcgccgtcatcgatgtcctcggcgggggccttctgcttggcctcacttcgccgattgccggaaggaaccgccggggacttgccctctcggcgctcctgcctcctctcctcctcccacttcctcgtccgctcagccaaagttttgactgcgcggcaatccgcgaggtcgtgaagggaggtgttgtggacgatgcaccacttgccggttgggcgctccctactgggagcgccggcctccttctttttgtcgctcgcaggcctcccctttcgggtggcccgcgaaacgccctcgacggcgaggacatgaccctcgtcgtcggaatgggctgacctcttcttcctcctcctgtcacgccgccctgtccgagcagcggatccgggggcggccgaagctgccacactggaaccggaggggttccaggtccatgcctcttccttacgagccactcggtccgcgtgctgaaaaagctccgcggtagtctggggctctttggaggcgatcttttcgagcatgcggttgtgccgcacacccccccctgaacgcgtagatcaccgcgtgtgcagggatgcatggtatggtgttgcggacttgacagaaccgctgaatgtatgagcgaagtgactcatcatcccttcgctggactgcatgtaagtccgcttcttcacctgggcgcggatatgtgccttgaaagttcatggtgaactgttggcacaaatcctcccaagagtggacggacgcgggtggcaagttcattagccaaccccgtgcctgtcccttcagggccatgggaaagaaattcgccatgatcctgtcgtcacccccggcggcctcgatcccggtcgtgtagacctggagaaactcgacggggttgacgctcccgtcatatttttcggcgatggtgggccggaaccttgggggccaatggacgttccgaaggctcgccacaaaggctctacagccgacaccaccaaccgggggcacggagggctgatccccgcgtccgtgttgatgtgacactccggacgaggaggcgccctccgttgcgtgggcagcacgtcggccattacgccggcgctcgatactgatgcgggcatccggcaccccacgcagatcttcctgggtcggaggcgttgacgaaggagtggcggccgaatggcgagcaaccgccgccgctcgccgcgcccttcgccttgacgacacggagccggtggtagcagcgccagaggttttggtggcggaggaccgcccaccagcacctaggcgctgccgtgccgtcatgaccaagttggccacgtcgtccagccaacgttgggctggagactccgggtcagggacaatgggcgggtgacgtaggagcgcgcccgcagcttggagcgcgccctggggcgtgctgccgtcgccgtagacgaggaggcgacgctccccatctcgccgcccttccccatcacccgtggatgtcgaagtcgcggatccttcgactctctcgagcgcctcctcccgcctaggactttggcgtggagggggcggtggagtacgagctcgacggcgtgggttcggctccccttcgtcaccgctaacactcggagagaggttgtgcgcctttgcttgttcagccattgggctgaacaggaaaagcttggcgcacacgaaagagtgcgagagcttagaagaacacacgtagaaccccctacctggcgcgccagatgacggagcgtggggctcctcaccgggagaccgcgcaggcccccctttgccagttcggccgggggccctgggtgagattctaagctccttgtctgtgtgtggaaggttcgcgagaattgaaacacacaagacacgggcgatgtatataggttcgggccgctgagaagcgtaatgccctactcctgtgttctggtggatctgtgtatgaagaagctacaaaagagctggagaaccagagagctcttactctctccctctctggtccttctggatccgaaaaatcaatcccccttctaagtgggcaaggtcctccttttatacctcaaggggataccacatgcaccatctctctcttttttgtggggacttatcctatcttttcataaacagacggagacttgtatggttgccgtccgaatgaccttctgatgggacggcccatacctacctccacttccgtcggaagcaggcgcgacgtgggaacatggctgtctgctgacgacatgaccagtgtcagaccggtcacaaatcggtcattcttgtccaccacgcgtcagtttatcaatctgcatgttcgcccctcttcatacaaagtcttgcttgtaatggttaggatgaagcctggtatatatctgaccgggaccaacgtgccatctccaggagctaacacgccggctccggctagggacgagtgattggaggctctcatcctgacgggatggggcgaggcgtgcgtcagaccgcctgtcgccacctaacccacgatctgatcggtctgtgactggtcactgaccggataaacgagcgcgctgcactgcgttacatgcggcgtgacgcgctcgtccaaaccgcaataaatgtggttaggtgagccccgctatgctcacctaccacatatacgcggcgcaaaacccacaaggggtcggggcgcctcgaccctcggggccgagacggatgcggtccgacccctcggggagacaaagagaagggcggccgtatcaccctcgggcccgacccccccccccccccgagggggttaggccacgtgggtgatcgtgtctgcctcaagtctctaagtcatgatactcccggtcccatgtcaccgacagtagcccccggcgttatgccagggcgatcgccctcctcgagggaagcggtcgggcgtgacgccacttcctaaggcctggtgacaggtggggccggtccaaaaatcgggacaagccggttcgtttttcctggagatatggtgatggcgcttcggtcggcgagcgtaattaacgcgcgcacgagatgttccatctcgactgccacggccgcatatccacctcatgcaccgcaaacgggcgaatgggattagtggaagcgtgggcgcgagaaacgagggggcaagatagtgggcgcgagaaacgaggagccgggcacagcgttggcaagggtataaagtcgccgaggaagagatttgcttccttcctctcgccattattccccttgtcttcgccgcttgcgccctaactccttgtttcctgtgccctaccttcgccacacgcgctcgctctcaaacatctcttcttccggcatcatggcacggggctccgctccgcttgacggtagcgtgctgccgccttcccgcatcgtgagcgagagacaggccgggctgccgcgccgcttcatgccggaatctgccaccggccgggagatagtctcgctgggcgagggatgcccggcgccacgctacccggggcggtccgtcttcttccttcctttcgctatggcagggctggttccgccattttcttctttcttcatggatgttctggagttttacgatctccagatggcgcacctcacccccaacgcggtaatgacattggccatcttcgcgcacctgtgcgagatgttcatcggggtgcgcccatcccttcggctgttccggtggttcttcaccgtacagccggtgtcgccgccgtcggtggttggtggttgctacttccagccacgggggccggtgctgaaccgctacattccctgcgtcctccgcaagaagtgggatgactggaagagcgactggttctacacccccctcgccgacgaagcgcgcctccgacttccgagctagcctccagcgcaggcctccaactggcgggcgccggtagatctgggagatggctacgacgccgtcctcgaccgcctggcgggcctgcgatcccaggggctcacaggggccatggtgttcggcgactatcttcgtcgccggatcgcgccactccagcggcgcgcccggggcgcctgggagtacaccgggtccgaggactgtatgaggacccaccagggggtcagatgggactaggctcctgaggacttcaagatagtggtccaacgggtgctgaatctcagctccgtggaggcatccctcattcctcaaggagtcctccccctctgcagcgatccagaccgcgcctccatcctgaccatcatgcaggcggtcggggtgtcggaggagcgggctcctcgaggccacgatggcgtgggcgggagccgcagggggaacaatctaccccgggagggggtcgtgcttctgggccccgcgacgggggcccggggagcggccgccctgccgacgcccgggggaagaggaagcaggaaggaacccctcccccatctcctccccgagggggcggggcggcgcgtgccagcagcaggcgcccggagggggccacgccgacgtcgcagcccgagggggagcggaagaagaaacggctccgcaaggtgggggggacagaaccatcccggggaaagctcatttcccctccaaggtggtcgtttaaccgaccccctcgcaggttcgtcccactcccatcgtggccgtattcattctctcaacgcgagttttcactcatccatcttgtttgtcttctggtctttcttctgtttcagcgagatcccgtcgcgtccctcccgccattccaagtccggccagcctgaggccgaggacccggcgaccatagaggcccggaggcgggaatctgaccggcgagaagccgcggatcgccttcgagaaaccgaggaggccgctcgggaggccgcccgggctcgccagaccgaggaagccgctcgggaggaggccggactccgccaggccgaggcgacgacatcctccgaggcgacccgtgaaactgacgggcaagaggccgcggatcgccttcgagaagccgaggaagctgcctaggtggccgtccgagctcgccaagctgaagaagccgctcgggaggaggccagacttcgccaggccgaggcgacgacgacttccgaggcaactcgtgacgaggccgcgggcgcatcgcttgggcccactccctcgtgcgacgctcagatcaaaccaggtccgggggacatccctgagtccggcacgtccatcggcgggccaagccgcgcggcatcctcttcgaggcggctcttccccacgccttccgttgctccactgagcgcagaaccccttctgcaggccttagccgtcgcaaacaccacagtgttggacgggttaagtgcccaggtggaggccctgcaagcagagcgggcggagctcgacgccgcatgggtgcgtgtcgatgaggggcgacgctcggtggaggccatggtggaggtgggccgcaaggcacaccgccagcacgtctcagagctcgaagtccgtcggaaggtgctgggggagatcgccaaggaggtggaggaggagcggggggctgccctcatcgccaccaccgtgatgaacgaggcgcaggacaccctccgccttcaatacgggagctgggaggcggagctagggaaaaaactcgacgcagcccggggggtccttgacgctgccgctgcccgagaacggcgggcggcggagaccgaggtggcatcccggcggcgcgaagaagcccttgaggcccgtgccatggcgctggaagagcgtgcctgcgccgtggagagggacctggcggatcgcgaggccgccgttgctattcgggaggtcacactggcggtgcacgaagccgcctgtgccgaagaagagtccgcgctccgcctccgcgaggacgcgctcaccgagcgggagcgagctctcgaggaggccgaggccgcggcgcaacggctggcggacagcctgtccctccgcgaggctgcgcaagaggaacaagcgcgtcgcaatctggaaagtgcccgcgccgagagggccgcactgaaccagcggccgctgaactcgaggcgcaggcaagggagctggatgcaagggcgcgtagcggcggggcggccacgggcgacagcgacttagccgcccgcctcgcagctgccgaacacaccatcgcggatctgcagggcgcgctggattcgtccaccggggaggtcgaggcccttcgcctggcaggcgagatagggcccagcatgcttcgcgacgccgtgtcccgtttagaccgcgccgggcggcaggcgggtctctggggcgggcggactgtgaagtacgccgccaaccaggggggcctcgcccagcgcctctcggagatggccgggactctccagcggctccccgaggaactcgaggggacgattaagtcatcctcgagggacctcgcccgaggagcggtggagctcgtactggcgagttaccaggccagggaccccgacttctccccatggacggcgctggacgagttccctcccgggaccgaggacggcgcgcgcgcgcaggtccgggatgccgccgaccatatcgtccacagcttcgagggttcggcccctcggctcgcgttcgccctcaactccgacgaggagggcgatgacggcggtgtgggcgacagtggcgacgaggctggtgacccgggtgcatcggagtgagcccccaggcccccgccaatctttaaatagtttcttcttttcttcttccgagtccttcgggcccccttcttgtatagactaatttaatctgcaatcaaataaagaggaaattttttgtgtcaattctatttgttgtgtgtatgagacgaggatgcctgtgccgcggtccttttgtgtcttggcttgaacaagggctcgtgcccaggtcctagtcctcaaatggctcgggttggggctagtgcctggggagatccacatgtcgagactggccaggccgggagcgtggtgaccgagggttatgggttacccgattgtgggtttttgccgattcccccccggagttcaccacgccctggggcacggctcggttctgggccccgtttggcgattttagccgacccgagcccccgagggcaggattgaacacgagtgacctatttcaagtcaatatccttcaaaaggaaacaatagcacagatacagcctttaggaaatcgaaaatgcttttattgaaatacagatataagagaaataagaatagacatatgtggtagcccccggccaaccctgcacgcccgaggggggtgcggggttggcccaagcccgaaacctgacacccgatccccctttaggggtagaagcgacgaaggtgttgatgttccacgggttaggcagctctgtgccgtcgcccgtggccagccgaacggagcccggccgggggacgccgatcactcgatacggaccctcccacattggtgagagcttgctcaatccagcacgcgtttggacgcggcgtaggacgaggtcgtcgacgcagagtgatcgggcccggacgtggcgctgatgatagcgccgtaggctctgctggtagcgcgcggctcggagggccgcgcgccaccttcgctcttccaagtagtcgaggtcatctctgcgaagctgatcttgatcagcctcgcagtacatggtggcccgaggggacctcagggtgagctcggatgggagaaccgcttccgcgccgtagacgaggaagaaaggcgtttccccggttgctcggcttggcgtggttcggttcgcccagagcaccgctggcaactcctcgatccacgaatcgccgtgcttcttgaggatgttgaaggtcttggttttaaggcctctgaggatttccgcattggcgcgctccacttggccgttgcttctggggtgggcaggtgaggcgaagcagagcttgatgcccatgtcttcgcagtaatcgccgaaaagttcactagtgaattgggtgccgttatccgtaataatacggttaggcactccaaaccgggctgtgatgcccttaatgaatttaagtgcggagtgcttatcgatcttgacgaccggataagcctcgggccacttagtgaacttgtcgatcgcgacatacagatactcaaacccgcccggggcccgcctaaacggtcccaggatatcgagcccccagacagcaaatggccacgaaagtggtatgatctgcagggcctgggccggctgatggatttgcttggcgtggaattgacacgctctgcatcgccggaccaggtcgaccgcatcattgagagctgttggccaatagaaaccttgacgaaaggctttgccaaccaaggtgcgcgaggcggagtgggctccgcattcgccttcatggatatcggcaagaagctcgacgccttgttcccgagggatgcacttcaggaggattccgttagccgcgcgccgatagagggtcccttctaccagcacgtagcgtttg

SEQ ID NO: 7930 - DNA, 7067 bp, Oryza sativa
cccccccccccccccaaaacgagaagcagcgccaatcagattcccctacaaccccacgcgtttcctcataatcgctacagctgatgcacagggacagggtgaagctttcacaaatttggatcgaacggggccttggttttccttccaagctggtcatggatgattcaatgcctctgcacgcttggtcccgctcagccgtagcgtccgagtccgacctcgctgctgttgctgcaactacgtgtctcagtgcctgcagggaggcaggcggtccgtggacgtggagagaaagccctgcttcccgtgcaatgcaaaagtgtccagcgtgcaagcgtacacacaccggtgatgggcgtacggtcaaaccggctcacttcaacgtgccataaatactcggcgccaccgatacgcaggcgctaccacaactcgacatggcaacgagagacgacacattggtacgcacgcggcacgcaccatctgccgatcgatccgccaggcccatcgttttggctgatttgagaaaaaaaaagaaacgatatatctataaataaaaaataattcatgactaaaacttttatacatttgtaaaagtaagttgaaaaataaactatgatgaaaaaaattttaaaattaactttaaatttaagatcaaaaatttaaattttagttgatataaatataaactagcacggtggcccgcgcagattgcgcggctagcatcattatattttctctcatataataacatatatgttctctcattatgttattcaaatatattaaaatgacaacatagttttaaattttgcaacaactttacaaaactactaatatgtaatattcatattgtattttatatacgtgttagttattaattatttttaatatcaaattttagttatttgtaaatcatatatattcctatatggactctagactcgtcttttaatatttattttttttaattccgaattttctgtaaattgtatatctatatagactctatgctcttcttataatattatttactttttatttataattttttattatttctaattgtatttctatgtgtactctaaactcatctttcaatattctttaatttttaattttgaatttcagttacttctaaattgtattcctatattgactttaaactcttcttcccatgtttttcttaatttcgaatttttgttatttgtaaattgtatttttatacggactctaaactctacttttaattttattatgtttattccaaattttagttagttttaaattcctatatggactctacactctacttctaatattccttattttttaattccgaatttctattttattcttaattgtatttctatatggactctaatactctcacttctacatattctcttatttttcaattccgaatttcagttatttcctaattgtatttctatatggactctatactcctcttctaatattccttattttttaatttcgaattttagctatttctaaattgtatttctatatggactctgccttttctttttctccgattaatgtgagaatttctaggccatgagagcgaacgtggaggctcctttttctattcctttaataatataatagatataagtataagcgaaaagatgagagagttttttttttcactgcacggcacggcaccacgcgaggggaggcgactcttccctacgaaccgaagggcacgagacgagcggcgagcggacgatttcggtaggaaggcggagtaaatgagagcattcaaggtgaagtgcgcggttgggtgcagctggtcgccgcccctgcctgcgtggttaaaaccgacgacggcacagcaacgctgcgatcactgctcaaacccgtcaatccaattcaatgctacgcgacggtgcctcttccttgggtggcagtcaccaccagtcggttgtgtttggtggtagcagcagcagtagcagcagattagcagtggtagtagcagatttagcgttagtagtagcaggctagaaaatgatggtagtgggctggtggcgacgagctaacacgatcagtctggctgtgcgagaagaagccgagagcatggcgagacgatcgaattggttttggcatttgttcaggtatcgcgatgcaagtacttaatccgatgattggtcaccaggtccacatccgaggagccaccaacgctaacgagatcggagatctcagagactcacatactcccttaattcctaagtataagcactttttacactgtatagcagagattaaagataggagggaagatttcttttcagtcattttgttgatcgaatttcgaattttaaatcgcttgattctcgtcacttgtttggttgaaaatgttttgattcccgtgcactgaaatccgcgtaccaaaaaatagttgtatttaggaagtgagggagtatacatgataaaacctgaattcatattccccgggaaagaaaaaaatctgaattcagtatatgctactaggagggattggcaatttggcaccattgcaccaagcctccagcccaccaaccatatccaatgataacaaggaccaccgggcaggctacccaacttagcaagatcctcgactccatgacagagacaagccaggagcatgctacggtagcaacaaacaaagggaaaaaaaaactaaaactgtctacatactagatccaactaggatcactaatccattctctcagtaatgtcctaaactttttttttgttacactcttcaactgggcacaagaaaggatcaccacaacgaacaaacctgaagtggtgtgtcctcagttcgcaggggattggacacgtttttgactgcaagcctacgacgcactagggcactaagccacggccatggatccattccacccaacacaagtgattcagaatccacacatctgcacaggctgcaggcgcaccaccaggcttcagagtagccgcgaccagatcagctataaaccacaaggaaaaaggagcaaacagcacggcgtggcatcctgccgtgtgcgattcgcccggtttccccctccagaaaattgcctctccagaaaacgaacgaatgaccagtctccagtggttacaatctgagcttgaataccgccaaaatttgcgaggattgatgcgaggacaggaggagaatgggaagagagaatggcgacgatgttgtccaaatcgatggaaggttcagagttcagagacgttaagctcatctggggctggaattttttttctctttacaaaatagtcctagtaaaaaaaatgtggaaggaaattgacaaaaaaaacctcgtgaggtcctgtaattacagggggctagttctatacgcctacgatccaacggtacagcgtgacgaagcccggctcgtcgtcgtccaccccgcgcggcgccgacatcaccgccgcctccgggtcccaccgccacgagtcctcctgccggttgctgtggtggctctggctccaccgcgcgctccaccgcccgctccaccggccggagagggacgaggcggaggaggcgaggcggtccacgtactcgcgcagccatccccgcgaccccgccgcctccgccagcgcctcgccgggggccggcgtcacggaaccggtcgttgacttggccgccgcggggcgcgcgatgcgggacacgacggcctccacctcctcgtccacgcggtagtcgaaggacccgagcgagtaggtgcgccggtcgtcggccgcggcggaggagcggcggttgctgatgctgctgatctcgacgcggaagctcctcgagttgttgctgctccgcgagtagaggggatcctgttgcaccgcgttggagacggcggcggcggcggcggtgaggagtggcgggtgcgggagcgagacggtggcgcggcagagcgggcaggacggggtggtgcggagccaggcgtcgacgcaggaggcgtggaacgcgtggcggcacgccgggagcagccgcagctcggcctcgggcgcgaacggcgagaggcagacggcgcagtcgggggagctcttgggcagcgccgccagcgccgacgccatggtgaacaccgtcagcgacgcgaccaccgctccttctcgtcgtgacctcctccccaccccccgccgccgcctccccctcatggctcctccccaccgccgacgcggcggtagcctccccagcctcgacggcggacgccgtcgtcgcgcgttgggccgccgccgacgccctgggcagcgggctcggagccgggtgcgacggccgcgcgaggcagcggaggaggaagtggatcgacacggaggcgaagaagacgaaggcgaggagcgcggtgatgatgagaagcgacggggagaggttgagcgaagacgacgacggcgccggcgacggcaatgagggcggaatggtggcggcgagcgggtcgccgccgatggccggcggcgcgggcggcggcagggaggccatgggggggaaggagacggtgtgtttaaggctcggccctgcgtgtggtctcgcgcctttatttatgggttttggggtgcgcggcgttggcacggagagcgagcgaaatcggagcgcaaataccaggtgattagccgtgagacgagtagaagtagagcacacacaagcacacacatcactagagaccaggtcggagattactttccggtgagtgaacatgtccagttttttctctctactttccttgttcatctgtgatttgtgtctctgactttggttgctttttctgaccttgattgttctcagtgtcatttctctgtgtcgagatgtggtttttggaggtgtaggacatgagttgtatccgtctcgttcttctctgattaataacatacaaattggagtacatctcaatttttattaacactttttttaactgctaaacgatactcttttcaaaaatattttatataatggccgttctaaaatattaatttaaatatatttttattgtttataataaataaaactttattaattaggtgctgatgatttttttgtttagcatatttttacttaatctttatcttcatcaaactcaaacggcaccatattgttcccttcattacattttaatcgttggtagtttatcttatttttgcctcgtagacaaagcacatcattgtagtacaagtaactttgagaaagatgatgtactaccgtgaaatgggcacaaatttacttcagattaaagtggtactccaaaagatcagctaatgctctacttcatgtcctttgatcatatcactatatattttagcccagagtaatcccggttacaggtttatcagcctacgtgctgcacgaacgacaaaactaaatattggcgctggcgggtgtcaccgtgcaatgtagccgtcaggttaccatctgtcacaacgagaacaaggataaaaaacagaagagagaaagaaatggtttcagctagctatggcttcctgcatttctgaaacgaggcccgagtacatagatcaaaagccgtttgctttgacgctttgttgcctgtatatatctagaatgtttgttggtcgaacaatctgtggggcttgctcaagtagtagctttcaactctaaaagagagccagcctcatagttcttccggatgaagctcaagctaacatgagcgtcacatcaacaaaaaaaaaaatcacgaggttgatttaatttactgcagagctttctgaaaacatatcgaatgatcgaactgtacagtaaccgcaccgacagagaattcgttgagagcccattcaattcagctagacatgaatacatggacacacattaaaaatcattggtacatatatacatgtacgtgtatgtacctctgtttctacacgcatgcatgccaaggccatagtgtccatggaaatttatacagatcattgaaagttgctttcattttaatccatgcattgggtattcttaccaactagataaaacggcgtggatcgttgtcagagagagcaaaggtaccgtggccagcgtaatgggcttcctgtacgcatgctgtacgcgccttcaatatctcatctccgagaatttatgaacttcatcagacacgcatcaaccatgtcggccccttgatccactacactttatggtgtatccaatgggagaaaaaaaaactccaaaactacactccacttaaaatgtctcatgtcggattttttttaagaactgttggatttaatttgttgaacggttgattagccacagctttggatggtgcatgaatcggagttcagagcctcctttcgtaacacaagaatttcgggggaatttaggtcttgtttagttcccataacataaactttttacccatcacatcgaatgtttgacacacgcatggagtattaaatgtggaaaaaaatcaactaaatagtttgtgtataaattgcaaaatgaatcttttaaacataattgtgccatgatttgacaatgtggtgctacagtaaacatttgctaatgatggattaattaggcttaataaattcgtctcgcggttttctggcggaatctgtaatttgttttgttattagattacgtttaatactttaaatgtgtgtccgtatatccgatgtgacaaccaaatctaaaatttttccccaactagataaggccttaatctaatacgggaattttttttttcgtctcattatacacgaaatgatcggattgcgttgttaattaaggaatgatgatttggagacatgaggaattttgactttggattagtaaactcactcgcaaattccccttgcacatgcatagagaggtcgttggcgttgggggtaggagtatcgtgcagctgacaataattacaggtaccacgctgaccattaataataaatttattatagcatatacgagcaagcaagcctcacgtacgtctatcactatactttgcccttcaggagcaaatgtggattcgagcttcgtcacaccagcaggttgattaactggctcacatgcacgacgatgccatgattccgggaacagcaagcatggatgcatgaataatctttcaaacaacacaaaagaagaa

SEQ ID NO: 7931 - DNA, 13273 bp, Oryza sativa
cggtgcacgtcgaagtcggtggagcggtaggtggggacgagcaggagcttgacgcatgtggcggcggcgaaggtccaggccgccgcccgcgccggggaggtggcggcggcggccgccattggggacgagtagatctggtgatctccagagaggggttgcgtttcgggtggttgcggtgatgagacttcagaaaattcgtaactttagggctgtttggtttccggagacttattttaaatccctgtcatatcggatatttgaacattaatttagagtattaaatatacactaattacaaaattcatttcatgagcttggactaactcgcgagacgaatcttttaagtctaattacgccatgattttgataatatgatgctacagtaaacttttgataattatagattaattaggcttaaaaaattcgtctcgtggatcatctcttatttatgaaattagtttttttattagtccatgtttaatactctaaattagcgtccaaacatccgatgtgacatggtctaaaaagttttagccccatctaaacaccccctttgtggtagtacacaggatcgttactggttactcattttcatttatcgccaaattgtgagtaaataagtactccctccgtttcaaaatgtttgacaccgttaattttttaagtacgtgtttaaccattcatcttatttaaaaaatttaagtaattatttattcttttcatatcatttgattcattgttaaatatactttcatgtacacatatagttttatatatttcacaaattttttttaataagatgaacggtcaaacatgtgctaaaaagtcaacggtgtcaaacattttgaaacagagggagtactccggataccagatatatacatattagtagtacgattttgctatatatttgtcgacaaattttctcctaaaaatttgacagatgtaattacagtacaatcgtaatataattacactgtaacttgcatgtaattacactgtaactatagtgtaacttgtatgtaactttcaaaaatgtctctgtaatatgttatttcggtaaaatagagattgtggaaacaaatccttacacatatatgtgtgctgtgattttatttttcttccttaccaaaacaaatcttgtaatagatttaaagattcaaaattaaatgaaacttatttacaagttacactgtagttacatgcaagttacagtgtaattacatataagttacagtgtaattacattacgattgtactataattacatctgtcaaattttttggagaaaatttatcgacgaatatataggtggtcccttagtagtactaaacaaccgtgttaagtacaaagaattgcacccccgccattatttacatggtattgtactcaattaactataagagaatcgttgaacggttttaaccagccatccgcgtccacgtaggaagcgtccaggtatatctgcgcctgctgctccgtcagcggtttggcatatggtactctaccggtcatgttggcgcccacacccgtacacatgtattcaccgtagaacatcgtgctgttaaaacaaataaaaccgtagtatacatgtttagaaacatacagctaatataaaatgaaacggaagtagtagtagaaagaatacgtacgcatctcgttgcgggtcgtcccagtcgctccaaccctcggcacaatgataccgggcatgtccgtgtgcgcgaagaccacgcgggagtagggcctccatgcacggcccaataaaatcagcccactgccggtgatgcgacaattgacaaaggcaaagcccgtgtcatcggccgcgtattcacggccttgtgcacatattgcaccgttgatcccatcgcttgtagctaccgagttcaaaatacacttctgaaaaacgcacagaaacttggttagatgcatggcaagtttgttactcactcaatgaaaataaaacgtaactagaaccatcgaagatttgtgtggtacgtacctcataaaatgatctgccgttgccaaagataaaatcaatcgaaccttcaataaaacaatcactaaagtaatgacggcctaaatcatcaaataatgtatcttggtagctatacatgccgcaacccaaaacgctgcttgatcacctgaaactctaattgctacagcctgtccgtcacgatcacccggctttggagctggggatgcattctacacagaatgaatcagtagataaactaaacccttctgccgtatacataattaagcaaattaagttttgtgagcacaagaacataccttaaaactgatgttgttcgttacaaatcctgtagcaaaaacatcaacggtggcgctgtaaaatgtgcctgtattttttgcgctattgttccaaacgatgatcgtcgactcaaaaccttgtccttggaatgttacattaggctttgaaaagttcactgtcaccttttcactgtgcaaaagaaagtgtacatcccttaaacaatgcatgaatgtatccagcagaattagcagtccaataaattaatgcaaaacacttacatgtatgtgccggagttgattcaaacgacacttcttgtcaatctattttcgggaatcgcatcgacggctgattgcacacagctgaagttgcagcatccattggaatcaacgcaataaatagataaagcagctgcatcactaggaggctggaaattagcacatgggttattcctaaccgaagaatcagtgaaaacaggtaagcagagtatagcaactataactactatgcaacacactccagcagaacttattaacccaccgggcatacataaagatcatatcggctgaacctctagtgtatacccaccgggcatacataaagatcatatcggctgaacctctagtgtatagttgtatgaacccctttgcctcacgatatcgattaagctcaaggctagatatgtgccatcctctaatagctcaatcattcactcgaacctgttgatagattatataacttgtgattgactcctcaatcacctttggtatggccatgcacttccataatctgcaacatcgaggggtccagagatatctctccataggaggggcaaatcccatcttgattattcatatcccactatacatgtttcatagcatactcgaaaactacttttataactacccaattacggagtagcgtttagcagtccctaagtaagctactacacatgttgagaaccatgataatctcaggtctaaggattcaacatcaacactcaatgagatcactgatgacacaacacatatggctcttgcagtgtctcatgttgggtctacctaacaacatgttcaccaacatatgtccacattattaatttggtatctctataccatgatccatgagacataatcatcaattaatacatgtgctgatcatataaacatatttgttccacatatgatatttgatcagggatcctttagaaatagtaacaaacaacataaaaagtctcatgaaagaatcacatattcattaaccaataaggagttatctatttcaaggaacaatgtcggataaatatgtaaacataatatgtgatacaatcatctctatgattgcctctagggcatatcactaacatgaagtagagacagaaagtgtgttacacgccatagagaacatgtggtatggtcttggtgtcttttttcttggagaatgttagtagcataatttggcttttggttaggtcattttagacaggccaaattatatagaatagttggtgtaattgttttagtggtttgcttaagaattggttagcttgacaagggcaggaatttgtgatgcatcgggaggtgtacgagttgctggggagctgcagaaactagagaagaaggttaggacttgggaggctgcaattctcagattttgtcagttcaagcagctagcatgcagcgatggagcttttgccgattcaatggatgtgaggcttcagtggttgattttatgtggctggggttggatgcatggctatgtttgatgatatgcctgttgaagtctagccacacaggatcacattgttgccagagtaaggggagacaaattctgaaacttgggctggagcagcgttgcaggatagaggcgactttcggctgaggcgtgtatacgtctgcatggaagctgtcgtttaaaaatgacggttttgattagatagaattaatcacggatttacctagagttttctatatatgcagtacagtgtattcctttactatatactatggattttgcacttggtagggctctggaacaattatcatcctatattattttcttctactgttttcatcgtacttttactcttgtttctttggccaaatcctagttatctagggtgcagatgatctttactggtttgcgctgaaaatcagtcgggttcttccacgaaagtgaagatctttgctagtttgcttgaaaactagtcgttcgtcgtcacgaaagcacaacggttttcattgttgttgcgtgaatcaattttacgtgtcaacagagaacagatggtgttgttggtgttatgcgtgggaggtttttataagtgaaatattggatgaaaaaaaaaacaacgttaacttgcaggcatgctaaacagccattgcttcatttttgttcgatcccgtagcccgatatgagaaatcaagccgtgaaagtaagatagtattgcatatacttaagaagtaagatcacattaggttgttcaccggccaattccctcgaaaataaaaattgttcaccgcccatgaccatatatatatatagcatgttcaggtctgcatcttcttcccaattacttgatgatgcatatcttcagcctgtggcgtcaaatcttactaaattaactgaagaagtaggagaagccggtggcgtatactaaaatataacctatacgtggaacttgcttgatcatgtccatcagccgtcctgcatctcgtcttactaaatcagcacgaagaagcataacaggagaaggcgagtgggcgagtggcaatcccacataatccataatcgcatcacaagggctcgtgcgcgcccatggcacgtgttgtcttggttcactacaacgtacactctttgtcatcacgttggtgtgatccataccacccataacctcatctctcctgccgtgttttcagaacaaagtgtttgttagtagtagacggcaatgggagtccgattccaatctgaaagaccacggatcaatccatggtgcacttcttcctcccgagcgcgcgccctttgctagcacttcttcaaaaattgacggtgcaggttgggccttccgggccttgaggagagaattggttttccgttcggtcccttcctcatttacacgtgggccagaatttcaaggggcagcccagctttggatttccttgtctcgtccacagctgctgaacagtcgtgcatctttctttctttctctttgaaaaacaatgtatttatttatttaaagaagttcagaagaacaatatactccttccgtcccatccagttttgcaaaggagccccttaacaatgggcagattacactttagctcaacattttgtagtaaaggacttaagaagaaaagaaaaaaaaaacaattgagtcctgctcgaactgcctctgtcttcaacgtcgacgacgaaactttgaatcctaacatcggcggaggttggatccaagtgagctccaagtgagctccacaagatgacgccaccgcacaatccttaacggggcctctcatagatgatagatggaggttgaggagatggcaaacaaataacaacttcagctacgccgaagggcgacgcgggcggcgaaacctcgccgtcgcctcctcactctcctcctctcccccaccttgccgccgcctgagcagccgccggcaaagccgggcgactgcgaagatggcggcggcggggctcccttctccctcactcccggtcagccggttggggcgccgacgacaccaaagagcgagagcgtggtcctggcaacgacagccaaatccggcgccgttcggtttggatccggccccttggccagatctgggttgggacgcgcgggtcggcggcggtgtggcgcgtgggccacgcggaggcggcagagtgcacggaggcggcggccgcggcagcgccgcgggagacgcccatgcgaaggtggtggggtagaggtccgcggctccggcgacgggcaggcgccagatccggtcgccccgcttggccgaggcgaccggcgacgggctcggtcgatgccggcgccgctccacggacctggcaggggggtggctggcggcggcgatggtggcggatgtagcggcgacgaagttggcgacgaaggcggcggactacggcgcgtgccgcgacgccggccctcgtcaagaaccttgccgccatgagggaggcgcggcgcccgtcaattgtacgccgtgcccgtgacgccttcctccatggcgccggcgacccgcactgtgcgctgcaccttcaggtccgcgccacccaggccggtctggacggttggcggctggcgatggtggaggctgacggtggcgactggacggtggtggctgatggtggcggctggacgggggtggcggtggcggtggtggtggcggtggcgatggtggctggcgatggcggctggcgacggtggtggctgtggcgctggcagtggcggctgtcgacggtggtgcaaggccatcatccgaggctgacggtgcgtcatcgtcggcagcggcatgtggagacggggaaggaggagtccgggtgcgggcgcgctgtcaagaactgtgggcggtggccttggccgaatttctaaagggacaatgttgttgatcgatgaagatccttcttgtgcggattagtggtgtgggtttggacagggaatcgcgggcgaaagccttgccgagccgtttggccggctgacgacggcgacgccgtttggcatcgttcccctccttggaggcgtcattttagattacccctctccttttctaaccatattctccgggtgaaaaccttgcttccttccgaacgagcggtggcggcgatccacgtcgcgtcctccttgggggcaccgctttggagaaacctcttcgtgcaaggattgtcaatggtctatgcattggcttcgaacttcagtcctaggctttgacgaggccttctagctccactttttgttttgcttttcttagtttgtgtcctctcttttcctgtttggtgtgttcaacttgtcttgaactacactctcttctggagtggaattttgtaataattggctgtagctctttttgagcaaaggccgagatattatattccattatctaaaaagctacgccgaataagaaacccaccagaagttttgataggggtcgacgccaaagcagataatccaaagaagccagccccatccataccaccggcaaggatagcaagagtaacaccactaactgcaaaagaaactgaggggcatccccgattagggcctccacgcatgggaggttgagaccatctcagcaaaacttgaaaccttcagccgtgtaattgatcttcactggaggtcaagaagaagaccacctcctttgtatagaactcgtcggagaaatcgagaaaggttggcgcaacctttttttcccagatctaaaagtatctcatccaacggctgggagaagaaacccggcaaagaggtgaccaatcactggctaaaaaaccggtgatgctcaccacaccaccaagacgaggagcgtcgaagccgacggacaccttgagcagtaaaagatggatgataacgagaagaactcgaactaacacgatgacctgaccaaacgagaaagcaagactactacttacactactagatgagaagagacatccgacccccctttcatccatcgttggtggtgatccaccggagaggaggaagaggggtcggagaatgaacgaggcgactgtagcggagattcgcaaaagctggagtggccgaggtctctcaaattctcagcagtatctttttggggctccgaacagtcgcgcatcagaacccacccacccccaaatatggactatgggcatttaacattttgttaagcacaacaatagcaacagaattcatagaaacaatcagacgcagccttgccagcaaactgtattagctgatgcctggaaatggcatgatgctacccacagcctcccaatacaatacatgggtagagtaagattaaggaggaggagggggaggtggacctatccatgcaacttaggctaattgtattaatgtaccaactggtacacgatgtcgctggttaactttgaaatggcctcgttgtacatgttctccgagctcaccgggttcttgtgggcgcttccctcaaacaacattatatcacagttgccgggctcgtccgaggcccggtgcagtttgtagaacgaggtaacggcggggcgcccgacacgcaggtcgtcgatggcgctggccacgagatcgtccatgtcctggtagtacttgatgcagagcttgagctcctctaccagctcggtgaggacgcgtaccgtggacgtcacgttgcgcatcgtgatgttggccgcggcgatggcgaggccacgcttgtccgtggcggaggcgcctgccggatcagccgagagcacgcccaagcagtagccatagttggaagttgcggtgcatgtctcgttgatgagagatggggaacccaccgtgagaccgggggctattgcggcggcgaggaggagtgtagcgatgatgggatgcatcgggaattctcaggccggggagaagctaatgatgcttttttgtggtttggctcctccaggtacactgagatttatagaagagaaaggaccttcaaaaggaaactgatcaatgtaataaattctaaattcaatgcgattgatcatgaaaatcgactctttaatgtacttccggctatattccaattctttcctcaataaattgccacctcctttaaatgggtgtacattgtgaataatcacaaatgtgtttgtgccgcgtgcaaacgtccgcacgtgaaacagaacatcccctcgtgcgacccttcgctctagtacgtgcctacgtgctctcctgcctgctccccacgcatcgtgcaagagtgacatttataagttcagggggagaaaacccatatagcattattggaaaatcagacttagtactcatttacagcaaacatgaaattatagatttgaatcatatttaacgcaggagtatagtattttactaatttccttgtgaagcagatttcataaaaaaaaactcatggaggccacttgaaccgggggaggctaatgggcgatcgatcgccagggcgattgcccagtgatcggtttcccccctccccctatactcctccctcttgttcccttcctcctccccttcttctctttccactgcagtgcaccacacaatttttttaaaaaaacaaaagttagaaaaatttatatatagaaatactatataaaaaaatttgaattcaaattcaaatttgaatcgggtatgtaaacttttaacttataaactttgggtctataaactttaggtgtataaactttagatgtatagaaatactatatatagaaaatatttgaattcaaattcaaatttgaatcggatataattcaaattcaaatttgaatcgggtatataaacttttgacttataaactttaggtctataaactttaggtgtataaactttagatgtatagaaatactatatataaaaaaatatttgaattcaaattcaaatttgaatcggatatataaacttttgacttataaacttttggtctctaaactttatatgtgtaaacttgaggtgtataaactttaggtgtataaatttactaaaatagaaaagtaatgcggtgccaaaaaaggaaaccaggtggaggggtggagggagggaggggggaggggatcgatcgctgccccatccccagggcgatcgatcgccgaacaacattctcgcttgaaccgtggctacctgacggcccacatgcatagtagagtaaggaaataagttcactttattcccttacctagtggcataatctgattcgtatccttaaaccacaatatcagatatgttgaccctcctaagtcctaactattaaaaccggtgcaatttgactctgtcggcggttggagggtggtttccttgacgtggtgactacgtagcggcattgacttggtcttcatcttacgtgacgttgacgtgacgcttatgtgatactacctccgtcctaaaatataagaagttttaggcttgggcacgagcattaaaaaagtaggtttgattaaatggaagagggttgtgattagttgagaagagaaagtatgtgaagaatttgaatggtgaaaggttatgattggttgagaatgaatgtaggtgaaaaagttatatacttttggacaaactttgaatgctaaaaattgttatatttttgaacgaatggagtattagaattaaaaaaaatatgtgagacccatttgtcattcacaaaagaaatattgtgggacccacacgtcatcctctctttctccttcccttcttcctcctccctctctctctcccttctctctctttctatttctctcccctttcgccttttgcagggagagctggagcagcggcgaagctccgacatcttgaccgaccggatggcgatggtgacatgccattgctccccgctgccttcatgtcccggagctcggggtatgagaagtgcgacgagtggaagtagcacgaggaatggaacaaagtcgacggcttggtgccattgtcggacatagcaactccgttgtcttatcctcccacctgggctctttcctcagcccgaccaactctggcaacgtctttacaacaccgctcgtcgtcgccatggtcggcctcgacgtacggcttaacgacgtccaggtagaacaggtccgggccaggatcgaagctaaccttgtgttgtgccgctttggtaagcacccggcatggccctcctctggaacctcccgcacgccaggaacaccatgaggacaacgaaggagcaccaacaccgcgtcggacagcgcgacgcccgtggcgacgacgacaagtggcatgctcttactcccttcctggttgctgcctcctgcactgcaccgtctgtgcgccatggtggtgttcccccttctgtggtcgactctaccagcgacggggtccgggaaccgtgcgttcttgtgcggtggcggcaggtgggcacgagccagcgccgaagagacaccacctctatggcgatgccgatgctgctgccgcctatccaagcaacaacctcatagaggagacgatgagagagagagagagagaggaagaaggtaaggagaaagggaggatgatgtgtgggtctcacatgttagtgtctcccggctcccgcaatattccttgttgtgagcgataaatgggtcccatatatttttttcattctaataccacataagcaccacgtcaacgccacgtaggacaaagacaatgtctacaccaccacgtagttgccacgatagcgaaacggcctttcaaaatcatcgagggagtcaaataacatcgattttaatagttggggtcgacacagtgactagttaaggtagtcaaagtgaacttattcttagagtaagcacatcaggcctcatcgcactcgtataagcatagtagagcccaatggctgcatacatagacaaatccaaaagcccagagccacttcccacttggaaaaagtacaccgaaggtcccccaacttgtcatggagttacaaaatcgtcctccaaccataaaaccagatatctagcgtcccttaactaataaaaaccggccacaataggtcctttggtggttttgacaccggttttatcctacgtggcggctgattcagccatgtcaggctgagtcatctatcttccccttcttctcttcctcggttcctcctctctctctgcacctgtaggtcggttggcggagcgagggggaaaaggaggagcgcggcgccgcgatggcggccgccggcggcggccacagtggggatgcccgacggcagcccggcggagctccacgacgcgggcgtgcagcgaccttgcgcgggcgtcgacagggaggcgcaggcgtgtgcaggcgtcgcgggcggctggaaggcgcgaacgacgcgggcatcgacagggcgaggcgggagaggaggaggacggcggcgcgacggcggccggcggtgggcggtgggcacgaaggtcaagctcccagccctcaaccgagctcgagcagaagggaggtggtgctcaccgacgctagttcatggtgctgttcattttctcagctcgatactctcccgctcgtcaagctccactacttgaccgaacaaatcgcggtcacgctgactcaaaacagagcgagcagaaaaccatgggaggagggaaaatagctaacaaactaacagaaagtaaataagagtataagatcaaggcaagatcaaatcccaactgacataagttcatttatttaacacataccaccttctccggcaccacggcagcatcatgatgggccagatcaccccacggcgatggcggcagcgccgctttccgccgctgacattccaatggacggtgcaccccatcgagttgtggagctggttcggcgtctccggcggtgagcagctgagcttggcgtccgctacaccaaggtctagctggtcggcgagttcctccagcgaagcggttcaactacggcactgtcattgccaattcgctgctgagctacccgaggaaatccggcgacgccgtcaacgagatgactagcctgtccaacctcaccgaggagctcacgctctacgtccccaccgttccggagccattcccacgtggacggttcgggtggccattccttcagctcaagatattctcgcttggatcgattgtcggtcgagcctcgccagcgtcgtttctagggacgccagttgcagaaggacgcagtggctgatgaacccgcagcggcgctgcctaccgtcttcatgggcgcctgggcggcgacatcgtcaccggccactcgtcggtggatgcggcgtcagagctggagctgctcccgtcgacggagtccgtgaacaccgtctcgctcggggcctccctcacattccgtcctgctgccgtcacgtctccataaagccatcgccgccctgtcgagcgagcgtgcggcgg

SEQ ID NO: 7932 - DNA, 12891 bp, Oryza sativa
gaatatctctacgaagactcgagtcagattctaaacttgtatgtcaaggaaatacccgggattttagtcggttatgattgtattttatctataatcccatattccgttacatcccggcctagggcttaataggattaatagaatactcatatcaacaagttgcaacttcttttccggaagccaatctccaaaaaaactccagggttaagcgtgcttggcccagagcaatttgggatgggtgaccgaccgggaaattcttcccgggtgcacacgagtgaggacaaagtgtgcagaaaagacatgtgttggtttgttggtttgtgagggcagtctatgacctatgaaagctatcaaatgtaagcgggcccggcctggggtaaggcagcatggcacatgcgctggcactggacacatgaacgtggccaagagaggacgttcctggcctagggttgatcgacggggcgtcgatctctcttaagggggtgagggtgtaacatcccggcctagggcttaataggatgggtggcccagagcaatttaggatgggtgaccgaccgggaaattcttcctaggtgcacacgagtgaggacaaagtgtgcagaaaagacggatgggtgaccgaccgggaaattcttcctaggtgcacacgagtgaggacaaagtgtgcagaaaagacatgtgttggtctgtgagggcagtctatgacttatgaaagctatcagatgtaagcgggcccggcctggggtaaggcgggacgttacagatatggactgtattttgtaaagcggactccttcccctatttaaggagggtccgtgtgcctcttggggggcgattctttttttccactttatacaatcaataacacactcggcggaatcatccccggacaggagtagggtattacttcttgaataagaaggcctgaacctgtataaaattccttgtctcaaaacccatccactttcctagcttgatagccacccccttttattattgtcgaaatcttgcttcgacagttggcgcgccaggtaggggcagcatcaagttctcgccgactaagtgcgatgggtttcgtttctggcatcgacgacttcgccttccctcccgggcaggcgttccggttcggcagcctcaacttcatcaccaacgacttcggcaagatctctctccttgactcggattcaaaccagtcggggatagaccaggtccccgtgccgttcggtattccgaactcggccgaggcctaccctaagatcatctctcccgagtcggcttcaaaccactcggacgagatccaatctactcttccgcgaccagatcaagacgacgagtcctatccctcaatcctgatgaaacttcctgatgatttggccgctgtcttcacagtcaagacatctcccactcgaagatctaggcgagctcaagcttcggccccgatccgatctagatccagggaggttggcgttatactccaacctctcgggacagtctcgacggaagagttggatggttacctcagctcccccggcatcagttctcgaccaaccgagatcctcgactacgacgattttggctaccactacgaccacggcgacctcgacaacttcgacgacaactatgaggataactacacgcccctcttcttcggcgtattcatggctgacaacgaaacggaggaacagcgccaagcccgagaagcggaccaagatcgcgcacggcaagaagctgaacgtcgccgactggaggaagagcgacagcgacaagagcgagaacgactacagcgtgagcaacaagatcgcgaacggattgcaaaggaggctgaagatcgacgacaatgcgccttggaatctaggcggcgagcgagagagctcattggacaacaagacgtcgatgggagagcggtctttcgcacccctagcagaacgcggttgcagcaatcactctcctcaagaccctcctcatggaagacgcactcaaccaagctgatcatgtagtcaacatcttgaaccagacgaagaccatgatcgctgcctcggttccggccaactccgcaagcacccgcaccccgactggtagccgagtccctcatcttcgatctcaagactatcaccagccaagcctcagcattgccggcgccgaatctagtcgcaggagcaggggacatgatgaacggtctgttcgctcgcctcccgagcgatatagggagcgccgagttgaacgaccacactccccacatcgaaggcgccccatcgatcttcgcgacaccatcaaccagcgcccgcagcaagaggccatcattcaccggatcgctacgacgacaacgtggacggagttgccgccttcacaagcgatctgcgtcgagtggattggccagccggctttaagccgactggaatcgagaaatatgacggcaccaccaaccctgagtcttggctcaccgtctatggtctcgcaatccgcgcagcaggaggagacagcaaagccatgacgaactatctacctgtggccctagcggattctgcccggtcatggcttcacgggctaccccgcggcacgatcggatcatgggcagagctacgcgaccacttcatcgccaacttccaaggcacttttgaacggcccggtacacacttcgatctctacaacatcgttcagaagtctggagaatctcttcgagattacattcgacgcttctccgagcaacgcaacaagatctccgacatcaccgacgacgtcatcatcgccgccttcactaaaggcattcgccacgaggacctagttggcaagttcggacacaaacctcccaagacggtcaaacagatgtttgaaaaagccaatgagtatgccaaagccgaagatgctatcacggcgtccaagcagtcgggcactacttggaaaccaaagaaggatacgccgaccgcaagagggagtggaagaaacaaccacaaggatcgcaagcgtaagcccgaagaacttgtggccacaacctctccatcttcccgacaacgttcccgcgtcaacaccttcgacaagataatgaactcccaatgtccgcatcatcccaactccaaccacgtggccaaagattgcttcgtctacaaacagtttgcggagcaatacgtcaagaacgcacgtaagccctcagacggagatcaaggcacatcaaagaagaaagatgatgaagacgatgccctgaccggttttcaagatcatcacaaagaacttaatcacatcttcggcggacccctagcttatgagtctaagagaaagcagaagctaacggaacgggagatcaatgcggttcagcctaacacgccccaatacctttagtggtcagagatagcaattaagttcgaccgctcggatcatcccgaccgagtggtccacccggggcggtatcccctggtactagacccagtggttcgcaatgtcaagctccaacgaactctcatcgatagtggcagcgcactcaacatccttttcgctaagaccctggataatatgtagattcctcacacggaattaaagccgagtaatgcacccttccatggtgttatcccaggattgtcagctacaccactcggtcagatcactcttccagttaccttcggcactcgggagaattttcgcacagaaaatgtttgtttcaaagttgctgatttcgagacagcatatcgtgctatacacggacgaccggctctagccaaattcatggccgtcccacactacacctacatgatgatgaagatgcctggtcctcgaggggtcatatcactacggagcgacatcaagcaagccgtcacatgtgacaaagaaagttgcgagatggcccaaacccacgagaccactctcgcccgcgaagagatccgactggctgcgaccacggcaagcgagggagaagtgcctgcaaccaagctgacgaagaccgaagaaagtgatgccaagacgaaaaagattcccttagatccctccgatcctgacaagactgctgtaataggcgctgagtaagattgtaaataggaaagcgcgctcatcacctttcttcagaataataaagatatttttgcgtggaaaccatccgatatgcctggtattcccaaagaggtgattgagcactctttacatgttaaggaagacgccaaacccatcaagcaacgactccgccgttttgcacaggacaggaaggatgcgatcaaggaggaattaaccaagctgttagcagcaggcttcattaaagaagtccttcatcccgattggctagctaacccagtcctggttcggaaaaagacggggcaatggcgcatgtgtgtcgattataccgacctcaacaaatcttgtcccaaagacccttttgggttacctcgcattgaccaggtggttgactcaacggccggctgcgagttactcagcttcttggactattactcgggatatcatcagatccgactaaaataatccgaccgcttgaagacctcatttattacgccctttggggcctactgctacatcactatgccctttggattgaagaatgcaggagcaacctatcaatgcatgattcaaagatgtttttcaactcagatcggtcgcaatgttgaagcttatgttgatgatgtagtcgtcaagaccaagcagaaggatgacctgattgcggatttagaagaaacttttagaagcattcgtgctttcaagatgaaactaaacccggaaaagtgcatcttcggagtaccgtcagggaagttgctcggatttatggtatctcaaagaggcatacaggccaacccagagaaaatcaacgccatcctcaatatgaaaccgccaagctccgaaaaagacgtccaaaagctgactggttccatggctgcgctcagccggttcgtctcacgactcggcgaacgggggatgcccttcttcaagctgctgaagaagactgacaatttccagtggggacccgaagcacagaaagcctttgaagacttcaagaaacttctcaccactccaccagttttggcctcgccacatccgcaagagccgctactattatatgtgtcggcgacctcccaggttgtgagtacggtcctggttgtcgagcgtgaagaggaaggccatattcaaaatgtccaacgtccaatttatttcgttagcgaggtcttagtcgactccaagacaagatatcctcaggttcaaaagttactatatggtgtcttaattaccgtcaggaaattatctcactactttcaaagtcactcggtcacggtggtcacatcgtttccactcggagatatacttcataatcgtgaagcaaatggacggattgcgaagtgggccttagagttgatgtctttggacatatcgttcaagccacgaacttcgatcaagtcacaagcgttagctgatttccttaccgagtggaccgagtgccaagaagacatgccagaggaaaagatggaacattggactatgcattttgatgggtcgaagaggcttacaggaactggagctggggtcgtcttgatttccccgactggagaaagattgagctacgtattgtggatacatttttctgcgtcccataacgtggcggaatacgaggcgctactccatggattaaggatcgcaatctctctaggcattcgccgactaatcgttcgtggagactctcagttggttgttaatcaggtcatgaaagagtggtcttgtctagatgataatatgactgcttatcgacaagaggtacgcaggttggaagataaattcgatggactcgagctcacccatgtcctacgacataacaatgaggcagccgacaggctggccaattttggttcaaaacgggaagcagctccttcagatgtgttcgtcgaacatctttttgaaccaactgtgcccagaaaagaaacacttgaagccatggatactcaaggcgtaagcatgattgaaaccgactggagagaacctctcataaaattttttaccaaacaagaactccctcaagacaaaaatgaagccgagatgatttccaggtgcagcagactttacgttattcataagactgagttgtacaagaaaagtccatcaggaatactgcagcgctgcgtatctttggaagaagggagacaattgttgaaggatatacattctggtatttgtggtaatcatgctgctgcacggactattgtcggcaaagcttaccggcaaggttttttctggcctacagctgtgtctgatgctgacaagattgtgcggacatgcgaaggttgtcaattttttgcctgacaaactcatctgccagcccaagagttgcaaaccatcccgttgtcctggccgtttgcggtctgggggcttgacatggtcggcccgtttaaaagggcagtcggcggttacacgcatctctttgtggctatcgacaaattctacaagtggattgaggctaaacaggtcatcacgatcacagcagataaagctagagattttttcatcaacattgtgcatcagtttggggtacctaatcggatcatcactgataatggcactcaattcactggtggagcatttagatacttttgtgaagattttggcattaaaatttgttacgcctccgtggcacaccccatgagtaacggacaagtcgagtgcgctaacggcatgatacttcaagggatcaaagcacgcgtttttgaccgactacgtccctatgctggcaagtgggtagatcagctgccgtccgtactttggtctttacgcactactcccagtcgggctaccggccagtcgccgttctttttggtttatggtgcggaagcaatgttgccgagtgaagtggaatttgaatcactacgatttcggaacttcaacgaggagggctatgaagagggccgagtagatgacatcaatcgactagaagaagcccgagaagcagctttaattcagtcgactcgatatttgcaagggttgcgccgttatcataatcggaatgttcgatcgcgagcctttttagtcggcgacctggttctgaggaaaattcaaacaacacaggatcggcataaattatctcctttatgggaaggaccgttcataattgctgaagtcactcagccaggttcttatcgactcaagcgcgaagacggtactctcatcaacaattcttggaatattgaacaccttcgtcgattttatgcttaggcatttcgtttgtatctttcctctttgactgctaacttcaagtttttccttgaagttttcagtcagggggctactatgataataatggagtgtgatttttatcaattcaatttgcttacttgatttatcattgccctgtttggtctttcgacttaaccaatgaggactgaaggtttttaatagcttttgcgggttttaggctcaataaggcttgacaaaggcctttaagaaatcagaagctaagtatggaacaccaagcatagcataaattcatcagtattgtacaaattgagcctccactgtcattgatcatcaaaatcattgttatatcaatcagtatcagttttttcatcattagacttatcagacccagtcggccgaaggtcgacatcttggaatctctcaactacatcagcagcaatcttgtcagccgctttctgcgcatcactgatgaggtcgagagcagcttcttcgctcgtcccatctgcaaagccatcaatggcatcaatgtcaactcttggataaagggatttggtcatcgccaacgccagactcgctcccatacttccagcttctttgatgttcttgaagtaagtatctggagcgactctcagcttgtcgaagatttcggcagcatcaagtgtactcgaaccagcgttattgaagaacatggcctggataagtggagtagcggcattagcgactttatccctggctccttcaagcttgttgatattgtcaactaagacatcaaattgtgcttgagacttgatcttgcggtccgcgtcgacagattcacattaatgaatcagcatatagaagataatggcttttgaggtattgattattgttaccttcaacctcctttaaagtcgaatccctctgtcttgccagctctgccttgtcattttccagagtttggatctgcttctctagttgagatatcttggcagcttgcactacattaacttcggttaatcaagattacagagataacaacacaaatcagttgggcagagtttgcgcgaaccttttgatgagccactcagttcgaaattggactcctggagctcagcaatccgatccctcagatcgtgttcattcttcttggcaagttctctggcctcgtgcagttgactcctggtggctttgagggttccaagatgaggaactagtctctctagggttgcggtttttgcctcgttcctaagatgaatcctctgcggagcagtttaatcagcgctcgagccagacggtaaacaagatggctaaggtcaggcgtcaaggaacttacatttacaatgcgagtcgcttggttgagttcctttttcagtaggcatacctcttcgtcttctttttgccggtttattacaattccttgaggttgcaagttgtcatcccaccacttgaccagaataggagggcacgaatcttcggctgcttgtatacggggaatttcttcttcatcaccgatcattggtcctaatgcatccattgacaaaggttagacaatcgatcagagttatttgggtcaacatggtttcgggcaaagtgtttacctgtaatgatttctggacgaggacaagtggattcggatgcctttaaaggggatccagatctccggtcattgctggcgtcttgtccgcgagggttgtctgcttgggtttcgacttctggaatctcttggcttggccctgcgtccgactggtttccaatcgggggctcctgattaactccggcttcggcttcggccgactggatcccagtcgggggttgatcaccggattctaaattatcggttgccggttgattgtcactcggatgatcctcagtagttgactcggtttctttggaagaacttgtgtccacgttagtcgggtcagagtccttcccagacggatctatatcagatggtttcctgcaaatttgattatcagtattattgccgcaatgggtgcgcatcaatgcaagagagatcgttatatgagttgcacctagaagacttcctgatctttggcacagggcgactggatgttttcttccttggagtagcctgttttgttagtttcttggttgtctctcggtctccaggcctcctggcggtatcatcggcttcgtcgtcacttagaaccagcttcctctttcgagaatctgactggctgattggatcagaagcacttggttgagtttcagaccgaattcttggtcctccgctcccttgcccagtttggtggcggggcgatcggtgttgggagatccgacttcatcaaagcaaattcctgggtgtaatatccttcattgttaactgattcaacaagaaaacaagatcatattttgagaaaggttgaagtgtatgaatacgtaccggtggaggaggattgaatgcattgaacggtacgactggcagcaagtgtgagtagctgacaacgatggtgtttgagaagatcttatacatcctttccttcatgaccttgaagtcaagagaatctggatcttcacggtttgggtcatgcttgccgtcaaattcgaaggctgtgcgagatctttctttgattagagctaaccgacacttgataaagtgccgggtgatctgttctccttgaaggccctgttctttcagctttatcatcctctccatcagttctactgcttgtgcagcttcatctcccattggcagtgagttccaagtatcccgataaactggaggaagacaggagtactcgggaagaacaggctcggggttttgaacataaaaccaatttgcgtgccaacctttatttgaggtcttgaagggcatggagaagtatttttggcttattgttcccctgagttggaaaccagcacccccaacgacgcatggtttactcttatttggctggggcttgaggaagaagatgcggcggaacaaggcgaaatgaggcctaatgcccagaaaagcttcgcaggcatgaataaaattggcaatatgcactatgaagtttggattcagatgatgcaagctaatcccgtagaaattcagaattccccggaaaaatcttgaggttggaagagaaaatccgccatagaagaaatgagcgaataccacgattttgtgtgtatcgggggtcaggaatgcctcaccaaatgccggtcgccacccgatgatctcttttgctggaagaacgccgtgcgccaccatctccttcaaactgtcttccgtcacatcggagggcgcccactgactctcgaagctttctctttcttccgccatgaatgtgaactggatggtctgatttagttcgagatacggctggaaagggatggggaatcggagcggtggatgtggggagaaatttcgtgaagtttttgagggtggattggagcggattgatgaaccctagtttgcccggcgcagttttgcattgtagcaggaaatggggaaaatggcgagagtttcggcggggaagacgaagagacgtttttcacttcggtgttattagggtatcgggggtactaatgggcctgggcctgtacagtacttcagcccaatactataatcagcgtggcctgttgtgatctctagggacttaggcactttttgctttggcaatctgtgttcacgatggtgtggcccaatgctgttaaaatcctttttaacgcgattcaataattctttggaattattatgatgcacataaaaaggcgcccgacagaaaggtgttataccattttttgtaagctttattaggctgcaaaagctgtttgggttgatttgagatgactggtttattaatagtcattcttttagcatgttatatgcttattttggttatggtaagggtcacagcctaggctattggactcattaattaccatgattttctatcctgtttggtgggtcattttatgagatttttactcggattcctatcaaacatgtctatttttggacctttgagtgtttatcactcggctcttcttgtattttttgtccttgatatgctcaagttgagaagcagtcagctaggtatcttactaagtatcatgcgtgcttcgctataaaaccactcggttcttgactatatgtttagtttttcaactaatcacatagtcgggggctacacctaattaggtgtatctactcgatgcaccatgttttattttcgcccttcacagtttttgatttttagtactcggcaagccggagcaagttgaattgaagcactcagattactgttttttgtttcgagaaggctattttgtcaactgtgaaggtctcgggggctactgtggagattatggataccccatatctacataacagttgtaatttagtcggatatacggtaccaaatatagatggaatatctctatgaagactcgggttaggttctaaacttgtatgtcaaggaaatactcgggatcttagtcggttacgattgtattttatctataatcccatattccgttaggatatggactgtattttgtaaagcggactccttcccctatataaggagggtccgtgtgcctcttggggggcgattctttttttccagtttatacaatcaataacacactcggcggaatcatctccggacaggagtagggtattacttcttgaataagaaggcctgaacctgtataaaattccttgtctccaaacccatccactttcctagcttgatagtcacccccttttattattgtcgaaatcttgcttcgacaatgaggatgtccaaattaactcatgtcgctgccatggtttcttgtatatgattgctgccatgttgattggatgcaaaagtgcaccattaacattattagagctgaaaggctcgtcagttacagttgcggcatccaaatcaattgatggataggtaccggatgtggaataagttcactttagttctctcaatttgtcgtccagtccagaaaaccggacaatacatcccttaatttataaaactagtacaaacgaggtccctcggcagtattgaccctggttttagctgacgtggatcttttgactaagtcttcgtcctactatgcattgacgtgaggcttgcgtgacagattgatccaaaaaaaaagagcaaaattgaaaaaaaataaaaaaataaaaacaaaagatgtggggcccatatgccagtcaagcaagaagataaaattgtgtgttagtgggtcccacttcctccacctcacccctctcctccatctcctccccctcactctcaatggtgagtcaacggcgactgcatatgccaagggaggcaattgtggcggaggtggccagcgaggcagcgaggagggagttgcggcgttccggtggaggagaggatggaggcgagggagccgacgagctcgagctcgccatccctgctccagcttcatgaggcgttggaggagtcagaggagaaggccgagccgcgtcagtgccaccaccagcagtggtgacggtacagggtctagggcggcgatgcttgcgagcaagcccttgcggtggtcgaggcatcacatcgtcggagggaggagatgggggtgtcggggaaggtgtcgtcgaggtattggaggataaaagactcacaggcggtgtggccggcatggaggaagacggggatcctcttgtggatgaggttggagcatagcaggaggttgctctagttaccgaggtcggacggggattttcccgacgcctagaagggactggcttggggggaggggctc

SEQ ID NO: 7933 - DNA, 8871 bp, Oryza sativa
ggaaatcaccacctccgtctcgctctcttatcccctagtgttgtccggccggggtccggccccgtgaacaggttagtgtttacccactttgcgatccttttttctcgttctcgttcgtcttttcgagcagcagcagccgcagccgcgcgcgtgacggggacgggccatcatgtgcatatccatcgttcgtgcgcgcatgatagatgcttctgcgtttgccggtgttgcgctgccccgtcttaatgcaaatatgcaatcataatgttcgcgtggatcatgatggttggttgattacaacgtgcactgcgggcacggcgtgctaccactgtacacgcgtacatcaatacaaagcgtttcccaaaccgccgggaccggggttacggcgccccggcggtaagcacggttaccacgcggtaaccgtgaaaaaccatgtaaaatttatcacaaatttaaattattttttaaatttatttaaatttaaggaggttaccgcggtatttatattgccgtaccccgcggtaaggccggtaaccgcgcggttaccgacggtaagggaaacccatacatatatcactcagatctacgagaggatctccgaaccgcgcgagatcagtgatcgattgagagttagatcgaaaagatgtgcagatgcttgagttcagtatatatattaaagcacaacacacgttatattataccgtaaaagttttccttcttttttgattgttgtgaattaatgcagtgtatatctatctatttaatctaataaaaatatgagggaaagtaggctggattgattccttggttcgtgcatgacagcggggaggtgaagaacatctcctgttctagatgcgaccaatttgatcctccgtgtcaatcatatatatcatttggtatgggccatgccacctcttctcctcagtcctctgcgtgtgctttagccggcaggctagcttgcgcgatgtggtccaaaactaaagacagcatccacatctcccacctcctaccttcggcagcgacgtttgccggtcggccggccgccggaggacggatgtcccttcaatctgatcgatcccctctccggcatcacagacgaatacagcgtattagatatttagataggcagctatcagctggctatagatcgatgctctttctgaagtccgagaaaatgaagtgcatgagtacatcgtctgtactggggtattaatttatcaaccccaaaccctgctgaccttcagtgagagagagagagagagagctgcagtagttgtgtccatggatgggagagagagcgagcatgggaacaaaagcatgtacaagccaggtatgcatgccgatccgcctgcgcttctctgcgtgcacactacggctggtgatgggagcgctggaaagctgaagacgcgagcctgcgctcaagactacttgtcgttgacatgaactgacagttcgtttgtttctttctacatgcagtgtcagtttatgtatggccattgtgctcagccactcggagaggatctacatatataggagtatatatcgatccaacctatatacggaaacttgcaggcagaatagctgtagtatcttttctttagctgtacaaaatatagttgtcgcatataaatagacagcacatgtaattttggtttacagtagatagcaatagcctaaagatatttgctagctaagatttaataaccttccaaatgagtcgtcagttgaaggatttcaacaattgagagccgcgccattgatatgtgcaattaacttaaccaatggaaattgatactccctccatcctataatataagggattttaagtttttgcttacactgtttgaccattcgtcttattcaaaaaaattttacaattattatttattttctttgtgacttactttattattccaagtactttaagcacaacttttcgtttttatatttgcacaaatttgttgaataagacgagtggtcaaacattgcaaacaaaaactcaaaatctcttatattataggacggagggagtaataaatatttatcatgttataacttataagaaattaaaccaaaactggcaacactggcaacaatgacggtattggtagctaaacacagacgaacaccatagaagatccaacctttatgatggtaccgaagcatgacatttgtgaatgaggtccagcagaagctagcctacatccctactggttataggcatatagcttaatcggcccatcgactagcgtaattatagtgtatctgagtatcacacttctcttagatctagtacaattacgatgtatctgagtatctacgaccttcgaatagcttggctgtcgcccagtagtatctatacctatgctatagtcaccatgttaccatgcagttaaaacactacaacaaaacttgtaataggagacgcaattatatgtgtcggttcatctaaaacagcacatatgaggcttttcccgctttcccaacccctcatgtggatctaaaataaaaaaatcggcacctataacaccttataagtgccggtttattaaacaattgcgctttagggatggagctgagctgaacacatatttctctgtttttttaagtcttcctcagtctaaagtcctaatcttatgttctcccaaccaccccctctctctcatactccatccccattcgctctctccccacctcaccaagttggcgagcgatgcatgcaacgacgatggctcgtctctcttgctgacgtgacgacggtggttctactacctcggtgacggcccgcctattctcagcgatgccatggcagtgtcaggtcctcctcatgctgccgtcagacatggcctcggctccgtctactggatttgatggtgatggcgatagaattggcacctacgccaaattcagcgggcccaagctcaggggtctccgaatatggccccagtatcatctcatctaccgcaccaagaggggttgccataaccacatcgcctcggtggctaggtccccagatttgacctcaggcaacggcaagacgcaacgtcaatgctccactattgtaacgtcccgtcttcccccaggccgggcccacttacatctgatagctttcataggtcatagactgccctcacagaccaacacatgtcttttctgcacactttgtcctcactcgtgtgcacccggaagaatttcccggtcggtcacccatcccaaattgctccaggccaaaggccgggatgttacaccctcacccccttaagagagatcgacgcccccgtcgatcaaccctaggccaggaacgtcctctcttggctacgcccatgtgtccagtgccagcgcatgtgccatgctgtgtaaccactcccggtcttcaccagccatgcgcaccatgcctgcgcaactgcgacacacgcgccgcgagagtcggctctgataccattttgtaacgtcccgccttcccccagaccgggcccacttacatctgatagctttcataggtcatagactgccctcacagaccaacacatgtcttttctgcacactttgtcctcactcgtgtgcacccgggaagaatttcccggtcggtcacccatcccaaattgctccaggccaagcacgcttaaccctggagttctttggagattggcttccggaaaagaagttgcaacttgttgatatgagtattctattaattctattaagccctaggccgggatgttacaactatgaagagcttcaagggcctcgtgaggtaggactcctccttgaactggccccctccctgttgcggggattccctagcaacaacggcgaggacctcaactgctcaccatcatccagcaaccaggcccaaggcccgattacttcgtctccaggtggtgctctcctttgcgtttttgtcttgggatttctcgatttttgtggaaagggaaatgtatgggagtttgtgttctagggcctatgagttcttgttggatctgaatatgaactcttgtgtgcaatgtagctagcttattgttgttgatgtagggccttatatgtgatgaatgttcttgatttgtttttccatgaaatacaatggacgttcttgatttttctcccatggcttcttaatctatgccatggatgtggatatggggggatgtgctgctcgaagcatcggcacaattcatcgagccgactccctttttttttctccgtcataggcctcacatgtgttgttgtgcctgttttgaaatcgacaccaaaagcatggctcatcagtgccggttgcagaaaccagcacatatatggacttatagaccgacactgtaatagcaggcccttcggaactgcacaacccaacccatccaacagacgggcatacttacacatactatcccattatactttcatcctcacttcgtgtaaaacggttaagccaagagtgacatggttggagagacaagctcttataagttggttctatacttgctaaactagcaagctggtattaaacatgcacacatagctctcatgcgacacgtaagtcttatcctaattgggtcaggatgtaccatacatacataaggccatgaaagactttagaacacgctaagttgttatgaatacctgaattcctagtttgggcttgtaaataatgaaatggcactaaatgtcttggtaatgagatatattatcgctattgggggagcggctttgccctcgtcctagggaggcagttgcccccttttcttctctcttttgtctctgtctgtgcatctcaagaccggcttcggacaaggggcccctaagaaagcctttggaggggctttggggaagaaagaggccccccgtaacccataaaaatgcctcggagaggggcaccctgaaggagcctacggggtggcttccccgacacggggctcccaaataaggcattccccacggtggggagatggcaacaacattgatggggcattcaaagggcaggctcaaccactcctgacatccacgaggaaaggccctaagcaatgtatacatttcgctctttttccttgtgctcgatccctattggattctattccaacataccctattgcactctttctccttgtgctcgatcccttttggattctgttccaacatacctccatttattaaatagatgacgtcattgacttttagacacacatttgatcatttataatattaattttttacataattataatttattttgcagcgagttattgtgccactaaaaagtattataaacatggtttatatcttatacatttgcatacaatttttaaattagatgaatggttaaatatgtgtccgaaagttaatgatggtctctattaataaatagaggaagtatatgctatgtaactttactttagcacacggcagtatataggaatctactgaaatgaattaaggtcatcacacacgaaatttcgattactgatcagtaccaatggcagctgggatcacagattagattcagaacaattatactaattcagagtaattaaggatataaaccttcaataaatagaaatccttatttatatagatcaagtaacttgcactggaagcacaaatttcttaactgtaatagatcaagttatggtaaaaaaaacgtaagttatatacacacactcgcgcgtacaaaaattaattttcacccaagtaattaattcatcagagaatatatgcaggacttgagttgcatatatactccctccgtcatctaatataagggattttgacattttgcttgtcctgtttaaccattcgtcttatttaattttttttagaattattatttatttttacttattttattatccaaattactttaagcgcagcttttcgttttttatattttgcacaaatttttttaataagatgagtggtcaaatagtgcaagcaaaatatcaaaatcccttatattaagggacggagagggagtagttattattttcagtttttcaccctgataaataaaaaatgcagaatcatgatgggcaataatgcataatgcacatctcatgcaaacactgcggttgtcacaaaactaaaccacaattaacaccagtacacacacatgtacactaacccatatatttatcgatgcggttcgttagccatatgattcccctcgtaactagtaccacatgatcgactagtatgcagaatttaagtatatatatatatatataaataacgatgtcttgcttaattttgacacatagtagaatttaagtatgcagagtatagctagctagcacttagggcgctccctttgacatatactatgcaggaatggtaaaacacataaatagaaaaaaaacacaacattttgggacgaatgcatatgcaaaacggatgaatacacaaaacatatatatagaaacacggaaatgggcgtaaggtgtttgatagactcttccaattagaaaaacatatgatttagattagagagatatatagactcaatagaaatcggaaaactccaattcgtttcttaaaagattaggtaagaatactctataggattaaatcttaaaaaatttcttcacataccatttgtctcgagggaggtcttaaaagatgtttctgctgggtgctggttaagagagacagtttacacttttacagccgcctgccatctctgccatagtagttcaaaggcattgatcagataaggaagagtactcgtatatatatgcggctatatacgcgcgctgcccaggcaggcagcacgccaaatatgcccgtacctcactattactacacagtgaaaccagacgttgcagagcctgaagaaagccccccacttctctgactatctgaacatcacccatgcataagctcatcatcgccctcgctctcacagtcacatgcatgcatgtatgtgtgtacgtatatctgcagttatgcaatgtgtaactggcccatgcatatgtactatcagccagggagaacaggctcgatcttttaatgctactttaatttcattattttttttatatactgttgctatgtggatatatattgtacacatacctgtatcaatatatgcatcagtgcatgtgttccctccgtacgttttagttgcaaaaagaatagccaaagattaacattttgttttatattccaagtttcccatatttctcttctagatccctccaccatcctccatctttaattacaattttatacacacacacacacacacctatcattaactcattatgtatgcatgagatgatgagatattattgaggaatgctttgctagattatctaaattgaaagtacagttgtcttggtatatgcatttttaaatggcaaaatttgccacaggacatgcaaaaaatgtgtaattggttgtaggacaccggtcgcattattttattatttccgggtcaaaagaggtgagatatttttctaaatgcccagattgcccttctctttccttccttttctcttactctgtccttctttcccccttcttgttgatttcgccgggaacggcatagcagcctcaaagcagcggtggggcgaggtcggcgcggcgtggtgcggaatcaccagcggcggggcggtcgatggcatggcgcgaccatggaggagtggtgttcggccagatcgatagcgggcaggcgacgacagtgccggtgcggtggggcgcggccgggaggcagcaccaagcgtaggcggggaggctacgatgggtcccggcatcaccaccgctacgatggccagtgcccttgctcccttcggtgcgcttgacgagtgccgacgactgcggcgggttcagatcggcgccgacgaagaaggggtgcgatctccctctccggtgcaccatttttcggggtccttgaggggagatggagaggaggatgaggcgaagatgctggcgcgacagcttggcccggcttggtccagataagtgggaatgtcgatgatgtcgctgcggcggtgcgcaaagcacgctccagagctccggtgggcacaacagcattcccgtcgattggctgcacgaatcgagaggttgtcaaagcaagatttgatcggcatggagagaagataatagaacatgaattagataggaacggagatagctcgttggtgatcagcggcgtcctccttctcagcggccgacgacgaaagataggtggagagggagagctggagctctcttcctcggtttgctttgtgtggaaatgaagtggagtagatggtgatgcagtagggacgagatgaagactcgcctcagcattttgaggcgttgacacgtcgtgcacacgcgtcgaactcagccggcgccgatctctctctcggctgtctctggtcgatctctctcccatcgcgtgctagctcatgtcgcttggcccaacctcccccaaacacgacgagctgaggaggctattctccaggttcggcaagatcgagagggagaagaagataagggcaaaactgtcattttacattgtttctctctcatcaattgaccgaatattatattttaatgtgtccaatgtcctgtagcaaattaccacatttttggagtgtcctcgggcaaattcacgtctttagggtgttcaacagctaattacacattttttgagtgtcctgtagcaaattttgcctttttaaatttgtcaagggtgtatcacagagctttgtcaacatagatcaatcccacttaagtgccatacacatgcatgtcaatgagaaatcaatatgtgatctataaaaaaattctatattccaaatatatatactttcttgatttctcaagtgtaattagatatatttgtgcaacatgtcaatcagctctgcaatgaagtgtttgttctcaattaatccctactcc

SEQ ID NO: 7934 - DNA, 1083 bp, Oryza sativa
aaagccgacacaggtttaccatatgccgacgagaggggtcccagaccaacaacaggttaggtcccagaccatactgtgctaggaagcccaggggtcctccccgacaccaccccggcgaatccacatgtctctcggcatcaaggctcccctgataagctagttactcagccaggggtgtcccattccacccatgtggtcgtacttgtcttatgttcggatgaaaatccaaggaaacggtccttaagtgcgagagcgggaaaccgtacacccggtacgttccccggtccgcggttttggaaattcatttagttcgcaagcaccgacccaggtgtcgggttttccaagtcttttgtaaaacccaagttttacccaagttgtttttcaaattttaagtttgaaggcgaccgtcgatactcgcacagagtgcacgaatatcgaggcgcaactagatggttacaagggaacatggtataacaattaacaaaggaaggatcaaatgcaacaaactaggtaggtctgccaatctgccttgcagacgggacaaacagattaagtgcgatcctatcaatgcataatatttttcaagcaacataattaagttcaaaggtggcttgccttgctcgagatcttgggcttgatcctcgaaatcctcgcactgcgggtcttcgggctccgaaactacactcgaaacgggacaactcaacaaacggcgaaaataaagccctattaatgacctctaagcgtgccattagatagatctcgagatttgaggaattttggaagttgaacggagtcaaacggatttacggttgggaagatattgaatttctaagattattggatttttggtctaaaggaaaaggatttaattaaatcctttttgaaaaagaaaagaagagggggagggaaattagacttttcctcgggcggctagggcgtggcccgagagaaaaggggcggctcagccgagctaaatgggccggccggcccaaagcggcccaagcacgcccgcgcgggaagggaggagagagagagccggtggaccgggctcacctcgcgtggtcccgggtgggacccgcttgt

SEQ ID NO: 7935 - DNA, 11327 bp, Oryza sativa
attatatacatgtgcatccagatgttcgagaagacctaataaacgatatcttcctccacaatcaggtgaagattgccctaagatgcagggcaatcaatctacaaccgagcgacactgacactacctcatctcctaagagggactgatcttaaagtgagcgtgaaatcgatgatgacaaataaatattccattttcttttttgcatttggttgtcatgtaacaaaataaacaattaaggtttatttcatgaattaacaatgtattgcttacaataatattattttttacttagttcctactatgattctttaataatgtatcagtaaataagcaacaataaccgtattttttctcaattatatctatcaatgtgtcttccacgtgctcgctcactagtatttataatataggactaaattttattttgggtcaccttttattaacattgtttcacttcaaaccaaacaaatatttcattttgaaccgggaaaatttacatttatggcactttggactaccctcaactattttatctatatgcatcaacttgtcatatgtcaaagcaatagtctagatgtaaccgtgggtattcattgacgagtaggaagccggtgtactcggaattgtttatatgatggaaaagagggttggggtggtctaaagtggaacaaagggaagattacctggtccaaagtgaaaacctatgttaaagggtggtccaaaatgaaatatcgggtaataaaaggtcgcgcaaaataaaatttactctaagtatagctaaaaatgagaccaccttcgctttgaaggagaaaaaggataatatgccactccattcggtggatttcgacgaaatgccacccactagaatgtaaaggatgaaataccactcactgagttattttcgggatatttggcccctttggaagattttaagaccaaaataccctgggaagagaggaagagagaagggagggggagcaccagggaacatcgagacggcggcgtctgtgctcgttagcgatgggtggtgagggcgtgcggacggacgacgatggggaggaggacggtggtgccgcgagcagcgggcggtgccgaaggaggcgagcagtgagcgcgtgcgcaggtggcgccagaagcagcaagcatggagcacgcgcgcgggcggtgtcggaggcggcaagctacaagcgcgtgggtgggcagcgctggagagccctctgtgccgtcgtcgcctcctcctccctcccatcggcgccgccctcatcccccagtcgccgtccttcgccacccatcatcgccgtcgtctctcccatcagcgtcgttgtcttcctcctcccatcagcgtcgttgtcttcctccccccgtccgtcgtcgcagctaacgccccgcgctcgctgcggggaagcatgagctccgtcgggctcaaccttccccgctcctccctcttcctctttatccacatccaagggtattttggtcttaaaatcctccaaagtgacaaaacgtcctgaaagtaacctattaagtggcattttattctttgtattgtagttggtggcattttgtcgagacccaccgaatggagtggcatattgtcatttttctccgcttttttgaagacctagtaatctatttattatattatcaagacaactttgaaatgagacaccatgttagctataaaggttagaaattctcacattaatcggagaaaaaagatcttaactgttatatcatgatgggtttgaattgtaacggcatacaaaatacaattataactatagaaatagatttctataagttaagagttatatatgagaactaaacctatataaatagaagttaagagttgtatacaaaatctaaatatacttctacatgtaatggtacctatatatactcctttaaaaaacactagtggtggcagcagtgaatctgccattgccactccaccactcctataacttgtataagttttatatcatggaatagtccagtgtgtgtttcaaacaagtaaacaccatatatttaaataagtaataagtggtactaacatatttgataaaaaaaaatctctatgacatattataatgtattttcttttacccatagcaacacatgggtattttgctaatagaaataaattttcagggttgtatattaaatctaattctacgtgaattatcattattaatcataggaaaagaaaaaaaaatatgcgccacttagtttagagttagtttgtccgctattggaggatgtaagggcatccacaatagagttcaaaagtggtcattcatatgcaatataatatttcattcaactagctagtaacattgtggaactagtccatagcaaagaaataacaaaagctaaccataagcatatgggctgcccatagagcataaaatatattatttgtctctatttcttctctcctcctaatactatttgctatctgtatacattgggaatgttacaatagttaaagtctatatatgtgggtcccatctatatggactacttttgctatatacattgttgttgccctgaggaggttttgaggtgaaaacaaaggtggttttggtctctaggggcaaatatgcatcacgtgaaagtttataattaaaggttaaccatgagttcaacagttcaagtttgaaaattgcatatttttcctttgtatagttgttgacgtgaaaaacatacgctggcttgggagatctgcttagctctagtgcaggtccaaatcttggtgaggtgcaggcgtgctagtcagtttgatcctgcaactgacaaggtatgaaaatagtagatcaaattgtcgatcggctgacaagccgatagagtagttctagccgatgtcgatattagccgatagcgatagggttttgagctatcggttatgtgtttgatgtagaatctgacacttgatataaataaaggcgatcgactgataatgatataatataacaataataatatccagtagaaaccagttggctagcaataatatgatagaatgagcactgatccgaaggttaaagcatacatcagctggaggtccgatgccataaaatccacgagattagattaaacagtaaagcctttgttattatcggctaaatccaacttatatgcaatccttgtaagccaatgcaacgtccagataattcatcggctgaaaccccgaggaaacccttattggcagtcaacaagcaggctagagattatggttctaagcacaacttggtagatcaaacttaactgatgcatcactaattatgaaaagaaacataatatctagacaatcgagcccttgactaattttcagggtgatagatgccttagctaatctaatctagtaaaacaatttagccgataccgacggaaaccctaaagcgagagacaactgatagagttccgcctaaagcgagagacaaccgatatagctaaattgagatactaagactagattaactaagacatatgataaataaccaggcaaatatatcaaccaaaccagagtaatccaagaggtcgaatgtactgatgtagccttgaacaacaccgacgtagatacgattgcctgggccggtggaatattggatttaccccttcgccggagatcaaaaccgatgcagcccagcgtcaggtgctaagtcctgtcggacgataaaataaagtagaaaagacaaaaggtggcgatgcgccgaattgtattgatcgtgagagagatcttacaatgaccccgggtgtacatatttatacccatggggagatacagtccttgtagtacaagaaagaaactttcctaaagataaaaggaatacataaagtccttataggacactaaacatattttcctagagataaaaggaaactaataaactattattaattaatagataacttgtcatgccgtatcctccttgataagctttgtttaatagattaatttccttaaccgaatatagcaagaatccgactattggcgatgtgataattcaaatttcactgttgacaatagtttaaggtgaagatattatctccttcatatgcgaccatttatttttcagatgattcgatcagcatagctttttatcttagtacgttactaacaactagcatggtggtccgcgcagattgcgcggctagcatcattatattttctcttatataatagcatatatgttttctcattatattattaaaatatattacaatgacgacataattttaaattttgcaatgacttttcaaaactactaatgtgtaataactactctagtctcctcttctaatattccttattttttaattctgaatttcagctatttctaaattgtatttctatatggactctgctcttttctttttctctgattaatgtgagaatttctaagccatgagagcgaacgtggaggctcctttttattccgaattttagttggttttaaatttcaatatgaactctactctacttctaatattccttattttttaattccaaatttctatttttttcttaattgtatttctatatagactctatactctacttctaatatttcttatttttaattctgactttcggttatttcctaattgtatttctatatgctattatacaattcggcttaccttactaaaaggaagtgcccagttttactcggtctaaaagtgtaatttggtgcttcaggtgaaaaatctttctgttgtgtcgcacctgtgtagtttcgtggctctctgtttctcgtccacaacaaccgtcacgctgatccgagagaaaggtggcgctgtgctagcttttgatcacactccaaaaagcccaccctaaggcggctacacatcgtgtgtggctcagtgcctagcttaggcttgaaaagtggcatccacccccaaatcaccgattcgctattacctcgacacatcgatcaaacatgaaacacactcccatcgtgcatagcaacatagcatatacaagatacaacatgcaaacctgcacgtcgagctgcagccgtgcgtgcatagctgcttaccgctgggtcgtattcgtacatctcgtgtaacctaccgttcagttacgcttggttcgccccccatgtgatatagtgatatgtgctgcggaaaggcgccgctgccatgtgcgaagtggctgcttttgggctctcgcaccactacaacaaaaaagggactatacgtacttccgcagcatggaggctactgaaaggcgagaaattctctcggcaagccgtcctcggcgagagcaagatcgcatcgtctttcgaatatctcacggctcatcaccagtagtcaccggtgttcctttccgcatctcgcaccggtacaacacgtcgcaaataagatgaagccgaaattgttcggctaggctcaagccatatcgaacgagccccacgtcgcaaatttggagcggcaacccggcaagcgtttctgcgcgctttctgtgagggggagaatgtgcgtcctctgggcgtgtttcccgtctcgggtcgcggcggccatgcacagttttgcacacacgccatgtaaaagagaaaaaaagaacggtggtgagggaagggaaatgcccaagcgtgaccaccactagcataaacgggaaaagctggttgcctgcacgcatgagagaacatgtaggctgtggcagcgtgacacatgtagatgtagcgagagaaacgccgaaagtatctgtaccaggattgtttcgtgtggctcctggctcggacatctgtcccttgctcgcaaccttttgctaccaaaaaaaagtgttccactctctgggttgtgttgtgggtgctactactaaggattatagtgccaatcgcataaatctttccctggaacccttgagagttgggtgtatgctattatgctgctcactcacgagacaagtgaaatatttagaatgtatttttgtgtctaatcaaggctttagttcgtggcattcctctatgaggaagtttctttttaacaaccataaatcaatgttagtctaaatctcgattctgagatttaaaaccgtgtactatcagcttttaaccatctcagtggttctgaagttcatccattagaagggccatgtgtgatttttagctggcgtcgtcacttttagggatttgttgggagtgtagcgtggtttggcccattcccgctactcggggtctgtttctagccgtcgtagtttctctaagcttcaacttttttcatttgctttttctccctccccctagcataagttggtctggctgactgtgtcgtataaataaaactatttttcttctaatatattaacgtgcaatccttttacgcgttcgcgaaaaaaaaacttttaatgttctaagaggctgttcatttcaaccttgtacctattttagagtggctttgaatgatacgtcactaacgtggctacgtggtccgcttgcagtcttgcaccaagtgatgtaggttgcagatctgtcttatgaaactggtttttttttatacaattttaaattcaaaactagttttgatctcgataggctgaaattggatggtctaaacgcttgaaattaaataggagtatatggcttcaaagttaaggctcgatttcaaacttcgtggaatttcaagttgtaaaatgggcttttccttaatttgtttgacctagcacattggagaagtcgatgtatgctgctattttactattgcctatagcaaaacacaattatactatagtagttccctgcgcaattgcaccggtgctaattgtattgtatctgaaatgtagaactttctcttagttctacccttgtgcttatttctaaaaagaaaattgtatttatggtgcagcaagagtagaatagcttcatcttttcgtttatgcttataattatcagccaaaatttaaatttttaaacttaaatttaaagctgattttagggttttttcattaaagtttatttttttagcctttacttttagatcgctaaaaaaattttatttacaaattactttccgttcgtaaatatgtcgtttggtttattcggacagaaggtatttccgcttaatttgtttgtgacttgagatatacagtagtactatcgaaagagagcattatcagtcccacttaaaaccctcttccgccaaagtgtgggagcccaaagcagaggtcctactactctcattttctcaagtctcaagtgacttatgcctttgttttttttccccggaattccatccattttttcaaagaccaaaagtcgccaagcaactgcccgcgggagctctatataaagcaagcaaaccaaccccatcctacactacctcacacgcctctcgcgctgctcaatctcccacactgctcggcagcttagctagctcgcggctcgcttgatcacgccattttcttcgattcgatcgatctcctggtgtgccagccatggcgagaatgctccttgaggcggccgcctccggctcggtggaggactcactcaactcggacctcgtcgtcatcctcgccgggctgctctgcgcgctcatctgcgtcctcggcctcggcctcgtcgcccggtgcgcgtgcacgcgccgctgggcgcgggccgccggcggcgggacagcggctggcggcggcggcggtggcgccgccgcggcgaacaagggcgtcaagaaggaggtgctgcggtcgctcccgaccgtgacgtacgtctccgacggcggcggcggcgaggcggaggagtgcgccatctgcctcgtggagttcgaggacgggcaggccgtgcgcgtgctgccgcagtgcgaccaccgcttccacgccgcctgcatcgacacgtggctgcgcgcgcactcgtcgtgcccgtcgtgccgccgcgtgctcgtcgccgccgagatgccccccggcgagcggtgcggccgctgcggcgcgcgctccggcggccgcggcatcggcgcgctgctcttgaattactggaaggcgccggcctgcgacgccgaggggccagagttggcgtagtggcatgcgcactaactctgcgtctgtctggtctttaaccaagatgggaaaaaaagaagacatcattagacagacattaaccagtgtgcaacctcattggttaatctctattgatttcttttctttcttcccttttcttggttttcatttagccttgtagattccattcttttttaggttttgcctgtgagtaccagtgagtagtgtgactagctagcaatggtgagcatttggtagcatcagctaccaggatgtatgtaagcaccgatttgttggggggaaatgtgtgaaaaattgctgtaacttatttgcacatatattggaattttatacgcagttatctttaactgcgatgttgaatccaaatttggtactgctggtaacacttttgttttggcctgcaatgcttcatgacttcatgtgcaattttcatttcgaaaaatgtccataacaatgagcacatgggaccatgagacaatttagcagttatttgtaagatctgtgcttttcacttttagaaaaagcctttgtgaagatccctagttatttcggttgctcaagtagccgagtgtgtgtttgttcgaaattagttgtgtgttaaaattacgttgagaagtgctacggaaagaaaataattactatgtgctttcttagttgatcttcataaaatttgtccaattattatagcaggattacagaatcacagttttttttgaatatttttaaatttaaagttccaaaactttttttttaaaaaaaacaagctttttgaccacactactagaggtagcgttgcaaggcaacattgacaacagtagtgtcatgccatcgcgagtagcatggagaaatatttgccagtccatgatttttcaccgagatgataatgttttcttgccatgctaattaaattggtgttgtaaataggttcagatctagaaatgagctttcgatgggtttatttttaaaaattaaatttagaaaggttttaaaaaaatccagaatcgtgagtgttgttatggcccactaggatacctggccattcttgtaggatcgaattgaaaaaaaaaagattgcataataacgagtaaacaaaataatacactttttaagggcaataagcaaaaaagcattttcggagaggcagagacaatgaagacttgaagagccatgtttcgactcttgcactgttgtttaccaccttttggaggatcttaaggataagcatatgccttgacatggaatgattaattaatactctcttcgtactcataaaggaagtcgtttaggacaatgtttaagtcaaaccttgggaatataaatcatgaataactctcaagttgttgagtttgaaaatgtaaaaattatatgaatatatttgtcttaaaatatattttcataaaagtatacatatatttttttctcgaacgcgcaaaaggattgcacgtcaatatattagaagaatagaatgtttgtcacacgacgcaatcagtcagaccgacttatgccaagaaaggaggaaaaaagactaaaataaagaagagacgaaaaactactgtgacggttacacacaactccaaatagctggaaggggacagagccactaccttcccaggagaaccccaaaaatagctataccagctaaagaccaaaggtggccctcagagaggatggactcaaggaaaagtatacatatatcactttttaataaatatttttatagaaacaagaagtcaaagttatgttttggagatcgtgtcgctgtccaaaatgacttcatttatgagtatggagagagtaacttgtaactgtgtttaacatcaaatgtagggagtaaggtggtgtttggatccaaggacttaactttagtccctttatttagacactaatttagagtattaaatatagactacttacaaaactaattacataaatgaaagctatttcgcgagacaaattttttaagcctaattaatccataattagagaatgtttactgtagcatcacatatgctaatcatggattaattaggctcaatagatttgtctcgcgaattagtccaagattatggatgggttttattaatagtctacgtttaatatttataattagtgtccaaacatccgatgtgatagttagtcccatctaaacaggtcctaagactatgccaaagtggaaactgatgcagaggatgagtcccgctctgaggctctatcagctcttggatccgaaagagccggtcactggcgcactcacaattccacatcccctccaagattcatgattggttgaagcggcccggcgaaacaaacgcatgtaaaatgaattgcaaataccttgatttcctaatgcacatgtcagtagtttagtcgctgaaagagcaaagtgtcccagcaagcaaaatacaaaatagccacacaatgacacaaactcaagcacttgcagcagtagtttggtcaaccaatatctgagcaccttctcctgatcgtaagtcaaatcagtaatattgtttaatgcaaaagataagatgagaatgtgcaccttctgtattatggattggatagatttcccgttcacgaattagtggcgttggttaggctgcaggtgaggtgggcttccctggcaccatggccaaccacaagctcacaaatcaagctctttcctttgcaataaaatagttgaaatctctttgtttgatcgtctcttcattgcacgctgttcttggcgctttttccagccgacctcttatctgatagtataaccataaaatacatctcagagaattctagtctctgtctgatggcattaagaatgaaatcttgttgcctcccccaatacggtcggatgcttcctcgcacaaggggtaaagtacatcctgataacgatcgaaatggacaggtggaaaacgaaagcaaaggtaagatcacacgtggaaaatttactttcaagaagatgacaccggaaatcggaatggaagcttcactgtcagagatgattcgtgcaaatgcttgctgggattcttcctccggcttagtgctgtggcgcatcaagtcaagctagctacactaggaagcaagtagcaagccctgaaccactcactcaaccgactgagcgactgaaggctttgacgtgagcactaccgatcgagaaatttgttaacgatatctcatatctccctccctgatcctgatggagatggaacgcgcgtattattgaggtcacggagggagacaagtgcagatgttgccgcgctggccccggttaactataagctgcgctgcatgtggagtggagtcaaccggggggggggggggggggggg

SEQ ID NO: 7936 - DNA, 24235 bp, Oryza sativa
ccactgccgacgccccgccgacaacagagctcatcgctagggacaacagtgaagaggcggcggcctgaatctgtgcgaacgggaagggcgcgtggcggacgggcgagtaggtggcaatgggaacggtggagcaggcaagcgaggcgggcggcggcggaacgaagcgacagcgggtggagacctcggtgaggcggtgttaacagtgaaatttggtaatcgacaaagacgtcatcggcttagaatcattatcggctgcagcatctcggaatcagccgatgggagttatcaagtcgctaatagtcggattcctgttatattcggttaaggaaatcaatctactaaaggaagcttatccctaagtgaccgagtttaaagaggatgcggcatggcagtttatctattaattaggaatagtttgttagtttccttttatctttaggaaagtgtgtttagtatccgataatgactttatattttccttttatctttaggttagtttctttcttgtccgacaaggacttgtatcaacccatgggtataaatatgtacacccggggtctatgtaatctatctccacgatcaatataattcggcgcatcgccaccttttaccttttctactttattttattgtccagcggaacttggcacccgacgcagggctacatcgtcttcgatctccggcgaagggataagtccaatgttccgtcggcccaggcaattgtatcgtttacgtcggcgtcgttcgaggctgcatcagtacattcgacctcttggattgctctagtttggatgatatatttgcctacctatttatcatatgtctctgttaatctagccttagcatatcaatttagctctatcggttgcttctcgttttagggtttctgccggtatcggctaaatcgtgttgctagattagattagcttagacatctaccaccctgaaaactcagtcaacggcttgattgtctagatattatgtttcttttcatacttagtgctgcatcagttaagtttgatatactaagtcgtgcttagaaccataatctctagcctgcttcttgattgccaataagggtatcatcggggtttcagccggtgagttatctaaacgttgcatcggctcataaggattgcatatacatataagttggatttagccgatggcaacaaaggtttcactgtttaatctaatcttgtggatcttatgacatcggacatccaaccgatgtgtgcttcaaccttcggatcaatatttgttctactatttcatattgttagccgattggtttctactggattatattgctatattatattatcatcagccgattgcctttatatcattatctacattggacatatagccgattgcttaaaccctatcgctatcggctggtatcggcatcggctattatcgactatcggctggaactactccatcggcttgtcagccgatcggctgtttgatctattatttgcaaatcttgccagttgcaggattaaactgactggcacgctcgcatctcattaatctttggacctgcacaagagctaagcagatctcccaggccggtgtgttcgattttttcgtcaacaggcggggagatcgtggctgtcgtgagggcggcgctgcggtggtcggccacaccccagcgtcgccaacggggttggggagtgaggagggccattgagactatggaatgtcgttgtcgcgagcaaccccgctcggtggcccaaccggcgaacatcttccaggagctcgcccatcgctgctccgcccttctccttgtagtgcagggtagagagagggggatagagagaagatggagtgaggatgacatgtggaaccacatgagccccacttttttattattttgtgtgtagctggttatgtgggtcccacggtttttattatttttctaagatcgaattgtcacgcaagcgccacgtcaatgccatgtgggacgaggatctagtcaaaggagccatgtaggtgccacgtccacgtcatccaaaactaggcacaatgctgccgagggacctcatcagcatagttttgtaagttgggatgggttatatccggttttctagattgaggatggaaatcagactaggcaacaaattgagggaccaaatgtgaaattattccaccggaagatggcccaaggacctaattcagcccatcatccctcggaagatggaatattgtactgcattgaattacgtttcagggcatttacatacctctggattaattaatttcaaaacatagtactccactaagtttgaatatcgaaaaacatatggagatgttatacagagtagaataaaaaaagactgagaatgtgttggcatcaaaatctttgctaggccctcaaaagctttaattacaggtttgaaataatctcttcagacctctttggtggttgagaagaccccccctactccctacctaaatcctactccaggaaatatgtatgaaaagaagacacattgtacaacctaaacatgatcaaatatccaggaaatattatattagcatatgataatgttatcaagaagcaaatgaagaaagttagcgcgatgaatagcacagcacgagcagaaaaacgaaaatgactacaggactaaatgcaggagcagtgagcagtccatctatccattcatcagctgattcttgtactggcaggctagtatctatatttctatgttcacaacacagataacttccacaaagttcaagttaaagctggccacaagatcaatccttgctgcaagtttcatgctttccgtagcttagcaggagagtagagtaatgaatatatcaagagatcaccaacataagacacatgtgaactgatggaatagaagaaacgccaaggcttcagagtcgaacatccttcagaaaacatctgcatggcaaaaaagggggtttcatatcaaatgtacagggttactacatcgataatagacaaaggttaagatgattcacaagacattagaaatgctaggcagctgaaggagaagttaaatattttcgaagtagaacataatcaaattccatgccatgttccattgatgtcccagttgtgaagcgatttgaacattgcttggattgcgaaatttggcggtatgtcatgctggcattaaagaatatatcatctaagcaaataaaatgcagcttgcaccagagaagagtaagcagggaggcctaggaattgttgtatgggctttatgtttatacagatagattaaacaatctgctgcaaaaaatatcaaattactcaatatagaattagaactgttgggactaagattaaaagaaacatatatattacaaggacactgacatagacaataatatccagaaacagtatctgaagtgcgagtacggtaggataaatggcagtcagacatactaggttctgcttctagttagcgcttcttatttgatgttgaacaaaataccttgttggctcttgttgtgatgggaatttacaccttgtaaacagaataatgaaaagaatggagcatagtctaaatctgttttttttttccatcaacagtcagaatataacttacgatcataaatagacacaagtccaggacatcaagaaaataagaagatttcatctaatcctggtcagtgctgactaacattgagggaaggggcagaggaggtggtacaatcacaggatgaaataatggacaaatgaaggtgacaaagtgtcataaaaagtgcttgtgtgctgattgatgtttcgatttggtttgaaccgataacctttgttcagttggtgcaagtacaacaccactataataatcatgccttctagtttgtatggaaatgaggcatcttgtattgtcgatcattccagaaacatatccaccagacagttcatcacaaattgagttcacccaacaatattaggaaattctaacctttataggactgatgaatgaggttacttttgcagtataatgtagaagcttctgataaatcaaattcaacaatcccaaaatctaatactaatgtttagaatcagcattattcaatcttaaaaatattatgctatgaatcaatagactatttgaaccatgaagggccaaaggaaccaacctcgtcagaccctgagaagctggaccttgttctcaaaggcaatcgatatccactccgggtaagctgccgcccattgcagttggtttatctctgcaccggcatcatacaccatcacaggatcaatcccctcggccggcactgcgccgggcgtcgctggcagctcccaaatcagcgcttggccgtcgtccccagccgagcaaaggtgcctcgtggcctgtggcgcccaagcgaccgcgttggcgcacgcccggtgtctgtgtagttcggccaccggcaccccgggcgcgcgcatgtcgagcacgacgacggcgctgctgtccatgagcagggtggccatgtagtggaagtcatagcggttccatgccagcctgaggagcggcgtgtccgggcgggggctctcgtagaagatggtggaatgctccttgtcccggaggtcgaagacgcggacggagccgtcggctgagacggaggcgaagatgccgttctccccccaggcgatgtcgtgcacggccttgtcgtgcgcgatgagctgcgtctcgacgacgccgcgctcgatgtcccagatggtgcaggtggtgtcgatggaggcggtcccgatgcggcggggctcggcctcgttccagtcgaaggaggtgaggggggcgcagaactcggaggcggatgtcttgcggttgtcgaggacggagcggagctcgggcgcggcggcggtggcggtggcggcgagatcgtcgagcggggcaagccagagccgcagcgcgtcggaggaggaggcgaggaggtggggcgcggaggcggcgcgcgggtggaactggagcttggtgggcgggtaggggtggtcgaaggagagcgcggggagggcgcggaaggaggcggcggtggggtggacggggtcgaaggagaggagggagacgcggttgtggaggtcctcgaggaagctgccggcggcgaggacgggcgcggagggggagaaggccagcgcgtagatggagtgcggcagctcgcaggtgaaggcgttcgggttctgcgcctccgccgccgaggcggctaccgacggcggcttgggctgctccatgggaaaaatcgttggattcgcttcgctttgcttcctttctttctcgggtggatttggggatgaatggactcacgcgccgcggtggttgatcgggtcggggagttcagagtaaaaaacgcgagcagccaggccgagcaggtaggagggacggcgaaggaggaggcgcgtcaacgcgcgcgtgccacggcaaccggccggtaaacgtcagctcggcacgagggttgaacgggcgacgatgcgggcatgcggccgccgggctgctgcagttggtggccgcctgaagctgattcaacggtggggccagaccgtcagtgacttatagtcaaagctggtttcgactttcgactggaatcagtttaacttaaacaggatgtactcatttactcaaccagcctctcatgagttcttgagcaaccggcaggacaggtcagtcctctcaagcaatgcaaacgatgctactaccatcaggatagggtagtgccccatggggaacaaaagaaacaaacagttaagagaaactgcaaggcagaatttgcggcttttaacagctgaaaaccagcttagctaatagttgccacttaattaatataaaggttgctctctttctcacagattagaaaggcaaaaataacgagtctaggaaaaacatttttccccaattctgatttaagcagcaactgaaggctacacatcgtcgctcagcgtgtggaactgaacagagctcggctgacaataccagttgcctcaatgtaacgatcaacacagcgtgatatgcaactgctctcgctcccgctcaagcttgatcctggctttgtcacgcacttggcaaagcacttgtttccaacagtctgtaacaacaaaacaagagagaattacaaccatgtcatgtgtttaacaaagaagcaatgcctggaattggcatgttttatttcaaacactaccctttttctcatgtaatctgtattacatatatgtcatgtaaaccaacagtggcagaatcacttgatcagcaagactaagggtgagtttgaggagaaggtgattgaggagattgggaagatacgtaaaacgaggtgagccattagctcatgattaattgagtattaattattttaaatttcaaaaatggattaatatgatttttaaaagcaactttcctataggaaatttttacaaaaaacgcaccatttagtaatttggaaagcgtgcgcgcggaaaacgagatgttatctccctcaatgttacccgaacgaacgcagcctaattactcatatgtcaaacttcgtagtaatagtgtagcaacaggaagggtcaacttcaatgctaactttgtgaacacatattttacctttctggtcgtggcaggccagcacaagttaatagttctgactctatgttgagttcaaatatataatgaacacagaagtgaaagacatacaaaatgtcaccatagttttaagcaaaggaaaagcacttgaaatagaaaatgcaacagttagaagtatataccaaaactcaggcctgtattataaagtctaggtgactcgatgtccctggtccagtcaatttaaatagtttactattatatctattggttttataatatgcttaagtcatggatatgtactggatcctaagttccttctatcagtcctacaaggttgtggtcatcactagactggggagatcttacctcatcaagacaacattttaagtttccaaattcaatatgtattgtaaatgatagatgagtttgatgcacctattccaaatacgttgttacagttcaccaaagggtgtgctcaactgtgcttgctgcgcagccacagcagccagcatatcgatcaaccccaatttctcttggtacttaaagtgtgcattaagactgttaaatttatgctcttcaatcctcagttttcttgataaattcaagaaatcatcaccgtataaccgtatatgccaagtaaaaataacaaaagaaatcaacagatgagccaccacatccaattgtgtgattcaattggacatttggacgcaatgcacaccagtatgatcaacttgtatcagtatgcagattacaatcaatggatacagtgagcatgaaagtcacagcatgggcatgttgattccaatttaataatactttcttaagcggttccaagttaataatccttttcttggacaaaggaaatcaatttatgagttttagccatcctatgcaaacaataggacttactggagtgtaatgggattgagtatagatttaatcatacaagatacaaggatacagaaactaaaatccatcctatgccaacatgtttaaactgtatcgccctccaatccggtaaatggaactgttgtaacttgtagaacatcaaaccactctaacgaagctattgttaagcttgttgaaggtgctactgaatactgatgctcattactttagtactagaatacggaaaaccacaaaacaggaaactaattctacccccaaatattcgcttccgtagagtgctaccagcgaaatctagtgtcacctaaaccaagtatccacctacctaatgaatattcatccatacagattcgcattaacaaacgtgatacaagagaggaaacgatttgggtggggaggatctcacctcaaggaactcctgggcgtaggcctgagcgagctgcgccttgatctggtccatgagcgcctccgtattggggggcgacccggacgacgacgagaaggagtccatgccggcttcccaccttcttgattcccaagccttcgtcggcgaccggttgttgaagagcgctctccagcaacgacgattctccggcgcggcggggtgtgcgaagcggaggaggcgggcagagcggagtaataaaaccctagctttactggatcagaaccacgaatccacgattgggaggaaagggtagtaggcccacatttatcccccaagaaagagcccatatagtaattgggccgtacagcggaccatctctcgtggctatgtggatttaagccgaaaaaagtctactttgagtccttaaagtagtccgaatctaatttgtaccccttaatcagaaagttaggtaggacgactccccaaactattggaaccagtataatttgactccctcgaaggttttggaggacagtttcgctgatgcggtactttgacctagtataactggttgagttggtgtgtggggctacctttcttctcttcgttccctatcccctcctcaccttcctctccgcgggaagcatcagggcagcagatcgacggcaacagggggtgcacagcggcagtagcaagggagctaggccccgaaggaaaaccgcgcaccaccatcagacgtggcacccccacgttgggtcacgccactggcctcgataaagagccgtacgcatcggcattggtcgtggcaccatatcccaacctcccccggtagatggcggcggcatggagcggaaaaggggtagtaggggcggcagcgcgttgcgagcgattcgaggcgaaccgagcgacgacgcgacctcgtggcggagagcggcgatgtctctttctcccttcccacacaagtacacgattcgagatgaaccgagtgacgatgcagctgagtcggagcgcagcacgacttcgtggcggagagtggcacaactttgaggcattgcacaatgcggcccaaggaggagcaagcggatctaagcgggtcacgtcatcgacagccggaccacgccaccctccctgtggcgtcagcccataccactagagcacaccgtgccctccctgtggctcccgcgatgctcgaagccctcctcgtgaggggtgcacaaaagcttgaaactcatgagctaactcaactcgagtaaaactcgggtcgacttgagtagttaatgagtcgagttgagtttgaacttttacttgtttgcttaacgagccaactcgagctagctcatgagttacttggttagctcgctgagctcatgatgcattaagatagaaattgattgttcatattttgcaggtgtaaaagtcgtgaactcataattatacattatagcacaatcttatgagtcatgatacatagcatggcaatcataatctttggtcataaaatcacaaattatactgcatatgaattttaaaccatgtatttcggtgtaacgagtttagtgagtttaatgaatcaactcagacttttattgtgtcgagtcgagttccatttttaacttgttatgttaacgagtcgagccaagatagctctttaacttaacgagtttttacgagtcgaggtaagtcggcttgtgagccacccaacctcgtggcgtcggcccaggctgccgaagcacgccgcatgctccttgtggccgctgcgttgctcaagcaccgtcacgttgaggccctctcacagtctggctcctttccccgctgaccaccacccactgccctggagaaaaagagaaaataaaaaggaatgaagaaaatgtgacactaacactgagtcagccgattggactgggtctaagcaccatgtcagcgaaattaaaccacactccaaaacggttaagggagtcaaattataccaatttcaatagttagggtagtcatccggttttccgattaaggggtacgaataggattgtacctacttttttaagggagttaaagtagactttttgcatttaagccttggaatggcctacgtactcacatataaggaataagttcatctgaggtcccttaacttgtcaacgaatccgattttcatccttgaaccgaaaaaccagatacaacgggtccctcaactatcaaaaccggtgcagattaggtccttcagcggtttagatagcggttttggatggcgtggcgcctacgtggctaatttgatttgttttcatctgacgtggcattgacgtggcgctgacgtggcaattagatttgaaaaaataataaaacccatgggacccatatgtcagtttcacatataaaataataataaatggtgggacccacgtgggccccacatgtcatatctatcctcttgtaacatcccggcctagggcttaataagattaatagaatactcatatcaacaagttgcaacttcttttccggaagccaatctccaaagaactccagggttaagcgtgcttagcctggagcaatttgggatggttcccgggtgcacacgagtgaggacaaagtgttgcagaaaagacatgtgttggtctgtgaggtttcacgggcgcgtgtgtcgcagttgcgcaggcatggtgcgcatggctggtgtagatcgggagtggttacacagcatggcacatgcgctgggtggccaagagaggacgttcctggcctggggttgatcgacgggggcgtcgatctctcttaagggggttaagcgtgcttggcctggagcaatttgggatgggtgaccgaccgggaaattcttcccgggtgcacacgagtgaggacaaagtgttgcagaaaagacatgtgttagtctgtgcccccgtcgatctctcttaagggggttaagcatgcttggcctggagcaatttgggatgggtgaccgaccgggaaattcttcccgggtgcacacgagtgaggacaaagtgttgcagaaaagacatgtgttagtctgtgagggcagtctatgagctataaaagctaccagatgtaagtgggcccggcctgggagaggcgggtcgttacacctcttcacctttcaccttcccctttaccctttctctctcgtgcatggcagcgacggcacgcgaggcggaggagggaggggcgcgggggtggtggcctgccggcggcggtcgcccctgccctggagcgacacgggggtggagaaagtttctcctcttatgtccacatctgtagagaagaggttaaatcaaggaaggttgcatcttgttcttgactgattaattggtgcgccataatctgcaggtaaactggttcttgcctgacacttgtcttgtccgggtggccaccgtggggcagcctggtgccatgagaaggatcaccgttcactacgtgaatttgctgccggtcgccggcgccggagaagcacacgtcgatggcgccgcgaattattccggcaaggtacgcacgacggattgattgttcgattgattggttgaccgacgagatgaattggttggtttggtttgttgggggactcgcagcagaggagcagtgtgatggagctcatccatcggtggtcgatggacatcaatgcctgggaggcgaaggagcggctggaccagaagctgaggaaccagatggaagccgtcatcaagaggtaactgatgatgcaaagatcaaatcatttgtttttttgaaaagaagaaagatggattgaaattttgctgaattgtttttcgtcgtttcgtttctgcaggcatcacagcacaggaagcatcaagctgaacagagccagcagtggaggggggagatcgacagtgacggcggcgatgggggtgcagagggcggtgtactcgaagaaaggggtgatgcggcggctgatgcggtggagtcgactgcggtgggacgcggcggagcaggcggagtgcacgtgtgcctagaggagttctccgccggcgacgccatggcccacctcccctacggccgccactttcactgggcctgcgcactccctggctcgaggctggcgccgcaccccgctcctgcccattctgccgcaccgtcgtcgacacgccggggaaggggaagtggaaggggaaggtgaaaggtgaagaggatagatatgacatgtggggcccacgtgggtcccaccatttattattattttatatgtgaaactgacatatgggtcccatgggttttattattttttcaaatctaattgacacatcagcgccacgtcaatgccacgtcagatgaagacaagtcaaattagccacgtaggcgccacgtcatccaaaaccgccatctaaaccgctgaaggacctaatctgcactggttttgatagttgagggacccgttgtatctggtttttcggttcaaggacgaaaatcggattcgttgacaagttaagagacctcagatgaacttattcccacatataatgacgggcccatttcatgttcgaaataggaagtttttggactatacaaagccgattttgctaaacatctcccgcgatttttttcctggcatttgatgtttttttggccacatgatctttgcaccaagatttgtgcagcaattgccgtggatgaggtcgacagggagtcaaggtgtgttggtattgccgtgtgaataaaatacgtgaagtatgtaattttcatatgtcaaattaagaaatatctctatgttaatttacatgtcaaattaagtactaatcgatacaacaaatttaacatatcttaaacatctaaataaaaattgatttctttaaccattgaaaaattaagatatttgaaactaaaataaaaaataaaaataaacttaaaattacagtcctatataactaaaattatatttgtaaatttagttgatttgacatgtaagtgcactgtaattttgataaaaataatgggtaagtaaatatgtacttattaaattctttaaaatataaaattacagtcttatataactaaaattacatttataaatttagttgatttgacatgtaagtgcactgtaatcttgataaaaataatatgtaagtaaatatgtacttattattttctttaaaatataaaattacagtcttatataactaaaattacatttgtaaatttagttgatttgaaatgtaagtgtactgtaattttgttaaaaataatatgtacgtaaatatgtacttattattttctttaaaatataaaattacagtcttatataactaaaattacatttgtaaatttagttgatttgacatgtaagtgcactgtaattttaataaaaatgttgtgtaagtaaatttgtattaattattttattttgtagtccgttggatgtaaatccaaggaaagaaaaaatctgggtgattttttctcaaaaatcacccgagtgatgtataggcagtcccatacaaagccactagtgtactactactgtatatatatatgagattctgacgatttccatgagaaaaccaggagattgtcctaccttactctgcgcgtgcaatacatccatcactcaatccatccaagtccagacattctggcaactaggcctagtcacgatcacgggaacctgactacaaatccagattcatcaaacacatcaaccagacgattctggattataattattttccgccgggccctggattataattatcgatacagcatcactgatcaggatcaggcattggcgcattgcctgttgttacagtaaaagaacagtaaaaccattggtgtacctgtaccggacgccgggcgagcaatggagagggttgctagttgctactgggctgtacagcagaaggcaggcagcgccacagcgcgcggcgtgtgtgcgaccccgcttcggcgcggcatgcaaagcctgcggcatcgtcgtggcaggggaggggagtggagaaggggggaccccgcctgcctcccggaaccatccaaatgcaaagttcaaaggccctgtagccagagcgcgcgtcgtagcgaaagccagagcgagagcgaggtggttctcgccatgcatgcgcgcgggggcggtcgcgtggggggcgacgacgtctcgcgcctgcaggccgcgcagctaagctgcagtccttgttgttgtggtcatcactcactcacgcatgcatatggctgggctgtggctagcgaacgacgacgagcgagctagggcggtttgccggtgtggtggccactgccgtggcatgaagtagtattcacctcgccgtggtttgatcctggctagctgtccgcctgatttttcacgtaatcaccaacctaacgttagaaaacgatatgaaaacaaacgataaaaaacaatatatcgttcacggaagagacgagatttaacgtagaaaacccttccaaagcaaaagagaaaaaaccacgagcgtcagccagtaaaatatcttcacaatatcggggtgaggttacaacaccgaacgacggcttacaagaggtatatatatgatatgaaattctaaaagggatgacgatccgtacctctgcttcgctctggcccagcctctggcatctactggcctccacttcacctttacactactagaaaacgcatttttcccaacgcaggggtctttttttcgcaggcggacatgattcttatagccaaatgaccgcctaaaaaatataaatcggggtgaagttcgctgtccgcctgcgagaatctattttcgcaggcggaccacttaagcggcgcattttcacaggcagactacttaagcggcgcctgcgaaaatagattttcgcaggcgaaccttatgtagtccgactgcaaaaatcgtacctacccaaaaaaaaaccccacccttatcttctcatcccacccctcccaccactcaactctctctctctctccttctccctccactgactcagtctcactgactctcctctccctcactgactctcctctcctctcatctccggcggcgcggcggggccgacgacggcgcggggcggcggcggcggcggcgcggggcgcgtggccggcggcgtctcccctcgccccctccctcctagatctggccggagggaggggggaggccagcgagggcgacggcggcaacgacggcgcggggcggctggcggcgtctcccctcgccccctccctcctagatctggccggaggagggaggggggggcggcgagggcgacggcgacgacgacggcggcgacggcgcacgtggtgcggcgtgggccggccggcggcgtctcccctccctccctccctcgcagatctggccggaggagggaggggggaggccaacggcggcgaggacggcgtggagcagcggcggcgacgacgacgacggcggcagcggcggcgacggcggcgacgacgacggcggcggcgacggcggcgacgacgacggcggcggcggctcccctcccctcccctctcagatccggccgggggaggggggcggtggcgaggcgcgtggcggcggcggtgcggcaattttttttgttcgtttttttgcattttcgcagacgggccgttgccccgactgcgaaaattatcgattttcacagtcgttgtgttgcaggcggacctccctcccgcctgcgaaaattagttttggccgcttgaaaaaattagtttttagtagtgttataaagtacaaataaatttggatcacaactcaacccctaacgcccggatcaaaccactgttcgattctttcttagccgaagttttgcgatgttggtgggctcgacggatgggagggcctgctttactggagacggccgggtgggcccctcctgcgctccggttaactgcgcccatgctatgtaggtttcggtggtgtggtggcgccatcgtttcccggtctggagaccggaactcaccacctccgtctcgctctcttatcccctcgtgtcgtccggccggggtccggccccgtggacaggttagtgtttacccactttgcgatccttttttctcgttctctttcgtcttttcgagcagcagcagccgcagccgcgcgcgtgacggggacgggccatcatgtgcatatccatcgttcgtgcgcgcatgatagatgcttctgcgtttgccggtgttgcgctgccccgtcttaatgcaaatatgcaatcataatgttcgcgtggatcatgattggttggttgattacaacgtgcactgcgggcacggcgtgctaccactgtacacgcgtacatcaatacaaagcgtttcccaaaccgccgggaccggggttacggcgccccggcggtaagcacggttaccacgcggtaaccgtgaaaaaccatgtaaaatttatcacaaatttaaattattttttaaatttatttaaatttaaggaggttaccgcggtatttatattgccgtaccccgcggtaaggccggtaaccgcgcggttaccgacggtaagggaaacccatacatatatcactcagatctacgagaggatctccgaaccgcgcgagatcagtgatcgattgagagttagatcgaaaagatgtgcagatgcttgagttcagtatatatattaaagcacaacacacgttatattataccgtaaaagttttccttcttttttgattgttgtgaattaatgcagtgtatatctatctatttaatctaataaaaatatgagggaaagtaggctggattgattccttggttcgtgcatgacagcggggaggtgaagaacatctcctgttctagatgcgaccaatttgatcctccgtgtcaatcatatatatcatttggtatgggccatgccacctcttctcctcagtcctctgcgtgtgctttagccggcaggctagcttgcgcgatgtggtccaaaactaaagacagcatccacatctcccacctcctaccttcggcagcgacgtttgccggtcggccggccgccggaggacggatgtcccttcaatctgatcgatcccctctccggcatcacagacgaatacagcgtattagatatttagataggcagctatcagctggctatagatcgatgctctttctgaagtccgagaaaatgaagtgcatgagtacatcgtctgtactggggtattaatttatcaaccccaaaccctgctgaccttcagtgagagagagagagagagagctgcagtagttgtgtccatggatgggagagagagcgagcatgggaacaaaagcatgtacaagccaggtatgcatgccgatccgcctgcgcttctctgcgtgcacactacggctggtgatgggagcgctggaaagctgaagacgcgagcctgcgctcaagactacttgtcgttgacatgaactgacagttcgtttgtttctttctacatgcagtgtcagtttatgtatggccattgtgctcagccactcggagaggatctacatatataggagtatatatcgatccaacctctatacggaaacttgcaggcagaatagctgtagtatcttttctttagctgtacaaaatatagttgtcgcatataaatagacagcacatgtaattttggtttacagtagatagcaatagcctaaagatatttgctagctaagatttaataaccttccaaatgagtcgtcagttgaaggatttcaacaattgagagccgcgccattgatatgtgcaattaacttaaccaatggaaattgatactccctccatcctataatataagggattttaagtttttgcttacactgtttgaccattcgtcttattcaaaaaaattttacaattattatttattttctttgtgacttactttattattccaagtactttaagcacaacttttcgtttttatatttgcacaaatttgttgaataagacgagtggtcaaacattgcaaacaaaaactcaaaatctcttatattataggacggagggagtaataaatatttatcatgttataacttataagaaattaaaccaaaactggcaacactggcaacaatgacggtattggtagctaaacacagacgaacaccatagaagatccaacctttatgatggtaccgaagcatgacatttgtgaatgaggtccagcagaagctagcctacatccctactggttataggcatatagcttaatcggccatcgactagcgtaattatagtgtatctgagtatcacacttctcttagatctagtacaattacgatgtatctgagtatctacgaccttcgaatagcttggctgtcgcccagtagtatctatacctatgctatagtcaccatgttaccatgcagttaaaacactacaacaaaacttgtaataggagacgcaattatatgtgtcggttcatctaaaacagcacatatgaggcttttcccgctttcccaacccctcatgtggatctaaaataaaaaaatcggcacctataacaccttataagtgccggtttattaaacaattgcgctttagggatggagctgagctgaacacatatttctctgtttttttaagtcttcctcagtctaaagtcctaatcttatgttctcccaaccaccccctctctctcatactccatccccattcgctctctccccacctcaccaagttggcgagcgatgcatgcaacgacgatggctcgtctctcttgctgacgtgacgacggtggttctactacctcggtgacggcccgcctattctcagcgatgccatggcagtgtcaggtcctcctcatgctgccgtcagacatggcctcggctccgtctactggatttgatggtgatggcgatagaattggcacctacgccaaattcagcgggcccaagctcaggggtctccgaatatggccccagtatcatctcatctaccgcaccaagaggggttgccataaccacatcgcctcggtggctaggtccccagatttgacctcaggcaacggcaagacgcaacgtcaatgctccactattgtaacgtcccgtcttcccccaggccgggcccacttacatctgatagctttcataggtcatagactgccctcacagaccaacacatgtcttttctgcacactttgtcctcactcgtgtgcacccgggaagaatttcccggtcggtcacccatcccaaattgctccaggccaagcacgcttaaccctggagttctttggagattggcttccggaaaagaagttgcaacttgttgatatgagtattctattaattctattaagccctaggccgggatgttacaactatgaagagcttcaagggcctcgtgaggtaggactcctccttgaactggccccctccctgttgcggggattccctagcaacaacggcgaggacctcaactgctcaccatcatccagcaaccaggcccaaggcccgattacttcgtctccaggtggtgctctcctttgcgtttttgtcttgggatttctcgatttttgtggaaagggaaatgtatgggagtttgtgttctagggcctatgagttcttgttggatctgaatatgaactcttgtgtgcaatgtagctagcttattgttgttgatgtagggccttatatgtgatgaatgttcttgatttgtttttccatgaaatacaatggacgttcttgatttttctcccatggcttcttaatctatgccatggatgtggatatggggggatgtgctgctcgaagcatcggcacaattcatcgagccgactccctttttttttctccgtcataggcctcacatgtgttgttgtgcctgttttgaaatcgacaccaaaagcatggctcatcagtgccggttgcagaaaccagcacatatatggacttatagaccgacactgtaatagcaggcccttcggaactgcacaacccaacccatccaacagacgggcatacttacacatactatcccatttatactttcatcctcacttcgtgtaaaacggttaagccaagagtgacatggttggagagacaagctcttataagttggttctatacttgctaaactagcaagctggtattaaacatgcacacatagctctcatgcgacacgtaagtcttatcctaattgggtcaggatgtaccatacatacataaggccatgaaagactttagaacacgctaagttgttatgaatacctgaattcctagtttgggcttgtaaataatgaaatggcactaaatgtcttggtaatgagatatattatcgctattgggggagcggctttgccctcgtcctagggaggcagttgcccccttttcttctctcttttgtctctgtctgtgcatctcaagaccggcttcggacaaggggcccctaagaaagcctttggaggggctttggggaagaaagaggccccccgtaacccataaaaatgcctcggagaggggcaccctgaaggagcctacggggtggcttccccgacacggggctcccaaataaggcattccccacggtggggagatggcaacaacattgatggggcattcaaagggcaggctcaaccactcctgacatccacgaggaaaggccctaagcaatgtatacatttcgctctttttccttgtgctcgatccctattggattctattccaacataccctattgcactctttctccttgtgctcgatcccttttggattctgttccaacatacctccatttattaaatagatgacgtcattgacttttagacacacatttgatcatttataatattaattttttacataattataatttattttgcagcgagttattgtgccactaaaaagtattataaacatggtttatatcttatacatttgcatacaatttttaaattagatgaatggttaaatatgtgtccgaaagttaatgatggtctctattaataaatagaggaagtatatgctatgtaactttactttagcacacggcagtatataggaatctactgaaatgaattaaggtcatcacacacgaaatttcgattactgatcagtaccaaatggcagctgggatcacagattagattcagaacaattatactaattcagagtaattaaggatataaaccttcaataaatagaaatccttatttatatagatcaagtaacttgcactggaagcacaaatttcttaactgtaatagatcaagttatggtaaaaaaaacgtaagttatatacacacactcgcgcgtacaaaaattaattttcacccaagtaattaattcatcagagaatatatgcaggacttgagttgcatatatactccctccgtcatctaatataagggattttgacattttgcttgtcctgtttaaccattcgtcttatttaattttttttagaattattatttatttttacttattttattatccaaattactttaagcgcagcttttcgttttttatattttgcacaaatttttttaataagatgagtggtcaaatagtgcaagcaaaatatcaaaatcccttatattaagggacggagagggagtagttattattttcagtttttcaccctgataaataaaaaatgcagaatcatgatgggcaataatgcataatgcacatctcatgcaaacactgcggttgtcacaaaactaaaccacaattaacaccagtacacacacatgtacactaacccatatatttatcgatgcggttcgttagccatatgattcccctcgtaactagtaccacatgatcgactagtatgcagaatttaagtatatatatatatatataaataacgatgtcttgcttaattttgacacatagtagaatttaagtatgcagagtatagctagctagcacttagggcgctccctttgacatatactatgcaggaatggtaaaacacataaatagaaaaaaaacacaacattttgggacgaatgcatatgcaaaacggatgaatacacaaaacatatatatagaaacacggaaatgggcgtaaggtgtttgatagactcttccaattagaaaaacatatgatttagattagagagatatatagactcaatagaaatcggaaaactccaattcgtttcttaaaagattaggtaagaatactctataggattaaatcttaaaaaatttcttcacataccatttgtctcgagggaggtcttaaaagatgtttctgctgggtgctggttaagagagacagtttacacttttacagccgcctgccatctctgccatagtagttcaaaggcattgatcagataaggaagagtactcgtatatatatgcggctatatacgcgcgctgcccaggcaggcagcacgccaaatatgcccgtacctcactattactacacagtgaaaccagacgttgcagagcctgaagaaagccccccacttctctgactatctgaacatcacccatgcataagctcatcatcgccctcgctctcacagtcacatgcatgcatgtatgtgtgtacgtatatctgcagttatgcaatgtgtaactggcccatgcatatgtactatcagccagggagaacaggctcgatcttttaatgctactttaatttcattattttttttatatactgttgctatgtggatatatattgtacacatacctgtatcaatatatgcatcagtgcatgtgttccctccgtacgttttagttgcaaaaagaatagccaaagattaacattttgttttatattccaagtttcccatatttctcttctagatccctccaccatcctccatctttaattacaattttatacacacacacacacacacctatcattaactcattatgtatgcatgagatgatgagatattattgaggaatgctttgctagattatctaaattgaaagtacagttgtcttggtatatgcatttttaaatggcaaaatttgccacaggacatgcaaaaaatgtgtaattggttgtaggacaccggtcgcattattttattatttccgggtcaaaagaggtgagatatttttctaaatgcccagattgcccttctctttccttccttttctcttactctgtccttctttcccccttcttgttgatttcgccgggaacggcatagcagcctcaaagcagcggtggggcgaggtcggcgcggcgtggtgcggaatcaccagcggccggggcggtcgatggcatggcgcgaccatggaggagtggtgttcggccagatcgatagcgggcaggcgacgacagtgccggtgcggtggggcgcggccgggaggcagcaccaagcgtaggcggggaggctacgatgggtcccggcatcaccaccgctacgatggccagtgcccttgctcccttcggtgcgcttgacgagtgccgacgactgcggcgggttcagatcggcgccgacgaagaaggggtgcgatctccctctccggtgcaccatttttcggggtccttgaggggagatggagaggaggatgaggcgaagatgctggcgcgacagcttggcccggcttggtccagataagtgggaatgtcgatgatgtcgctgcggcggtgcgcaaagcacgctccagagctccggtgggcacaacagcattcccgtcgattggctgcacgaatcgagaggttgtcaaagcaagatttgatcggcatggagagaagataatagaacatgaattagataggaacggagatagctcgttggtgatcagcggcgtcctccttctcagcggccgacgacgaaagataggtggagagggagagctggagctctcttcctcggtttgctttgtgtggaaatgaagtggagtagatggtgatgcagtagggacgagatgaagactcgcctcagcattttgaggcgttgacacgtcgtgcacacgcgtcgaactcagccggcgccgatctctctctcggctgtctctggtcgatctctctcccatcgcgtgctagctcatgtcgcttggcccaacctcccccaaacacgacgagctgaggaggctattctccaggttcggcaagatcgagagggagaagaagataagggcaaaactgtcattttacattgtttctctctcatcaattgaccgaatattatattttaatgtgtccaatgtcctgtagcaaattaccacatttttggagtgtcctcgggcaaattcacgtctttagggtgttcaacagctaattacacattttttgagtgtcctgtagcaaattttgcctttttaaatttgtcaagggtgtatcacagagctttgtcaacatagatcaatcccacttaagtgccatacacatgcatgtcaatgagaaatcaatatgtgatctataaaaaaattctatattccaaatatatatactttcttgatttctcaagtgtaattagatatatttgtgcaacatgtcaatcagctctgtaatgaagtgtttgttctcaattaatctctactccctccgtccctaaatataagggattt

SEQ ID NO: 7937 - DNA, 3316 bp, Oryza sativa
aaacagttgccacagaagcatgagcatgtcatatattgccgactttccagaaggcaaaggaacttgtatgaagatttcattgcagctcagagacacaggcaacattggcaagtggaaattattttggcatgattagcatcattatgcagcttagaaaggtttgtaaccatccagatctttttgaaggccgtccaattatcagctcttttgacatggcagggatcaacatgcaaatcagctcttctgttggcatggtccttgataaaggcccattttctcaggttgacctgtcagatatgaattttgtatttactcaaaatgaatataatatgacttcttgggaggaagatgaggttgctgccattttttctccaagcataaccctcaggggttctggcatttctcgctctactaatgatggtcagagaagcaatgggacaaatatttttgaagagattcacaattctttgtgggaggagagaataaaagaagctaatgaaagagcagcttccattgcatggtggaatagggtaagatgccagaagaggcctgtttatggcacaaatattcgggaggttttgaccataaagcatcctgtgtctgatattctcgagaagaagaagaaccctttatgccacatggaattttcatcaagcctagcaaatcttgttctatcatcggtggatcgcttcaagacaatgcttgattttattgagtcatttacttttgcaattcctgctgcacgagcgcctgcaccattattctggtgcaacaaagggaaatctcctgttcttattgaaccagcatacagagagaaatgcatgaatgagttttctcctgttttctctcctataaggcctgcgattgttcgccgtcaagtgtactttcctgacaggcgtttgatccagtttgactgtggaaagttgcaggaacttgctattttgttgaggcgtttgaagtcagaaggacacagggccttgatatttactcagatgactaagatgcttgatatactggaggagttcattaatctatatgggtatacgtatttgcggttagatggatcaacccagccagaagagaggcagacactgatgcagaggtttaatactaacccaaagttttttctttttatcttatccactcgtagtggtggtgtgggaatcaacctagtaggtgcagacactgtcattttctatgatagtgactggaatcctgcaatggaccaacaggcccaagacagatgccacaggataggtcaaactcgtgaagttcacatctatagactgatcagtgagagcactatagaggagaatatactcaagaaagccaatcagaagcgagctcttgatgatctagtgatacaacgcggtagctacaatacagagttcttcaagaagcttgatcctatggaattcttttctgggcactcatcacttcatgcagagaatcagcagaaggattgctctctgtctgctggaccctcaaacggaactaatctggcgctgtcaaatgttgatgttgaagcagctattagacaggcagaagatgaagctgactatatggctctcaagaggctggagcaggaagaggccgtggacaatcaagagttcagcgaggaggctgctggaagacttgaggaggatgatcttgtaaacgaggatgacactaaacctgatgaacacaccaatgaagagcataaatatcagtgttctgatttggtcaaggacaagcatgttgctttatctataaatcaattagatgaagaaaaggctataactttggctggaggagatggagatattgacatgcttgctgatgttaagcagatggctgctgcagctgctgcagcaggtcaagcaagttcgtcttttgaaaatcagctccggccaattgatagatatgccatgcggtttttggaactctgggatccaataattgataaagctgctataaactatcaggtcaatgttgaagaggaagaatgggaacttgaacgcattgaaaaactcaaagaagatttagaagcagaaattgatgaagaccaggaaccactttcttatgagtgtaagtgtttttatgtttatgttgacccaacagcccatagcacttacgaaaaaagtttcatctcatatttgatttatgcaacttagttttaggtagttgtctctgctatactcacccttccttgtattatgctttgttgtgttgacacatcatcttaactgcagcatgggatgttgattttgctactacagcatatcggcaacatgttgaggctctagctcaaaaacaggtcagttcatacttctattcttgtgttttcctcttggggctagtggctaattatgtcacctgatgtgatacccacagttgtttgaggaacaagaaagacaagcccgtgaagcagcaaaagagttggaggaaaagaatgataataggtatagactgagaaattgtgctctcactttggtgttcattgtttttggctcttaggccctgttcgatagtggggataacctgagcttattagctccacgcaaaatgatgcagatgattagggtatgattaattgagtattaactaccataaacttaaaaatagatttatttgttttttaagaaactttgatatagaaagtttttgcaaaaacacaccgtttagcagttcgggaagcgtgctcatgataaacgagggagtagctccccctagaagcacattagaatggggccttagtgggtagatgcatatactccctctgcttttttattatctaacagcgggcactattcattttcacactgtgatcactcatcttttttcaataattttacaaatgaaaagatgtcatgttattaaagtgtactgtatcgtaagcataaacaagaaagttcaattcaccattaattctttaatcctaaacttcaacaagaaactttaatcctaaactattaatcattttaataattttgaccattaatagttcctcgcaaaaaaaaaaaggtcaaagtagaaacagtagtagtcaatgttgacagtcatgaaaacagagggagcttttgtgctgttttgcacttcactttggtgctcatctgtagggttacatggtatgcctgcattttctttccaattggttttagatgtgtccatatgctttcatctatttactgtatcctaaaagaataacttttgtcaatctttgacagcactcaacgaaaaaagtcaaaaaagaacaagaagaaggcagcgaagttcaaatctttgaagaaaggacgtttatcatctgagtcagaggttatggttgaggaaacatcag

SEQ ID NO: 7938 - DNA, 1155 bp, Oryza sativa
atattgatcatgtggcatgtttcgaattgagtcatttcagacttattttagtgagtgagaaatgagaacagcgagaaccatggtaaaaatgtaaaatttgtaaaaatttaaggttgtcagcatattgagaactatcccactaactactcccttcgtccctaaataagtgtagttttagctagtcaaagacatattaaggggtcaaaagactactaagcccttcattaatatggagagaaagtgagtaggatgagggagtactattggttcgatgactaaaatgagaagaaaaggatgtaggtggtattaaaaaggtctaatgctagtggaccactctaaaactacactcttttagggacgaattcttatgctaaaaactagacttatttagggatggagggagtagatgacatgagtaaactgacctcagatactttcaagatagccttcccagtcccagaaggaaccttctcactgtttgaattgtctgttgctgataagatgtgcttgcagactaattcccggaatctctcacagcaatgcacagggtgacggtatcttcctctataaaatgcaccacctggtacagaatgaagagaatcactagccagttcccaaagagggccgtactcatttacagttgcacaaagaacagcatcttcctcagttgtccacgagtctgaagcacaatcgcgagaccataggctcttcttcttcaatctctcaggcttgattaccatgacacgctttactggcatgcatgggacagaaattcggccatcactcttaattcttgcccccgatttgggatcagaatcattaagttcatctttcaacttaagctgcttgccttcaagaaaatgcttaggtgataaggcctcggaactgaaactcgatttaggggctttcttgagcttcttcaggcttctgctattgctgttctcttcctcattggttgacattatcctcttatgcttgttagaatgatggtgtgctgattcatcgctcattagctctggtgagggtgcattgtcatcaatgctcatagtatctactgatgtttcctcaaccataacctctgactcagatgataaacgtcctttcttcaaagatttgaacttcgctgccttcttcttgttcttttttgactttttt

SEQ ID NO: 7939 - DNA, 19447 bp, Oryza sativa
catgcaccgttgcatctaccttccttgcaaacaacccctccccccatgtcaattttcgcaccccggatttaattcctcagccttttaaaaaaatttccatccatcgatctgcacgtgatggcgattgattctgcacactatagcagcaagtttacctgtagatgtgtagagccatctggagaaggatgcataaactaatcatcaacggcgacaaaagtatacaattcgctggtggcattgggggttaagctagcctcgaatgtatacttcacctgatctagagacagatacagatatatcatctggttccctgcaagactagacgacgcgttcgatcgtgggcacgcgattccggtttggaaatgcgtggcctcgtcgtcaaacccaacgcaaatgcgaccgaaatgtcaatcacaccaaacccacacaaacgcaacacaccacaccactactactcctatactaatctctttttgtcagaaagttcgtggtattgcatacctacaccggatttccggattggtttgatccccgttgtttaattaggccggtacgttgcaatcgcgaagaaacggccggtcaaatccggcgtggccaggacgcggccacacacgcgccacatcacacaccgagacgtacgtacaggcagcttcgcggcgccggcccggcgcgttggtggcgacgacgactgagagctacgggagctatagtgtgcgctgtttcagataacgcgccggttaggtctccgacgcgaacgcatgcagagaggggttaagtgcgggcgaaggaaaggcgggggaagatgacgacgacgacgtactcccatcgatcgatgccaatgaaatgatccgtccacggccatgcctgcactgcactgcaacctctctcttttctttcgcaagtgttccgggtgggcatccatccaactgggggcgtggcatgtgatgcctcgttgctcctttcgaccgccgctgggtcccctctctccctccatagcttggaagcacgcacgtaatactagcacctaactgttgaagatcgatcgatttttgcaattcttccggagcggaattgttgctagtggttgttgctgtcagaggcaagcgaccggcgcctagctagctccgatcgggattcagatcggtcgaccgagaccgatctgttggggtcttggtatgtacgtgcgtgtacatgttagttgatcgtttagtaactggtagttggagcttgtttcgcttgctcaacaatgacttcgtttaattatccatgcagagaaagaaaattagtgcatgtacaatggttgttaatagtggtctcttagcgttgctaattaggaatacttgttgacatggaggaaagagaaagaggagagacaaaacatcgttgttatgcatgacaatggcttaacaacgactcttagtcactataatatgaaaatatggttgcatgaggatataaatatggaaagaatattaacaaaaggaatattttttgagttaatgattaaagcctttgtcatctcaactattgtaaagatatggtctctaaataatcttatattgtttaagagaccatacccgtctctaccattgaacatgccctaagtccctgacagagacggtaaccaaactaaaaaaacgatctatccggatggattgtaaagacggattggcggtacgccatataagtaccttcaaaatcccctgcatgccggaccttgtcaaatttcacatgcatgtacttgagtgaggttaatggaaccagccaaccactaggattcaatcgaaacttcagcgcggattacatcgatctcgatcgtgttcacatgttgatctagtaccggcgttcatgatctttcagcaaaagcgatcgaatacgatggatgttacagttcacgaccgtggtggtcgcgtcaaatgtgacaacgaactctcctcccgtcttgacatttgaagcttggaccagggcctacctgtcactcgccggcaatgtacattgggggcgagccctgttgctatccgtctctccatatgcttggaacccgtgggtttgcaagcaactagctagagagcaagtttactagtatagccaactattaattttaaataatctatagttaattaaatagacaattcacacaatagttatatataaacatatactacactattaatacatggtcccacctatcatatatacactatgtcttaagtccgtgctgtaactggttataaatctgtatcctactgccctcttctctcttctcttttatctcatcgatatatgtttatagctgatttatagtctgctattgtacccctcctagtactaatataaaacacatatgtacgaatacctagtaatattatattccctctatttcatattataataactgctttaactttttaagtcaaacgtctttaaagtttgataaattttatagaaaaatatagtaatacttgtagcaccaaattattacatttaacattgaacatattttgatattttttttgtttcgtgttaaaaatattgctatatttttctataaaattgatcaaacataaataagtttgactaaaaaagttaaaacgacttataatatgaaacgattgtagtacacttaatattgtctccccgtttctaaatgtatattgctattaatgtttagacatgatttgactgtttgtcttacttaaaaaatacataaattaaatattatttttatgttgagtacattcaaccaaactatggtaaactataaatttaagatgatatatcacaaaactatagatttaataccaaatttatcacataacttgaaatttttcaccaaactacagatctagtaatagttttgtgatatttaaactgaaacatgtagtttatgataaatttaatgtttaattaatatttttgtgatacaccattttaatctatagttttataatagttttgtcgaaatatccatagtttttatgaaatttactctttttatgttaaatgtactttaagcatgccattttgttcgtattcacaacagttatgtaacaagatgaataattaaatgttacatccaaagtcaacaacgtcatatatttataagtataaaaaatatttttctacaagtcaaaatttagtattggatactctaaaaatgtgatgtctaccggagggcgggaaactattttaaactctcgagggacatcccttcgttattagcattccatccaaatggttagattaatatgtgataattaaatcactccacaaacatgcactaccatatttaatgtctacaagttgcaacgaacaaaaatattttttgactgcgaatatacgttaactagccatagtttaatttgtttttccgttgcaacatgtagaggttaaatttaaactttcatatttgtggagtgatttatgatatattaatatatctttttgacttttttcaaaaaattttataacaatttagataacatacaaataacgaggggacgtccccttagagagtttataattcattcccatcggaggacaccctaaaaatgtagctttggttgtagacacctaaccaaacatgctttttttttctctaggacaacgcctgcaatattatattatttccgactattttagagggagaatcaatgtgaaatgatgagaataatgttcctagaaaaaaacttatgtatttaattggaccaagccacctcgacactgtcacgtttacaactgtagtcgaaccacacctcaaattttgaggggggtatgctagttattttgcaaatttcctctatccaagttagttaaaaatgataaaataatattaccctcattttcatgcattaaagaaccatagatttgatgtgttcatgggcatagacacatttttagggtattaacgagtaaataccacgtttttttttgcggggaaaataccacgttcttagctagtgtggtgttgtaaatttttctctttttttttgagaggaataaaattttcttttttatacaactatagtagtagcctcgcttgatgtaaaactcaaggaatcgcaaggcatgcatgacccagacttatgtttctttgtacgagtgcatgcatgcacggttcaaccttagtttgagtcatccgagatgtattgctcggaacagccgtcccaaatggctggcaattaagctaatctaaacctgcaaaaaaggcgtacgtatggatgcatggatgcggttcgatcgtgttgcccccgtacggtttcaccacccgtcctgttttcctgcgtgtaaattgctcgccttttgcgtgttcttttcctgagaatataatcatgcacgcacaacgcctcgctttcccctgtgtaaattgctgccgcctgcgtcgtgtcgaccgatcgattgactttaaacaagaggagaattggagcgcaaaggcaggcgaggaagatggcagcagaagtggagtggcgagtgctgtgttggtgttgccgcctgcctggtgcctgccggctgctagatctggtctgtggtcgcccaatcaatctcccccgtctccttccctgcagattcccccccacgtctctcatattttttttgcccggtttctctcatcgctagctctcgcgccgtccgtttccgcgacgcctttctttttaacctgtggagactggaggagagcgctgctgccgtgccgagatgtgaacggaatcgcgatacggtgcaagcaagcgagtgcccccggtcgtgctcggctcgtacgcgcggacacgcgcggcgcggccggcctcgggttggacgagcgatgggtgcagcagatgttgtcacgcatcaccgctggatggatggacccagggggtagctgtgacgggagcaacgaataaggcgtgatgaaccgtagccgcgcaagcaattgcacaccggggttgttccattccatctcaacgtcattcaattttccccggattttctgcgacgtcgttcggttggtttggagcagcgccaccgctagctatacgcgccgggggccggccggacgtccggtgtgatgctttaccttacaccagtacaccactcagaggagaaaaaaaatgaattattactgtttatttatttattacctttatttatttctgaaatttgtgaggtgggtgactttgccgtatgaccagggtaagtggagggtgtaagggatggaatgtgtgtggctcctaacctagattcactcgagtaacacaaggctaagcttttatttttcttttcttgattacatgaaagacacatgtacagaatattttgcacgtacattacattcgcatcatgcacctgcaagagtgcaagggcatctctttatcacaggtttaaagaaaccatggttatcaataaatccctagcattactaaattcttattgaaagtgtagccttatacgtgtaagccattcccaacccaatgactagaatggtgtccatagcattaaataagctatcacctaagatgaaaaatgatgtggcaagtgaataaatgaagaaatagaagaaaaccatgtcttgcatgagacatggttcctacacaacatccaagatatcatgtgagataagtagcattaaatttaagtatgtaatagtagtgattgcattggaagagtagtgtctagtactagttttcttgatgatgtggagtttatggaaaccatgtctaatattttaggttgagaatggcctaatattcactagctaagttcttagtgggaaccacaaccatatatagattttgtagggcttttataccaattaatgaatcagttcaattctactattgttccaaagaaggcctaagattatctctggtagttcccaaatatccttctatcaaagaaaaaaaaaatacatattcaggatttcggtgtctaacagtttacccaataccttccactatccccaaaagttattgactcaataatccatctcaactccctcaaatatagggaaagttgcaactcccacataaagtagttgtctctcctattactgccaacatgcatcaccagctcagctggccgtcgaagacaccatgtggatcatctaagaggtgttgtctaaacctcagtggccattggccactatccaatcgtccacatgtcatccatcggctggtctatccgagccttagtgcggttctttcccacgcccttacttggccattgcttgagttccacctccccccactcccgtgattatcaacaagcctctgccgacaaaactttgtcgtcggcttggcctccttgagctctaactgtggtcagcccctgacgttaggggtctttcgcttttgctagatctctatagagatattacgagtcctccgtcccaaattcccttgccgcaaccatctggttcaccagtactatataccaaaaagtctcatgcttacgttactgtgactacacttcaccacacctagggcttgaccctgccaaaccctggaggagttgcgtccgatgcaccgccaccagcgtcgggaggtcctccatcactactagcaccatcaccggagagcagctccgtgcgagtacctcctctcctcgtcccgctcgagcccccatgctatcagatgtcatcactcgaagcctgctctctcatcttcatctgacatatagatctcattaatactgggatgagatattggatctatcaaaagcaccccaataaccatgaaattggtatttgggaatctccaataagccaattttgcagatgggatatgaatatatgatagtgggatactgttggagatgctcttacatattacatggcttataataacaagtttgaccaatttttaccatttgaaatcaattatacaaattttaatattgaaaatgtatctttaactgaaattagtgaagtattgtcttaaattcaaattattgacctcaaaattcaggaattctgatgaagtgccaaacacaacgaccaaaaggaatactccaaaaatcacttaaaaccttctagctgtgaggattatcgatcatgatcggcatgaccagcaggctgacttaacaacttggtaaattaaaattaaatccataagataaaaaacaaaatagcgagacatgcatggaaacatctctagtgtggacatcggtgctttggcattatcaaattaggtttgacatttgcacgcagaagacggctagacctgccaattaacaaggcacatccggatcccatgttgcaagcttgcaatggagaatacggttacagcttctttgagctgacgtgaacggtgttaaccatttacttctaaatggcgcagtggacctgctttgatagaactatccgcgaatctgaccaaaattaacctctttttttaaaacaaaaaatgacaggaaaacaacggatgtatcatgaatggtgatgatagctagcttggaaactggaataacgtttgtttgtcgggttcaaagaatggctacgtattgtggctagtgggggtatttctacttctctatccaagctgagaatgcgtacaatacagcgcaatcatgcgcgatatttgcctgcagatttctggtcccttgcgcggcttgcgcctaaaacacggccgattgtgtcgttctctcgcagaaagagtgagcgagaaattaaaccaaaaaacaaatgcaaagtgctgcatccaaagtagagtgaaaagtctaaagagacgcatcgatgttatcactatgggagagggaggttaagaatcacatcgctggaaatcactatgtatatatgcttggttgtcatatgctgtgtgtgcttccattgtcacgaacgcatacatgacaaaacatgacaagtcagcagtgatgacttgatgatggcaaggggggtggcacgacagaatcatgcccgctggtgatcttatcgacctggctggctatgggccacaacagttcacatctccttcgccaatgtaaaattagttagagttaatttgatgaaattgttgtttaaaaaatcatgagataataagccacaatatcacataattataattgtggatgtaacatatcatttatcacgaaatgacatatttaataagttgtagtgccatattagtacatagagtaaatgcattagaggttaaatccttaccaccaaatcgtagtatcatactacaacacacattaaatacttttacggttcttaagaaagcatctacataaatagacaggtatcaaaattttaatatctcgagataccaatgcaaattttacactagaaaatgtagtatctctagttgtgtatttgtgtgggaggggttcatagtccacttagactgtgttcttccccctactttccttactcacatctctcttttttcgcacacacgcttttcaaataactaaacattgcgttttttttttgcaaaagtttttcacgggaatgttgctttaaaatattaattcatttttaaggtattttagactaatacttaattaattacgcgctaatggaaactacgtgcggggaggtggagtttccaaaaccttatcattgttattataagtttataacatatctttccaaatttataagtgaaaaataatccgtgcaatctctagtttaacgatacaatagtttataacgaacttgatactgattttttttctatatcttttttcaaagtgtatataattatatgaaatttacttaaataagtatgattggatggcgcagtcgtcggctgttcaccatgttcgtgtgcagcagagaggttagtttcgtttttctcgtccggtagctctccatgccttgtagctatagctagcatccagccttgcttttgtagatggagcaaccctgtcagctggtgaatgttgttgcattatattgagcctaaatcaacagagatagatatataaactgtagttacggtgtgacttttcagggcaccagcctctcgtgtacttgtaaaagaaaaagacagactggtgtcaggttgcgcaattgcttattattcataatttcttatatcgctcatcagctttgcgaaatggatgccattagctttgcatttcaggaacgagttggatgcctcaactagaagttgttgctaaccacactcgataaggcacggcacttgcaaaattttcctgaagctgaaagaaagagtcagcacgcacgatcgccatcttctgagcaaaattcaagagcattcaggagaaaagaacttaatcttcattttcaagagaaaagaataccacctaataaaaaacttaatcttcatcttcagaagaaaagaataccacctagcaaagccacggatacagacgtacagagtatactctaccatgagctgatagacttttcttcgtggtaaacgaagaggattggcagtattattacttttaccattcaccattgccattaattaacaaaggacataagaattcccatcagcatctgaaagatccaaatgccataaacacgattttatgtaggggaccctaaaacagggataggcaagcttcatgtgacatcctttaataccaagaaagatcatataaaatcgatccaaaccaagtgaaatctcaaagaaagggagagctggtctgtgtgtgagattggtcagaggacaaaacaaaggctggaagtcagggagagggaggagaggagtaccaaattcccatgaaactctcaaccccaccaccctcatgcgcagtgcgtagtagtatttatttccccgtgctttaaggaaagaagagaccaaagagatctgaacaaagtgggggagcagcctccttacaggaaagaggaggtgcgagtgatgccatgacaatgaagagagatggtgcaacggcaactgaattatatactctactatgctcgtccaacttggcaggctggtgccaaagagtctgcctcatgcagtcctgctttcagatatcactccacccaaccaaacaagcaagcattattgcatctgccatgagaattttacacaaaaatgtcaattgaagtaccgaatacattcaggtataataatgggaaaacagcagagataatgtcagtaatatactccaacaactgccaacatatgcaggtggcatgatgcatctacttgaactgcatacatgacactttaacagcagtacaggaaccctttaattttaacaaaagattccaacagcttgattaagggatttgggcacaaggcaggtaaagtgcataaacaaccttcatttccaggcactaatgagagactttcgcaacttctcatgaatcatggccatcaccaacaccgtctttctcgctacttaatgctgtgctagaaccaaagcatatgggcgtcgtcagaggagagctcctttcctttggccccaagctcacacttctccatgccatgctctgatgctgctcctcctccccattgtttagcccacctactcttctgtagtcctgttgcctccattagcaattcttgtctccgttttctttttttccatccttttcttcttttctttctttcatatcctgctcagtcctcaccttcttggttggataaacatgctaacgtgcagctagctaatgtgttttggactttaattattatagtaagtgatgctacgggagactgatgagtgtttcctggaggagcaccaaaccacaccaatcgccatcacatgcactgcctttatattattacactcttctgatccttctcatgtgagcagtgcaaaggccaccactcctcccttctctggtctcaacagctgcacttgtctctccaatatttgcttcctattccctcttcacgcagcaggacgcagtgactgagactgactcctcttgtatgtgtgcaatctttaagaaataggagtgtatctctctgtatgtgtgggtgaaaacatcataagtgagtgactgcacactgcaacaaagctgatgaatcagagattcacagctacactctctgcgggtcccaagctcatgttgcctcaactaagctaaatgcaaacccgtggcttagcaaagtggcattatagacatgaccctgaaaaggttccgacagagatgtgtatatatttatcctgcgaggcatgcatgccttgattgctttacttctttgctccataaaccctgataataattcagattttcactgttccaggcagcattgctgtcttatcttgatcaccacttttactatagccattgagcaaagtaaagcaagcaacaaacctccatgcctaacagcattaaccaaccaagctagagggatctgtagagagagcatctgtacctgatcggcagtggcattggcatgtgcatcggcccttccctatgctatgctgcatctccatatcacaaggttccttcccccatcatgcattgggtctctctctctctctctctctctcgctaggccagctctgaccccagatttgtttctaccacgcagtgcagcggcagcggcagctcccacaccattactccccatctgtgtgaagtgagagggaaagagacgagtcagatacctaaaattgtgatggactgatattattgtcaactaacgtgtgcccccctggctggcatgcccttccaaagggtcggccctgtgcttgctgctttgcccatctagtccacggcagcgttgcactgtcttttgatgcccaccctaatgggagccaggataccgaggccggccagcccagcaaccttactcactcatcagtcaccggctgatgcaaaaacatgcagcaatagggacgctgctggccacactgctgctggttctagcctggactggactctggagaggaaaaaagagagaaaaaggattgcatgaacgggtcgccattgtaggcaggagtttaatttgtttggattttgcgaggcacgggctgcagcaaggccaacctcttcagtcctctccaccccacttcttgatgacagtcacatgctcttttttaaatataaattatgtttttcaattcttttcttatcttttgaaacaaatgttttctgtttttattttcaccaggcatacaaagaattacactttggactacctcgactctcttctcaagcgcatcgacgactttgagtacaacagctcctacataccgctgaaatcccgcacaccgatgaactccaataccgcagctagtttgaaataggatgaaagaaagtttggatgatccgataccgtagcttctagttggtcaaatgttagcaccataatcacatttcgtccattgcagaaaggatgattttatttttgttagtgctgtccacccattagaaagctccataaggagccagctagacaattattttgcaacttatcgtgttgactgcatctttcatgtacttgcccccttagcacaagatacaacctaatcgaaccagcatcttgcgtcagggaaagaaggatcagatcagtttgcttcagcctagtttagacgctaagaagagaaacctaacacatttgatggcagttagttgaatgcaggtacatggcttcatgggtcctaaaagtaatgaagcctagttgaatggcaagaatatataaggcacaaggctagaagcccattataagactgccgcgaaggggatgctttgctcaatcacaaggactaatggccttgtagactttgcaggtaagcatggacaaagaaataaatatatatgtttaagatgaatctaatgctgcattatggtactaccacaggtatgcagaagtactaacaaagtcatgccgcaaggcccactaatgtccgtacacgcttaatccaactctgcaaccttatgatagatatccactttatggatctcttctacttttccttccattttctttacatgtattaagtagatatttcaaaataacatgtattaagtatacgtatacgcagctcaaagaaatgggtcataaacaaattcagagattcatatattgatatactaatgagcaaccttcgtcatgctaatatggtaatgtaataaacaccattgctcttcttatcttaaggaagaagcataggatgcatcaagacgcctgcagatatatccatcagcattgttagatgccaccgagaaacatgaagagaggaacaggtgcacgataagagaatgggaataaagctggagtacagacgaggaaagccacaagcaaagctcattggtttcaggggttatacacaaccagtaggaaagtggggatggtacctcctccattatagtcaggacacccacaaatactatctaggatccttaaagaatacttatgcaatacagccagcagcttagagattagcaccaaatggatgccaagtccattcctttggtgagcatgatgccaccaagagaggctaaatggaaagaggaaaaatgaaggaaaaaggaggcatcatggaaggaagctttggcaggtaaaaagaagggagagaattgctccacaggcatccatggtgggtttgttacatccttaagttgggtgagtaagaagatgctgaaagcaaagcagatggcgatgcatggtgctcagtaccgactgccagatagcaactgaagtttctcttctttcaagatctcaagttcagctgtgaccaaagcattttccaaaccaccctctgttgcccccattagaaaaaaaataaggttggatactgcaagagcaaagcattttggttgtaaaccgacacatgagaaatgcaagatagagatgtgcataatgagtcatcctctccacctgtcaattacaagacgatgtgctaatggccaagtttggacaagtcttctacaaagacaacacaacaaataccagctatttaaagtttttttttgaacaactcgcacaagatggtgcgaagttctattgatagagcagaagaaaaattacaagattacaaccccgtaagatcgtaaccaggaaaagaaaaaaaagtataccaccacccacacgtcgacagctccaacacacggaaccaggagaagcctagcaccgaattggccgccgctaagctatttaaagtccacctatactttctacctcggtatgcatttcaaagtatattagtatatccaaagttaatgaagttactggcttgggcatttgtttctaagcatgtccacactacatacacaagctagcttttcacagaactggaaaatatatgatgaaagcacttacatggcaatgctgtggcatatagctttacctcttgctagtgctcaagaccaccacggtagcatattctgcacttaaaaatattcataacacctgttgcaagatgtcactaaccctgacctcaagattttttattttttttggagatgtactgcatctactcgtatttcaacggtggcgttcgttttcagataaacaaaataattagctagtgcgagtaatagcatcctacgttaacccgtgacacattttaaaaagacaaagcacttcctcgcaaaacgcttgctgcagatatgatgtccagaaaaatcatatccggagcaccacttgccgcttgctccaatatatgtcaatctgccgtcccctaccatgccaccacccgtcaatctttccaaatctaaaagtttggcaaacgagagagatagccagacggaggaggaccttggccaaccaaatccaaacaaatttggaggatagaacaagcaaaagatagacaacccacaaacaattaagaggagaaacattagccgtaaaatactcccatttgaaaagtactactataccaagatggagacgcagcttactttgcacgcaagtatatggactctggagtgaaaatcgtggtgcacggacaaagaactaaccggcggcgacaaattcttacagtcaagttatcattggcattgcagagggggaaattaacataggctatcatgggagtaacatgctaatcgcaaaggaaccgcactaattccgaaattggcaaactgcacatcccgtttcaacctagcttggcaagattaattccataattttgcacgagacagcggaactagaagaaacggtaggattagggctttttcccaattcccattcgataatcaaaatcgcccatgtcggtgtctagaactccataagcagcagacgagtactaaccgctggggtgctgatcacggcggcgaggggaagagaggcgcacgcggcgacccgaaactggcacgccgggatcggggagaacagcgccgccgtcgagatcggggaggacagcgccgccgtcgacgccccttcgctcctgcatctccgcaccggcggcctgtacccggactatgggcttgcgtggttgaaggaatagaaggccgaggagttggatctgcaatctgcaggccgcatgaaaagtgggaagtggctctgggcttttggatttgtttacgtatgcatctattgggctatacgttgaggcccaatgggctactatgcatgtggaccgttaggtacgagtttttctatttttacattttttattaaaaatatttaaagaataatttttcgtttcgaaaatttaccaatacgcttcacgacagattttaagtgacaatgatagccagatgatctagcgagtacgtaccgatattagcttgcgactgacctatgggcaaccgtacggtgcgagcgctcacgatcacgagcaacgacgataccaccatctacggtaccaaatgtactttattctatactgtaccaaagtagttctgcacttcacttatgcagtatgctgtgtggggtctagttacggcgaaacgtgcgactcgcacgtaactaaagaaatttgcatttgaaagcaagggggtcattaattaggaactttggtatagggattttatagaattaaaaacccctttatgatttttttcccaatatattccctctgttccaaatataactatcattttactttaaatttaaatattttagaatggagggagtagctctttagtttatagaattttgtttgaaaaattcaaaaagaaaatatgttcgtcactttttggagttcgtcgaatatgaacttactttctcaatctcaaaataaatcaatttgtatataaaatctggatggagtaaaccaaattgtattgatttcctttgagaagtcgaaggaaccatgtcttatcatctctcctcttaattctattcaaacaatattttctcattaaaatcatatgattttcataagtcaagtactatttctgtcccgtaacttcttttttagtccatattgcacgtatcaatacaaaactaaaaacactataatatctcactttaacaaacaccaatatatttcccatccattctagcaaacattaatgtgtttgtcccattttaataaatccctatgtatttgttttccactttaacaaaatcgaatgcactgactgttccaaaataaaatctttgtggaacaaatgaaaggggaaataagtctactttgatttttctggacgagacattctttatgttacaaaaggggcccctaagatgttcctgtgtgcaaaaatgcatttttctcatgcgtcctcataagagacccacctacaaaactagacttattttattgggcgggcttcttaggtggctgcatacgaaaatcagattttcataggcgctctataagaggtccacttacaaaaatcaatgtgaactaaatataaaataccaaatcctctccactcctccacctcccctcttatcctctcatcctccacactctctctctctctctcacacacacacacacacatgcatgcacacactccctctcgtttgtgcggctggcaacgcaaccaaggcaacagcggcgggtgggtcggtgactggcggtaggcagaagtggctggcgccgagctggagtggcggggagcttgatgatgatggatccggcatggagaatggtgggagtggaggtggcagtctcggcctctcgggcacggtagcggccttggactgggcggatccaccacttgcacccacaagagtggcatatccgcccccattcggccagggatggtaggagcggcggcggcgatttcggcagcgacaatgatgatggtggcgtcgacttcgggagggacgggaggtgtggatctggcggctcttcctctcccacgcagatcctaccacctctccctcacgcattgctctggcgacgaaccttgggcacgggagcaatggcgacgggtgatggttgcttgacatgggagctgctagggtttcagttttttttttaccgatttttctttttgccggcggatggcataacatcccgcatgcggaaataccctttttgtgtgtagttgtgcagcttacctgcaaaaattgctatttttatagacacatgaggtgcagacggttgccacatccgcctatgaaaatatgatatagccatatggaaaaaacccattctctctttccggatggagggaatattaaaatgacccattcaactcattctcgtgtttttaataattcctataagttgacaaatggtgtggcattcaatttcggatggctcgctgccccccccccccgggccgcttagcatcaagcagccaggagcgctagagcgtagtcgtattgttcccccgagagaaatttccggtgcatctcagcttatattttacaatataaaaatatccatttagggtctattcattttggataaattatttctttattctaacatataggaatatgaaaagtgaaaaaaatagaaatgcatgcacattttaacccataggaatttccaacaggttcgagtggatgaaaatttcctatgtttcctctcttacaagagaaaatttgtatttttgtatttggttttcctatacctacgttcctatgaaccggatgatgctaataggaattaatccttagcaatctaaatcatttggttttccttcaaaatgaatgggcccatacttttgaatattagtaggaaacaggaacgctgaagcagtcttttagggagtactccactataattgttcctctatagtccccttctttcctctccttccttctaacggaatggtaaaattagagtgaactgaaaagatcgagaattttggttaataattccatctgaggcgttggatagttgaaatgtagttatttggttaatccaccacaaccctcagttaatcaaataggctaaaattcggtccaatagacttaaggccaacaatctcaaaaaactatcattagcattctccaccgcacaagccggctgatcacgactatcctcccatccgccatatccggcgctgccatcagccgagaatgctaatgggcgactagtcgcctgtggcccgggccgtgcgaccagttccactcattccatttttggctcaagcggttttctgcttttcctttttcttttttgatttttctcatgggcttcattatttagcaggccagttcaattcgttcaaccagactgatcagactttttttttcttttttagcaagccactcctattcaaccatgtgtataaagtttgtatataaaatttatacataaatattctatatatacctatataaatgctatatataagttgtatatatgtctatatatatactttgagggaggggaactaacccgcatggacgcgcccccacacgacacgaccaacaactaatcagcggttgccgcctccacctctgttcgcccgtgtgctacggtcgtcgatgctgtgcttatagatggccataaggcccgaggcccgaaggcccggcccgacttgggtcaggcccgtgccggcccgacctccgggccgtgcctgggcctccccaccggcatgctgggctggcccggcacggttgggccggcccgacacaatgggccagcatgccaggcccgacatacaaagtatagggactaaaaatagactaaatgtcactgtccaaacaatagggaccttaaataaaattattttagctatttatatatcacagcccaaagaatagggaggtaaaatagacttttttaggtatatatatgtcacagcccaataggagggaggaatattagacttattgtgagaaaaatcacaataggccatcgtgccttcgtgttggcccggcacggccgagtcgtgttgggccatgcctgggccgtgagtgcggcacgtgggctgccacggcacggcccggtgcgtcggtcgggccgtgccggcccgacaagcctcggcccaggcacagccggcgtgccaggcggcccacatggccgtctatagctgtgcagcctctcggccacccaccgccaccagaattttttttatttttaatttttttattaaaagttttacaaaaataattttccattttgaaaattgacggaagtggtcgcctaccgccctctgggagggcgatttttaaaaatcgccatcccagagggcggcgaaaatgacgtggcagacggccgttagctttcg

SEQ ID NO: 7940 - DNA, 6829 bp, Oryza sativa
ggggagatgggccgagagagattcggcccatcgaacccgggggaggcaaaatagacttttgcggaggaattgatttgggaagggtttggattcgggattgaactcgacgatagatcggggatttgagatctgagatggcacggacactagacaacaagcaaagaaacaaatttcgcaattagggtttttaagagataattttcctgctaggcgccacgacggaacgggcgctacagaccaacccccctaacaagaatctcgaccccgagattcagcacctaagggagcagctccgggaactcggcgcggagaagatcttcttgctcctaggttgcctcatcttcagaatggttgctccattggactttgtagaacttgatggtcttccttcgagtctgacgttctgcctcttcaagaaccttgatcggtctttccttgtaggtcagattcttttccagcacgatattacccaggggaacttgttcttctggaacacggagacatttctttaactgggatacgtggaacacgttgtgcacatctacgagaccttcaggtaactcaagctgataagccacttcgccacgtctggcggttatgaggtaggggccgatgtagcggggtgctaacttgccggacattccaaacctcctcataccacggaggggcgatacccgcaggtacacatgatctcctttttcgaactcaaggtcacgcctccgattgtcagcgtaattcttctgacggttctgcgctgtcttcaaacgttctcggatcagcttaacttgttcttctgctgccttgagtatgtcaggaccgaataccagtgcttcgcccacctcattccagcacaagggagtgcggcactttcttccgaacattgcctcattcggcgacatctgaatgctggcctgatagctgttgttgtatgagaactccgcatacggcaaacaacaatcccaagtgccttcgaaatccagggcgcacgcacgcaacatgtcttctaggatttggtttaccctttcggtctgaccatcggtctgcggatggtaggccgtactaaaatttagatcggttccgagggcttcatgcaactgcttccagaaccttgaggtgaactgagtgcctcggtctgacacaattttcttgggacagccaaatctacatacgacatgggtcatgtagagttctgctagtttctttccatcaaaggtggttttcactggcacgaaatgagctgatttcgtgagtcggtccacgattacccagatggagtcgtacccgctaggtgttcttggcaaaccggtgatgaaatccattccgatctcttcccatttccactcgggaatcggtaggggttgcagcagaccagctggcctctgatgctctgccttgactctttggcaaatgtcacacagggctacgtattctacgacatctcgcttcattccggcccactagaagtatgccttgatatcttggtacatcttcgtacttcctggatgaatggagtaggcggactcatgagcttcctttaggatgagatctcttaactccttcttggccggtacacagatgcgtggaccgcaccaaactgtgccttgatcgtctatggagaaatcggtgtctttcttctcttgtattctttttattaattcttttatcccttcgtcatctttctgagcctcccggatttgcgattctagggttggctgcaccgtcaagctggcagggacacctgactgtaccacggtcagcctcaacttctccaattctctgcacaggcggtcttggtcaggccgtatttgagctacattactgtaggccttgcgacttagcgcatcaccgaccacattagctttaccggggtggtcatgaattccaagatcgtaatccttgattagttccaaccatcttctttgcctcatatttaactcggtctgagtgaagatgtacttaagacttttgtgatcggtgtatacttcacatctgttcccgattaaatagtgcctctagatcttaagagcatgaaccacggctgccaactcgagatcatgggtgggataattgacttcatgaggcctgagctgcctggatgcataggccacaacctttcgttcttgcattaggacacatcctaagccttgtcttgatgcatcacagaagatctcgaaatcttttcggatatctagcaaggtgagaactggggcagtagtcaaccttttcttcattttttgaaagctgtcttcacaggctgcagaccattgaaatttattttccttctttaacagctcggtcataggtctggctagcttagagaatccttcaatgaatcttcgataatatccagctaagtcaaggaagctgcgaatctctgacacattcttgggtgggttccaagcaagtacagcttcaaccttgctgggatctacttcgacaccgttggaggagatcacgtgtccaagaaatgctactcggtctaaccagaattcgcatttcgagaatttagcgaatagttgatgatccctgagcttttccattatcagcctcaggtgttcagcatgttcttccttattcttggagtatatcaggatatcgtcgatgaacaccacgacaaactggtccaggtattccatgaagattttgttcattaagttcatgaagaatgctggagcattggtgagtccgaaggacatcactgtgaactcatatagaccataacgcgttgagaaagcggtcttcgggatatcttcagatctgattttcagttggtggtaacctgatctcaagtcaatttttgagaaaactcttgctcctttaagttgatcgaacaaatcgtcaatctgtggcaacgggtacttgttctttatagttacttcattcagggctctatagtcgattaccattctctcagagccatcctttttcttaaccagaagcactagggctccccaaggggatgagctaggtcgcacataactcttactctccaattcttcgatttgtcttttaacttctgctaactcattagctgccattcggtagggtctttttgcaattggtgcggtgcctggtgccagttctatggtgaactcaatctctcggtctggtggcatactcgttaattcttctggaaatacgtcgggatattcatagactatgggcaccgactccaaggaggtgacttgtaaacaggttaggatagaccgacttgcggtaggggtgttagaggtaaagcggacttgctttcctccaggtccttgcaaggtgatggacttttcggcacaatctatctgtcctttgtgcttagccaaccaatccatccctaggatgatgtccaagctttgcgagtctaggactatcggtttggctagaaagtcaacttcctcaattctaaggttaacttccgggcatatttgagtggcccttatattcctcccaggggaatgtactatcattggtacacgcaaattttgggttttccaaccatttcttttcacaaaagcttgtgatatgaaagaatggaaagctcctgaatcaaatagaactattgcgggtacggagttgacagagaacatacccatcacgacgtctggagcatcctgagcggtctcagcttgaatgtggttcacccggcctcgaccaaagttgttggaagcacgtgaaccttgtccacttgcctgagagctaggacgaggctgagctgccgctggagtaggagttctggcagtgctgccattagcatgccctgagttggtgttggtaggattctgagggcactgtctggcatagtgacccatctggttgcaccggaaacactgaactgctgacggtccctgcggtgacttgaaagaggtaacactgtttggcgcagtattgccactaggggcacgctgctgtggctgaggtgccggacggttcatctgaggacgaggggcgtagcctggctggcggttagcctgagtgaccgactggtgatattgcatgggttgaccgtagcgagggcgaggtgcgcctcgggaagaatttccctgatggttagacttgcgtttcttgtattcttcggtagcctcttttctggcatcttcaagtagaagtgccatgttgatcatatgttgaaaagtggggaagtcatgagcaagcaactggagtctcattccaacagcgatccctttcaagaatttcctgatcttcttcttgtctgtgtccacttcctcaggggcgtaccgagccaacttgttgaacatacttaggtactcattgacactgctgttgccttgcttaagtctgttgaattcctctttcttcatgtcaatagtgctttcaggcacatgagctacacggaaagccgtagcaaactcatcccaagcaatgttagtgggttcagggtgtgcattgcagtaattctcccaccaatctgcagcaggtcctcttagctggtgagaggcgtagagcgtcttctcaacaggagtacactgcactaagttgagttttctatcaacatctttcagccaatcgtcagcctcgacgggctcgacggtctgagagaactctggcggacgagacctcagaaaatctgtcagcttggatctattgttgctcatgtgagggtggccatttccatgcgcattatgctgaaaaccggctacggctgcggctaacccttgcaagatttgtgtctaaactgccattaagtgctgcatgttgttttccacatgaggtggggaagggaggcgttcttctccagaattgtgactagcagtgcggtgagagcggtgagactgttccatttctgcattacgggaagctgtgtgatgcgagcggttactgcgacggggttgctcaacttctgcgttgcgggaagcagtacggtgcgaacggttgctgtggtgagactgctcattagctgactcatgatttgcttctggctcaactctaccatcctcaaaaccaaagcgggctggtgcacgagcagcacggcgggggcggctaaccatctaaactcccagaagagggcggggtaagagtcagataagcacttaggagggcaaggagcaaagtaaatagcaactcagatagcacacactaggcataaactggatttttcatatcataaaaacacctagtacaacgggtgtagacaagtcacagagctacgccgagcttgactgtgcgcacaccacctaggagaaccagactaccaaacaatacccacaacaaacacacgcacgcactacctcgccacgactccaaaagagttggcggcggaacaaaagggcctaacacacggacggctgctgaagactgcctcctctactcctcgtctgcctggctgcttcctgtagtcggctcctcagtcgaagaaacgtcgatcggctgacgcgaagggaccggcggaacctgtcgagggccggcagcagcacgggccgctggcggtgggggagctgggtagtcgaaacggaacacggtggaagaaccaacaacacgcttccgcgcagtgcggataaagcgtgggcctcggcgggaggaagcaactggggtgtgtccgggggtgtaggaagggctaactgggtgtgggtagggagagtacactggtgagtatggcgcacgcgagctgggggagcgcgggccactgggagtgcgggcagagccgcgggagctgtgggaggacaggtggctggcgtggcagaggcggcctgagtcctaggagacagtgtcaactgaggtgacaccctcctcggccagacgggcctccaaagcagcgtagcggcgggcaagggagcggtaagcctcaaggagtaggtcgtgctgagtggcctgagcctccgaaagctcaaccatgcgagtcagcactggctgagactcgctgtaaggacaagggtacctggcgtctgcgtggccagaaggaaggcgtggaagctgccggaaggcagagcccccgagacggtggctgtagtcgtgggccaagcgacgaagcgcagtccaggagaggtcctggtacgcgatctggagagtgggcctggccacggtgaagtggtgtgggcgaaggccagctccgtgtatacctccacgagggtaaaggtacacagagagctcacaacgagggggaacacggtccacggagtaccccgtgtactccggacacgagaagccaacaaagcgggcgaggtcacgaagctgagcaacgtggtgaccctcaccaaaaccgtgggaactgaagctggcgttcactgccatctacaattttgaaagagggagaaagatcagtaaccattttagaaacaaactattgaaaataaggaaaccaaaagaagccttagcttttcgcaagtagttttgaacttagtatccttagggtcgtcctaaacgtcgggtttcgccctagggccaagcctgtgctctgataccatctcttgtcacgccccgaactagtaccgaccggaactagcccgcgacgctccaaattaacctgttagttgataccagtcccaagaaacagtgctggtatcacaggaagacagattatcacagcaacagaggtctctttattatagagtagaggtacagtcatgttgggctgcggacagatcccgagctcacaactgcattacaaaagggaagcggaagccaggacttggaccaaacaacacaggcgcgacttgggaactaggccgaaaccctaaaactcatcgtagccggcttgctcctggaagaactcctcatcagcaggatccacttcatcttcttcagcaactgggggggattatttatatagagcaagggtgagtacaggagtactcagcaagccatgggaaataagtgtttaatg

SEQ ID NO: 7941 - DNA, 21306 bp, Oryza sativa
  unsure (1)..(21306): unsure at all n locations
cctcgacatagtcaaacttagggtttgatttttttttgacaggcagtagatgataaaacgaagaggaaagggaaggcagaagcagagcatagaggactccaggttcactgtggcactgtgccatactgtacaactgttatgcatggatcatatagttgaagttcagaacaacacgtcaagcaagtactgtaaaggggttcacagtgcaacaccaaattttggtgagcctcacgtgtcacctagactaagaacaatattagctacttgttttcacagtgcaagttgtctatagtgggtcctactagtactaactttatcactttaccaccttttcctctccccctctctctcctcttctcctttccccacagcaagaattttttttatttataattttttttattaaaagttttacaaaaataattttccattttgaaaattgacggaaatagtcgcctaccgccctctgggagggcgatttttaaaaatcgccctcccagagggcggcgaaaatgacgtggcagacggccgttcgctctcgggcgacggccgtcaacgaaatttgcaggcggcccccttgccgccctccgcgagggcgattttgtactgtgcggggggccgcctgcaaatgggcggcgagggggggcatggaaatttgcaggcggcccccttgccgccctgggggagggcgatttttgcctcccccctataaagcccagtcccccctctctgaaatttcattatattcactaaaaatccaaaaaaaacgaaagagagagagaggggagggcagcagaaggggagcggcgaagccctgctggttcgctcacttcatcacaggtttgctcccatacatcttttgcatttgtactaatatgttatgtttgagtatatatgttgcgttttagttttagttccatatattttagcatatctgtagcacacagcacatatgtgtagatccagagcatagaatataatagtatgaattgagacatagacagtagtgttaattgtaagatgtagtttagtttgatctggagaatgtaacctacttttagaattttggagaacaatattgtagagaatgtaacttagggcgtagtacagaaatgcgaggttaacgcagttattgttttcatcaggcacaatgtcaagtaaggtcacatttcagatagttcacggtgaaggaaatattagatttggtccagatggtgttgatctgtcagattttgtaatgacatctaagggcatcgataggcctgcggagagaacatttcagtcaatttatagttggttgttgagaggatttagaatagaccaagaagtctacacaatgtcagtatcagttgtagtgagtcgtgcaacagaaggttatttttgggaactaatgccgatggacagcactgctgcttggaaacggtatgtggaaatggcttttgaacggtcatggcccctcgttatatttgtgtcggtacaagagaaagatataaatgtttcaatgcaaaccgaagatgtagagggtcctatcaatgcaggggatgttgttggaccatcgatgcaaaatgaggaaaatcaaccaagggaggagcaggccatgggcatggcggatgagggggagagagtcggtataattgttgatgaaatggagagggaagattcggataatgaggaagcggacgacgacgcatcatccgatgaggaaggtgatgtaatggccactgattgggcaaatgaggacttctctggacttgttatatcagagggtgatcatgtaccctgggagtataaggagaacgaggtaattgacggtgcaaggtatgctcataaggatgagatgaaggaggcggtgaagcattgggcagtttccttgcagagagagtttagggtggtcaagtcaacaaattatgtgtatgaagtgaggtgcatgaaggaagattgtccgtggcgtgtccatgcatataagggtaaatggaatgattattggaaagttagcattgtgaccgagcacaagtgctacttacaaggggtggagaagtatcaccgaaacatcacttcagcttttgtgacaagtgagatgtacagcagtgttgttggtaacattggctttgaaccaaaatcaattattaggcacatcgataacaaattcaagtacaccataagctatgcaaaggcctggagagccaaacaaaagattattgagatgaggtatggcacatttgaagcttcttatgataatttgcctcgtttgttagccaccattgcccagaggaataataatacttactatgacctacatacatttacatcggttgatgatcgaacaaagagtgtgctgcaaagagcctttttctcattgggtgcttgcatcaatgcttttgtgcattgtcgacctgttctatgcatagatggaacttttatgacaggtaaataccgaggtcagatattgacagcaattgggtgtgatgggaacaaccaggttgtacctatggcttttgcatttgtagagagtaagaacattgaaagctggtactggttcctagagagagtgcacattgcagtggtgcgtatgaggcccaacgtttgccttatacatgatcgtcatgcgggtatgttgcgggctattgactacttgcagaacggttgggatgagaagggacttccagctaagtggcctgatgttcggagtcggtggtgcatgcgtcacatgggtgcaaatttctacaagtaattcaagaacaagcatcttatggagctctttaagaggttctgtgcacagaaccaagagaagaaatttaatgagttgtgggacaagttggatgagttgacaacgaagcaaacagatgagcaatctcgcagaccacaagttgaaggtgacgagcctcccatacctcttggcgcattacatgatgacccaccaacaatgagaaggaggtcagggtcgtccatcagaaatttcactcagtggattgagaatgagcctaaggagaagtggtctctattgttcgacaccgatggatctcggtatggcataatgacaaccaatttggcagaggtgtacaactgggtaatgcgaggagttcggatacttccattggttgctattgttgaattcatccttcacggcacgcaagcgtactttagggatcgatacaagaaaattggtccgtccatggccgataacaacatagtgtttggcaacgtagtgacaaagtacatggaagataaaatcaaaaaggcacggagacatagagttgttgctcaaggcacacaagtgcatcggtatgaaataatgtgtgttgataggagcaggcgtggtatctatcgcaagcaagccgtgcaggaatgtgtcttgaaggcggatggtggatgtacctgcagttgtatgaagccgaagcttcatcaccttccttgctcacacgttcttgctgctgccggtgattgtggcatatctcccaatgtgtacgtctcaaattatttcaggaaagaagcaatctttcatacatggagtgaggagatatatgggttcgggatctcaggatcttacacaacactgagtgcccaagttttttacattccagatccatctaagttaagggtgaaaaagggtcgacgccaaactagacgcatcagaaatgatatggatgagtcagaagcaggtgggaggactttacgctgcagcaagtgtgatatgcgcggccaaacttacaagaaatgctcgaagaatgcagaagttccaagcggcgcagatgctagtccatctggacaggcaagtgatggtaggcgaccacctggtccagcaagtgatttgcagccgggatttgcagccgggatcttcggtactggggcctcttcgtctcacgccggtaggactggtcctactagccagttctacgacgacgacttgcacggtgcacaccaccacgacgtactaggctcctctcagcttggaggagctccagaggcgcacactcaggagcagccagaggtcacacctgtacaggcaggacgggttggccgtgccgtacccccggaccgactcacgtactcccaggggcacattagggcgcagggtaggagggacaggggtaagaggcctcgtcagtagtgttctacctcttcagtccttatgtgaccgtttcttttggcttacaaacttgtaaagcagtactacttttgctattactactgcagtactacttgtgtttgtctcgtctacatagttcttttcattcatatggtgctagaacaacttatgctcacgacaacacactttcggcgcttcacggtagtgtcagatccagtagcgcgcacagtccacaacagcacacatgaaaagcggcagctcgagttgtcactatcaactttcggcgctgcctgttgacataaagtgaatcacgcccacgcgtgatcgtcttgtcacatctaatgaataatgtatctcattgagttcacatatattgcagtgaaaacgacgctatataattgacaatctgaaggcaacctctttatatcttctttcccactagcacacaacacacgaaaatggaagcgccattccttgagcgtctcaactggcgaagcgatccttttgctggttggtttccaccatggtgtgaccgtcctttgtgcgattgtggggatggatgcatactcaagtcttccctcatgatacaaactcggggcaggagattcttccaatgcgcgaactttgatcaggtatgcttcatctattcgaagttcaaatggataaaaaaactaacttcttcgtacacaattgtaacatcttacgcagacatatcgtccaatgtgcaacttcatcgagtgggtagacatggagaacccacaaaacgacggaacccgtgcttacccacgtagtgaaacaagatcggactacctaaggtggaaggatgagcatgaacgtcgaattgctgctgaggctttagaatggcacgtaaatcccctaggactccccacgtggcgtgagcgtccggagtgtcgttgtggtgaccgttgtcaggtcataaggtccgtaaggcaccgaactcgaggacaaaggtgtttcgtgtgtccaaatattgtcgacgatgatttcgtggtaattacaactattcttttcatcactcctcagtactatcattaacttaactatcccaaaatggatgtacataggaggatgtaaggaaatgtcaattcgtacaatggattgacacagtcagagttacttcaagtggcgggccgataacgcaacctgaaccgaccatacagttcattcatgcttggatggagtacgatcgggtggaaattgcaagcttagactggaggaacaatccattagggttacctaaatggtccgagcgtccaaagtgtgggtgcagagatcgctggcaggtggctacatcctttgctgaacaaacatttcgaaggagatattttgtctgccccaatgtagacaacgatttcgttgtatgtctaaccatttacaaaatccgctatgatttgcacaaaattactacccaaactgaataacattactatttttacagggcaatccaaggatgggtggatttactcgatggatcgacaatgtcactctatcatatcatggccagaagataacagagtcagaaacacaagtagagtatcaacgattgaaggaccacgagaatgcaatgcattctgaccgacctagaagatgccgataggttaccgcatgcttgattcgtcgggatcgacaaatttgtaccgtgtatcgatggcacttcttatctatcttatcattacaatgtttaattatggtggtgattttttgtatgcgtaagactaagggcctatttggattgctaccaaaaacatgccctaccaatattttggtaatttgaatagtacttgtgtttgatttcgattgaagcttattcattagtaatacgtaatctagatttgagattatgtagaacattcttcactacaattttacattttggcagcaaaccaaatatgatcaaatgcaattttaccttaccaaatatttggtagtgccaaaacttgcttatattttggcactaacaaaatatttgtacggtaacattccaaataggccctaaaaaataataaaattgtattttaccagtcttggagattttaatcttgtatagttttcaatataaaaagatttgataactattgatatttatacaaaaatataaagcaagtataaattcgccctcccccagagcggcaagggggccgcctgcaaaattccaggccccccgccgcccatttgcaggcggccccccgcacagtacaaaatcgccctagcggagggcggcaagggggccgcctgcaaatttcgttgacggccgtcgcccgagagcgaacggccgtctgccacgtcactttcgccgccctctgggatggcgatttttaaaaatcgccctcccagagggcggtaggcgaccacttctatcaattttcaaaatgaaaaattatttttgtaaaacttttaataaaaaaaattaaaaataaaaaaaattcccgccaccaccagtcctcgcctcctcacctccttcccttctcttagctcgaactggcgtacttatgccagcgcatcgtccccttctccctgacacgcaagcacgatgttgcatcctccccaatgggcgatggcaacttaaccgagcaatggttccccatctctgagatttgtttgtgtgtgtgattttttttttggatccgctgatttctttggtgatttgtttcgatctcctaaaatttcggtcataatcaagattgagagcgaattacttgcattggtcttcgtggtaattcagtctctatttttacatgactgaattcctgaaaagactgtagactgcgactgatgtcatcaatctaacttaatatatttaatttttaaatagtgggttagttgtgctacaccgctactccatccatcctgaagagcatggctaataatatagccaaatgcttgctggttttatagatctttacagtttaccgctcagccaactcgtatagtggttagctcttaactataaatatatagtctatatgtctctctcatatattttcttggtttctgtacctatgccggctataaatatatggccatccgcgcctctctctcatctcctctcttctctcatccatctatcatttagccttctcacaatcttctattagtacttgcttgtaacataccgaaaactaactattttctaatcctgcatcatgccgctttttatgttcttaataacttcctaaacctaggaaaatacaattagagggaccttctaaaactaacttgcataaaatctctttctggtatttaacttcttttgtgtttttcatttaaaaatatagttggttaaattaaggtgtttcttgatttggttttaatttaaaaaccttctttagactaagattcttttattcaaatttagtttgaaaactctttctatttttttatgaattatggtcaaagaaacattcccatactgtcctagaacctaaaacaaagtaattccaattttattataattaattgttagcccattctttgttcttaaacccatcctttgattctcgatccaaatgtccaaattcctccttttgatctagccaccaatttaattcctgtggcttgatttcctcttcggcacaagaatagtattattgtaaatattgtgaataattgctcttgtgctaagaaaatagcaatttatattcttcactcaactttccctattagccacaaataattcttcaaatacttctactatcaaatttaggattcaaatcctatttattttacctccaaccattctcctccaaacatatatatacattgaggaattatattgttaattcccctctcatttgagtgcattaaattccaccatattccacttccaaaaatattgcactcaaattagaaaatatctgttttggaaattagatccaaatataatttcctttcaaccttccctattcaaattatctccaaatatattttcctttcaaaatcttctattcaaatccctttcaaaattgagaaaccaattctacctaaattgggccgaaattctttttctccttcggcccaagccggcccaatacccagccgagccgccaacttgcaccgtgccgtgttcgtcctccgccgctgctgtgccttaccctcctcctccgccgttttctccttctctaagaaaccgtcgccgctgccctaccgtcgccgccaagtcgcgtcgatgctgtgccgtgttcctccttccccgccgcccaactccctggcagccgacgtgtgtgcgcgccgccgtcgacatccaatcggagcacagagccgacgccgtcgttttcttttccacggcgccgtcacgaagttttccttgatcttcccctctggaaccgccttgcgccaccgccttttgccgcctataagtattcggcgaggctgccccttttcccctccacaccatcgagctctccgagctccttctctctcctggccattaccggccaccaccatcattggctgatctccctcaccggagcaataccggccaataactcgcgccatcgagatttcctcgattagaggattccatttttccccttccccccttcctccacctctgaatcaaacctcaccgaagctctctctctcctcccagttcacgaccttgcatccgccgttccggccatttccctcactccctttgcaggacactgcccttcctaggtgcgctgcactcgggaacaccaccggccgccggcgtcgttgccttccggccactggagctctggcgcccctcctctccctcctgtcagtttgctcggcagtagaaggaagaggaggaagacgacgggaggaagaagaaaaggaaaaagaaaagaaggcagacactgacaggtgggcccctgcacagtaactcttcgtattttctctatttaattcaaatcctaatctttagaagcccatatctcctaaaccgtagatccgattccattcaaacttggacctaaattcatataaattcaaaatctatattttgataccaaatttgctattttaagattctgtttgaatttccttaatttattcaaatactattagaataaatatttgattaaatcttacaattgaatttacaacttaaatttatatttgcttttcaaatattttattttattccaaattacccctttagccactaaaaagccgccggttggaactttacgccttccatggggatgttcgcggtttactatcctcgacgtcggaccgttggttgtaaagcccgacaaaaaccaaacctaaggtcgaagtgctgctcctagcaccccacgccttgatgcgtatagcggtcggagcttcactattccctcgacctccacagcacgccgcacagttagctctcgggctcttttgatcttagccgctccgccgccactcacggttgtcggagtaacacttccgccccaccaaacctacaccaacctcatattcctctagccgatatactgtcggtcgacaccggctagagaagacactaaatctagtcattatgctgccaactctagcaacgactagcaaacaaccaaaccctagccgataccttgctagtcaaatcccagttgtcatccaaattccatactgtcacgccccgaactagtaccgaccggaactagcccgcgacgctccaaattaacctgttaattgataccagtcccaggaaacagtgctggtatcacaggaagacagattatcacagcaacagaggtctctttattatagagtagaggtacagtcatgttgggctgcggacagatcccgagctcacaactgcattacaaaagggaagcggaagccaggacttggaccaaacaacacaggcgcgacttgggaactaggccgaaaccctaaaactcatcgtagccggcttgctcctggaagaactcctcatcagcaggatccgcttcatcttcttcagcaactgggggggattatttatatagagcaagggtgagtacgggagtactcagcaagccatgggaaataagtgtttaatgcaggctacaaagaaagggctgctgtttttgcaattgattttatttgaactcttttctgaaaacaactaagtgagtgcttctcaaacgacacggatgagacagtgcgtctcgtccggtcggagtatgtgcaatgtatcagtctttagaattggccaagattggtacccggccaacatctttcaaacggccaaccgggccaacaactttcaaacggccacccgggcctagctgatcccatcagctgtagatttctcaaacatcgatcccctttttcacaacggcaatttcacaaggcagtagtcaaacaaaactacgctaggaatcacctcacatccgcccatgaccgtgggcacggctgttcgaacagtttgttaacctctgcagagggggtacactttacccacacgacattactaacccggatcacccagcccgtggggatcagccacgtcgggagacctccaagctttcatgacaaggcatttcgaaagccgacacaggtttaccatatgccgacgagaggggtcccagaccaacaacaggttaggtcccagaccatactgtgccaggaagcccaggggtcctccccgacaccaccccggcgaatccacatgtttctcggcatcaaggctcccctgataagctagttactcagccaggggtgtcccattccacccatgtggtcgtacttgtcttatgttcggatgaaaatccaaggaaacggtccttaagtgcaagagcggaaaaccgtacacccggtacgttccccggtccgcggttttggaaattcatttagttcgcaagcaccgacccaggtgtcgggttttccaagtcttttgtaaaacccaagttttacccaagttgtttttcaaattttaagtttgaaggcgaccgtcgatactcgcacagagtgcacgaatatcgaggcgcaactagatggttacaagggaacatggtataacaattaacaaaggaaggatcaaatgcaacaaactaggtaggtccgccaatctgccttgtagacgggacaaacagattaagtgcgatcctatcaatgcataatatttttcaagcaacataattaacttcaaatataggctcaagatgttcaaaggtggcttgccttgctcgagatcttgggcttgatcctcgaaatcctcgcactgcgggtcttcgggctccgaaactacacgcgaaacgggacaactcaacaaacggcgaaaataaagccctattaatgacctctaagcgtgccattagatagatctcgagatttgaggaattttggaagttgaacggagtcaaacggatttacggttgggaagatattgaatttctaagattattggatttttggtctaaaggaaaagaatttaattaaatcctttttgaaaaagaaaagaagagggggagggaaattagacttttcctcgggcggctagggcgcggcccgagagaaaaggggcggctcagccgagctaaatgggccggccggcccaaggcggcccaagcacgcgcgcgcgggaggggaggagagagagagccggtggaccgggctcacctcgcgtggtcccgggtgggacccgcttgtcggtgacacggttcaccgtgcggagcgagcacgcggcgcacgcgcgcgggcgggggagggacgcggtgcacgcgcgcggttcgcggtggaacggatgcggcgggcccacgcgcagcctcacggcttgcggtggaacgcgcgcacggggaggggctgaccggggtcgacttgacccggccttggccgagctggcgccgacgtggcgcctacgtggctgccacgcgggccggcaggaggtagacgacgacgccggccggaacggacggcggacgacagcggcgagcggcggagcgaaccacgacgatacaggcgaaagcgagcacaccgggtggttgcacgagacgaggggagacgagccaacggctcggattcaccggagggagcttgacggcggcgaatcgcggcggcggcaaacggcggcgggagaaggggaaaacggcgacgaggtcacgaggggccgattcccggcggcgagagcacctatgcggctacgggaatccgatgctagcgttggattaggaggaaacgcatcgggggaggccggcgacgagaggcgcttccgagctcgggcggcgacggtggcgagcacatggcgagcggcggcaacggtcggggcggcgccggctagctacggggaggctactcatgctactacccgagtctaaggggaggagatggagcgaggagggagaacggggagatgcactaccgtgcgggcgaggcgcagtgacgagaggctgacggcgcgggagtaatctctccggcctcgggccggggaagaggaaggagagggcgcgcccggagtccccttccgcgtccttgctcgtgccggctcctccgacacgcgcaacgacgaacggcgacggcgaacagagcacgggaggcggcggcaatggcgtggaggcgaatgggagaggaaaggaaagggggaggcttgggtttataggatggcaatgtcggtttgggaaccgacttagggcgggcaaaggagagggctagcgctcggcggtcgcggccaaagcggcgacagggaggagggaggaggatgacgccggcgggaggaaaaaggggaaaagagggagaggaaagagggcttgtcccttgcctcttcgggaaaaggacgagggagcggaggcgacgcggcagagggaggaggagctctgcctctgtcctttggcagcttgcgcgcggagtggcggggccgagacgatgacgacggcgatgacggcggggcggtgtggagcggagcggcgacacgggcgacaggcgcgggcaggcgcggcagaggctgacggcggcggcgaccaggcggtcggccaccacggcacgcgcgcgcggaaagcaacgggcggcgctgcggtttgagcggcgcggctcgggcacgcgcgctggcttgcggggccgagcagctgcgcggctgcaggtgcggcagggcagcggggccgggtgacgcggacggcgcaggcgcggcacgggcggcaaccacgcgggcgcgcgcgcgaacaacggcgcgcgggggccgacttcgcgggcggggagctcgccagggatggagacggggagagggagagcgagggggaggcgctcggcgcggcgcagctcacgcgcacgcgcgcgcggcgcgcgggcggagcggaagagggagggagacgagagagagagatagccgggcagggagggggagatgggccgagagagattcggcccatcgaacccgggggaggcaaaatagacttttgcggaggaattgatttgggaagggtttggattcgggattgaactcgacgatagatcggggatttgagatctgagatggcacggacactagacaacaagcaaagaaacaaatttcgcaattatggtttttaagagataattttcccgctaggcgccacgacggaacgggcgctacacataccctctacaatactatctatccaccatactcttagccacctactttctgtctaccagaacctacacataaaatatagagtctagccgatatgctacccaaaaatactaaaccctaggtatgatcctaccaaaacctaccatcagccgatacttgctatatatctgttcaactagttcaatcatccagtatacttcccatcctcctactaatcaaacccacacatgaaatataagcaagagtagttgcttaatcccctctagcctccaaccctctagaacctccgcataaaatatcaacacagtaatccatataccctataaaagagatagactataccctaaaccttagcccacataaccgtttatctctttcttactattttatggattttattgaaattggttcttcatctttcttagtagagtctattttattttggatggtaacctgtggtatttcgaggatcggataatcaggttgcctatctcggatttatttgcgttggagcaaggcaagttattattccttccctttgagcataaataccctacattctatattatattctatacactagccatacatgattttgaatgcataatctgaacatatagcgaaccagttatatgctagcttttgcttagccatgcttagttagaatatgcataaaatttaatgaacttagattgggacaatacgtaagatttggttgatttctgggtggctagtactgtcccggtcgatataattgccaccaaatacttatgtcaaacgaacgagtacgaccgtagcttctagaatggggacagacctagatattatgttaattaacaatgtggtacctctgtacagtggttccttttgtaagtcctcgcgcaggaggcaatcttatgccgagcagggcatcttatgatatttaccgaggcgcaggtaaatatattgattttcgctcatgatctgtgtgtgtgattttatggaaacctggttgagatgacgtggggtctctcatccagttctctctaaaaaccccgggaacgccagaactcctctcgctgctgataacgttacgttcagagcgcatggggactagagttcatggaacaggtgccactattgttaataacctaatattgtgccatgactaagctaatgaatattggcaagtcgtggactatgggtaaagcgtacatctactgcagtagaatattcatgaaactattcgaatagccgtgctcatggaattgagtaccgagactcatatggtatttggttagaaacttaattccagattttattaaatactgttgcatcaaacgcattgcaggatttctcctcctatattctctgctttctgcaagtaatcatagccctactcaaatactactaattcatacattcatattgaatataatagcttgctgagtacgttgtactcacccttgcttcaagccccacctttttcagagtccatttggagttcttatcgaagccgggagttcaatcacagaagttagttccctttaaacctagtcttgaagtctagtattgttagatggtttaattctatagcaaaacgacagagttgagtcatcatatagcttctgctgtattagttagccacaagtttgtaaatactcatatattttgtaataacatctcctctggagtcttgatcaaacgtatgcaatgaagatccagattgttgaacctgtatcaatctactgattcagggcttgatatagtctaaatatgtcggttaccgaatcattagttttgggacccgtcacacgtcgacagctattagtaccaactaatagtcgctgctccaatagtttaaccacgtgatacgcgcgcgatgaacttgcacattggaatacttcaaactagctaggattaacgcttcctctgtgtttggcgctggcgtggccaccagcgcgtgtcgacgcgtcagtgaggcgctagatggcgggtagttttcgtgagctctcctgcgtccgtgtactcacttggcgattttgcaaaaacgtccttgatttacctgataatttgttataggtccttagttctaacttttgcgtgcttacttacaggtcctctgtagaaaacaatattatatacgaagaagcgaaaaattggaaaatcgaaccgtgctctgaaaactagaagattaagagtgtttttgcaaaacaaaaacaaccctaacccccttcctcgaaccctagccgccaccattcatttgcctcctctccttctctcgctccgctctatctcctgcccaagcaatggccgccaccgcgtgccgcctccctcattctcttcttcccgcaagtgatgacctcccccgcgcactctctgctgccgtgcctgccgccgcccagcacgcgggccattgccgtcaccatcctctcgcttccgccgccgcatccgccaacgaggaggccgggaccgccggatccggtgacttcggcctcttcgctggcagatctggccactctaaggcgaggggaagccgacagccgccctctacgcccggtaccgcccctctctccctctcctctccatcctcttcatttccggatcggtggacgccggcgattaggcggcctagggttcatggtcaacaacagtggttgatccagtggctactttcccgatcgctcccctctctcctgtggcagcggcagtcacgattcgcgagattcctcatcccgcaccgtgcgctgatgatccctcttcgcctcctttcaccaatccgcggcaatggcacaatcgttgtcatcttcacgtgctcttcctccgttgcaatttgagacagagaggaattgcaatccctgacctggagcttttttggccatagatgtgaggatgaaagaaagagatgaagggggatgaacagagcaattgcaatcttctaccctcttgcttttcccatgcctcttgctgtttgtggctgcaatggtgagtactgaatctggtgttgacagtccttaaatcataatatctaaccgccaatatctgcatataatgaaataaaatatggtatctgtcgacgggggatatctgtagaccggataaatagggtattggagtacgttggtacaaggttctacacgatacgacatcataacgtataaaagataaggattatactggtttagccccctcgtgaagtaatagccctaatccagtttatatgggattgatatggaaaaccatagaatacaaagagaacagatggatccgacaataccggcgagatccttgtcgagatgattcaacgagatctcccgacggctttggctggcgtcctctggcttcatagactatggtgggtgtgctggcgctatgattcgatgatcatgaactcctcaaggggtatgccttttatactgtgaattgccttagtcttcaagtagaacccggagacaacaaaccctccacgatatagaattatccctatcttttccgagtaggattctgatagttactagcctgtaagggtattttccgtaatattttatatatttccttatcgcatacggaaacaaatcataagatatggggtataccaatccagtatacttggttaatcataggataggatgtatgtctcatccgtaaccctgacagtatccaacttagtggtagagattattactaatcaatttcactagtgttaatgaaatatgtgtatgtgggtattttaaggagaaaacacacccatcatgtgaggaaacacacctccgaccaattaggcgcgagtacacggatggaaggacccataagtcaggtgaaatcgtcatgaaatgagttataactgtcttaaccgtaatcaggacccactatatcaggagttcaggacccactatattatagaacttgctccaatgcaaagacctcgggctccacaggcacggaccatatgaaggggagaaaaacatgacaacccaactaacgatacggatggacgatcctcggttcctcaccacacatcctacctaacaaactcgagggaaagaaaaagtagtacagtactagtgcatatttattttagaacagactgaatcatcaacggaccagggaagcatggccttgaagcttctctggctgcatgccgacggacactgccagtgccacctctctctgctgctgcgcctcgtcgcttgcctcgcccttgtgctgctgctgccgccgccgccgcctgcccaagcggcgacggtggtcacccacctgccgggattcgatggtcctctacccttctacctggagaccgggtaagtgaactgaacaccctcacacaccaaagaatgctcattgctctgcttctttgcagaggcgtactctgagcctgaatctctgatcgattcaagagatcacatgaaactgcaggtacgtgggcgtggaggaggagaccgggacggagctcttctactacttcgtggagtcggagcggagccctcgcagcgacgtcgtgctgctgtggctgtcgggagggccgcggtgctcggtcttcagcggcttcgtgtacgaaataggttcgtagcccgtgcattcgcaactcggacatcatcgatgtattcgcaggttgcaattgggagaggcgactgggataatggggttcatgatgagcagtgccatgtttttttttttctcaggccctgtaatgtttgtcgcggaacgttacagcggcggcacggttccgcggttggagtataatccgtattcctggacgaaggtgagagcaaaatatttgtatatcagcactgatatagaagcgaattagtctataagtaggtctgtgtatatcaatacattttattttacccaattaagtctatagatgggttcatatattaacccacttacactcagtcatcaatttttctgctgaatatatatgtgggagagctacatatacataattatgtttatgagaaatttatttaactgtctttgatgctgctccatttggtttgtggttgattggacatttctagttggcaagcattctcttcgtggactcgcccgttggttccggtttttcatatgcgcacgatcccaaaggttatgatgttggagacatatcatcttctatgcaaattgtgaaatttctacgaaaggttgagacaaagcaagctagcgtctactataaacttccattaataaaaaatgttgagattttgtctctttatgcagtggctggatgatcatccaaagtacctttccaatccgttctatattggaggggattcatacgccggaaaggtggttcctcttatcacgcagtatctctctgaaggtaaatccatgtgttttctcttcgtgatgctagcaagcgacatattttaaaattagtatctccattctcaaatatatatgatgccagaatgcacatagacaaacatcaaaatcttaaatcattcataaatgcaaaaaggatttatacgtcttcaacttctgaccttccgtgagacagcgccgcagatccgtgtctcaccacatggccccctttgctaggagtacacatgagatgacatgggatgaagagtcgaagatgtagtggatcagggccatgctgtttacagggaaacctctcattggggtgggctagtcggtgttggggaataatcctattattaggttgttatcttaactaatgtaatttagatgactaaaatacccttgaggaaatgtcacttacatataacgaaccaagggcaataacgtaacttgtcgttgctctctcccccgttccatgcattttctcactaccatctatcctctcctcaactcctcttctacccggtattcaagcttgggctccttccaatggaggcgggagcccttgccctgcatattggattttatagtccaacagtcgggaacctacatgtacatagatagggatgcaatagagnaccccctggatctttcacagctaacactaagtagggtttactattttggttcgtaaatttctatcggggggatcaggaatttcggaatggaatgattcaacatttgatcaaattccaaatttgaataaatttgctaagttcccaaaaataaataaattttaatgttttttgaactttttctatccggtggaaatagtttcatgccatggcccatgggttgccctagaaaccgtgttggaggccatgcagaggatgtccacatagactggtcggggagggtttacaagtttaggatggaggcggttaattaaggaggctaacggttagaatgagaagatgagagtgcctgtcaccgaagtaagtgtggataagtgactttctgaaggtgagtggctaggagcacgattgactagactatcagatgaaattagagaaaatacatatatcaatagagaatgagtaattttgaccatttacgtggtttaaaaaaaccatttgtagtgagttacgttgacaaattgatatgtaagttaaaagatagttgcagggcttacaatcacggcttaattattattttataagagcataaagatttatgttcttgagctcttaattatagttttgtatgtgattcattaatgacaattgtattgtgcttcaggaattgaagaaatgcgtcatccaatcattaatttaaaggttgtattttctagtgtgcagataatcacttagatgacaaaatagaaattatatatgtatctagcttgttaactcttgttgcttttattcagggttatctagtcggcaatcctagtgcaggagataagattgatgtgaactctagggttccatactctcattcatttggagtgatatctgaccaattgtatgaggtaatcttatatttttttactgaagtgtagcccactaaaatcctaacgatgtaatgtcagtgaagatacttattcttttccccttctatttatcaaaaggctgccctggcaaattgtaaaggggattatgaaaacccaacgaacaaaccatgcactgacgtaatgcagaccattaacaatgtaagctttgacatctatatatatatatatataatatatatatatatatatatatatatatatatatatatatatgcccttattgtctgaacttaccgtctagctagctttgtcatctatatatataccttctccacagctcatgtcagaagtattggaaccagcatgtccctttgactggccatggccaatgccaggaagagatgcttccaataggaagtctctaaccgaggagcactattggttaggtgacccacctgttgaacctcctttcagttgttttgctgtaagtcactatttattgtgttttggatttttaatttcttgcaaatgtaattcgaatgaggagaaagcacctacatttccattgagttttctttacaaacgattgccaaattttgcttttaggcataccgatactacctgtcttacttctgggcaaacgacaatgccaccagagctgctctcgggataaaggaggtaaacttccttatctcttggtcgtgagccttttactattctctctttgtcaaaaattactaactttgactagcaatttttaaaaatttatatagtttaacaacataatactatgtttccagattcaccatgagaaatgttttcagaatatatagttcatatgttgctaaactattattgattttttataaattgatagtcaaaattagaaatgtttaacttagaacaaaa

SEQ ID NO: 7942 - DNA, 12207 bp, Oryza sativa
ccgcccaactccagcggcgcccgccccttgctccgcttcggccgcgcatctcagcacgcttcgcccgcgcgcccgtcttggccccgtcgcttacgcgctgaagaagacaagagaagtgaagaaaataaaagagaaaagagaagaaaagggaaaaaaagagatgaccacgtgggtccacgctgactcagccgccacgtagaataaaaccggggtcaaaaccatcgaaggagctattgtgactggttttgattagttaagggacgccggatatccgattttgcggttagaggatgattttgtaactcgatgacaaagttgaggaacctttggtgtactttttcccttcccactttcatgcggcctgcagattgcagatccaactcttcggccttctattccttcaaccgcggcagcccatatattcttgccacacaactatatataggcttgaatgcttgattacatttatgacccatgaatgaagccatgtgcctgcatgcaactaaccgccatcaaatgtgttaggtttctcttcttagcgtctaaattaagctgaaacaactgatctgatccttctttccccgacgctagtcgctagatgctggttcggttaggttgttgtatcttgtgctaaagaggccagtacatgaaaggtatgcatgtcaagttgtcaacacgataagttgcaaattattgtctagctaactcctaatggagctttttaataggtggatagcactaacaaaaaaaatcatcctttctgcaagggacaaatgtgattatggtgttaacatttgaccgactaatagtgaatttgatttaagatgcattttgttttacctagaactcattctctaatatatctagcgaagaataaacacgtgatatcgttattgtgattttgatttaagatgcattttgttttacctataactcaatctctaatctagcgaagaataaacacgtgacatcgttattgtgccacctcgattaatgattattgagtaaattacagtttaggcctaatttttccctagtgcaacatgtgaccttttatcagttttggaccaccctttatcctgacttttcacttttgacttgttaattttactacgtggcactttggttcataaaactttctttcttatctattaacatctagctcatcctatgctaaactaaccgtgggagttgtttcttctttgtatgattaaagtacaattctttgtatgcttgctgcagcccgtgcctcgcaagatccaagcaaatttacatataaagtaagatttaagacaaacttggcatgttaattaagagatacggagtaccgtacgcgtgtagaattagaatcaatctctagctagggcctttacatgcaaacagactcaaaagagttttgtccgatttcctaaaccaattaactagagttagagatgaattaggctataatacacatatataaataaagcagcgggcaacgaaccactgtagaaccgtaatttggatgcgtttttgttgatatgaagatagatgctagcggcgagcgacggaaatccgaagcagcgggtcaagccgtgcggctgcacagtgagccgtatttgggtgatgcacacgtcagcaaccagaaaagcatgatggcatgtgcacggatttttatttgattttgaaataataacacaataaaaaatgaaagaagagttcatgtagaacacaattaaagattaattgaaatccgtaataaaaaataaaatagatttagaaactagaaaaatcaaatataagagttcaagtaaaaatacattttacgaacaactgaaattaggaataaaaaaataagaaatattagaagaataattcatatagacacagtatgagattaataaaaaatatgagattaataaggaatattaaaagaagagtgcatataagagctcaatatgagattaataaaaatttggaataaaaataaataaatccgaaattagcaaaagaaaataaaagaagagttcaagtagaaatacaatttaaaattagctgaaattcgaaattaaaaataagcaatattgaaagaagaatccatataaaaacccaatacgagattaattaaaatttagaataaaaaataaaataatatccaaaattagaaaatttaaaagagagttcaagtaggaatacaattttgaaacaactgaaattgaaaataaaaaataaaaacattaaaagaacacaatacggtaataactattttttttaaaaaaatctgaaattagaaaaagaaaaaaaagatttcaattagtaatacaatttataaataactaaattttttgataaaaataaagattattgaaataaaaaaccatctaaaacacataacgagataaattaaataacatgcctataaaagagtagagtggtggcggttgatacgacatataaaaattgttaataaaacaccaaatagaatcctaatgacgattaaaaggagggacgtcaagcaggccgtgaagcaaacgagtaaggcggttgccgggacgtctagaaagaaaaaaaaaacaaaccccattgataatcatattcgatttttaaatctcaatgacaataaaaaggagaagcagcgggcggggtgcataagagtatacttgcagagccgccgacggctgacgggacttctagaaaataaaaaatgaattccaacgatatttatgttcgatttttagaatcataatgacaataaagaatagacggcggacgggctatagaggggcatagtggcatcgtttgatgggacttctaaaaaatataaaaaatggaactacaagtccaatttttaaaggttcgaaacttctaaaaagtaaaaaaaaaacactaataatcatgttcgattttaaaatctcaatgacaataaagaaggaatgctgcgggcgagctatagaggagtacaatggcaaagccatagacattttggcgagacttcttgaaagtaaaattgaacccagacaataattatgttcgatttttaaaatctcaatgacaataaagagaagagacattagacgggccgtagaggagtataatgacaacgtttgacaagacatctagaaattataaaaatgaaacccaacatgacactaaactctaaaaactataaaatccaatttttaaaggtttcaagaagaataaaaagaaatagtggtagatcaagcaagcaaataaagaaggagatgacataaggggtagcaactggtgtgacttttaaaaactatataattagaaacacgagatgataagggttggtctttcaaagtcttaagataataagatagctatctaataaattttaagtaaaatcatataaaaaatatataattttgtttgggtgctagccgcgcaattgcacgggccatccagctagttatattgatttactcaatataatgagcacattacatatgttgatgatgatcggaatctgaattcagagatgccgtattgtgcgcgacggcacattagaggggtccaccagccagccaccgttttgccataatgaaggattccttgggccgattttcgggaggaatatggcaaccaccctacatccataggaaaacaaccaaatagtcttgtgttaggcatgaataccagtgacatctaattctccatttaatgtatgaacaaaaatggtgaatggacccaacgaaggggtagagaacgagacaaacctttattgtcgcaaaggtcaggttgttagcatacttgattgtgaatctggtgtaagaaaacaacattcacctctaatcaggtcaagaagaaattttagcaaactaagctaccaattgtaagaagtactatttttttcccattctcttttttcatcttcatattttgttaaacatagtgtcaattttatgtctaatttcgttcatattaaaaatgaaagtgactaataaatgatgatgcaatcgattgttttcagagataagaccagatggggatgcaagacgataggaaaatcacttaaccctgcagcctggccatcaaggtgccatgctctccaatcatcaacaatggaaaagtttaatgatcttatccatgcctgcgtgcctgagaatggcacaatagggtcgtggtctccgctgcacccacataagtttttttttttttacagagcattaagcgtaagcgatcaggaagattcaaaacaatatgtaaataagaaatgagcctgctgaaaatattgattatgctaattgaacctgtacacaagagcacggtaacccctggtggtgacgttgaaatggcattctatgctgcttggaagatcacgtgtgtaaggaagacccgtagggcaccttatccattccgtcaccgttccctatttggaaggtgatttattattgacttgtagattaattagcccctccgttttaaattatttatcgctttaattttgttctaagttaaacatttctaattttgactatcaatttataaaaaatcaataatagtttagcaacatatgaactatatattctgaaaacatttctcatggtgaatctggaaacatagtattatgttgttaaactatataaatttttaaaaattgctagtcaaagttagtaatttttgacaaagagagaatagtaaaaggctcacgaccaagagataaggaagtttacctcctttatcccgagagcagctctggtggcattgtcgtttgcccagaagtaagacaggtagtatcggtatgcctaaaagcaaaatttggcaatcgtttgtaaagaaaactcaatggaaatgtaggtgctttctcctcattcgaattacatttgcaagaaattaaaaatccaaaacacaataaatagtgacttacagcaaaacaactgaaaggaggttcaacaggtgggtcacctaaccaatagtgctcctcggttagagacttcctattggaagcatctcttcctggcattggccatggccagtcaaagggacatgctggttccaatacttctgacatgagctgtggagaaggtatatatatagatgacaaagctagctagacggtaagttcagacaataagggcaatatatatatagatatatatagatgtcaaagcttacattgttaatggtctgcattacgtcagtgcatggtttgttcgttgggttttcataatcccctttacaatttgccagggcagccttttgataaatagaaggggaaaagaataagtatcttcactgacattacatcgttaggattttagtgggctacacttcagtaaaaaaatataagattacctcatacaattggtcagatatcactccaaatgaatgagagtatggaaccctagagttcacatcaatcttatctcctgcactaggattgccgactagataaccctgaataaaagcaacaagagttaacaagctagatacatatataatttctattttgtcatctaagtgattatctgcacactagaaaatacaacctttaaattaatgattggatgacgcatttcttcaattcctgaagcacaatacaattgtcattaatgaatcacatacaaaactataattaagagctcaagaacataaatctttatgctcttataaaataataattaagccgtgattgtaagccctgcaactatcttttaacttacatatcaatttgtcaacgtaactcactacaaatggtttttttaaaccacgtaaatggtcaaaattactcattctctattgatatatgtattttctctaatttcatctgatagtctagtcaatcgtgctcctagccactcaccttcagaaagtcacttatccacacttacttcggtgacaggcactctcatcttctcattctaaccgttagcctccttaattaaccgcctccatcctaaacttgtaaaccctccccgaccagtctatgtggacatcctctgcatggcctccaacacggtttctagggcaacccatgggccatggcatgaaactatttccaccggatagaaaaagttcaaaaaacattaaaatttatttatttttgtgaacttagcaaatttattcaaatttggaatttgatcaaatgttgaatcattccattccgaaattcctgatccccccgatagaaatttacgaaccaaaatagtaaaccctacttagtgttagctgtgaaagatccagggggtctctattgcatccctatctatgtacatgtaggttcccgactgttggactataaaatccaatatgcagggcaagggctcccgcctccattggaaggagcccaagcttgaataccgggtagaagaggagttgaggagaggatagatggtagtgagaaaatgcatggaacgggggagagagcaacgacaagttacgttattgcccttggttcgttatatgtaagtgacatttcctcaagggtattttagtcatctaaattacattagttaagataacaacctaataataggattattccccaacaccgactagcccaccccaatgagaggtttccctgtaaacagcatggccctgatccactacatcttcgactcttcatcccatgtcatctcatgtgtactcctagcaaagggggccatgtggtgagacacggatctgcggcgctgtctcacggaaggtcagaagttgaagacgtataaatcctttttgcatttatgaatgatttaagattttgatgtttgtctatgtgcattctggcatcatatatatttgagaatggagatactaattttaaaatatgtcgcttgctagcatcacgaagagaaaacacatggatttaccttcagagagatactgcgtgataagaggaaccacctttccggcgtatgaatcccctccaatatagaacggattggaaaggtactttggatgatcatccagccactgcataaagagacaaaatctcaacattttttattaatggaagtttatagtagacgctagcttgctttgtctcaacctttcgtagaaatttcacaatttgcatagaagatgatatgtctccaacatcataacctttgggatcgtgcgcatatgaaaaaccggaaccaacgggcgagtccacgaagagaatgcttgccaactagaaatgtccaatcaaccacaaaccaaatggagcagcatcaaagacagttaaataaatttctcataaacataattatgtatatgtagctctcccacatatatattcagcagaaaaattgatgactgagtgtaagtgggttaatatatgaacccatctatagacttaattgggtaaaataaaatgtattgatatacacagacctacttatagactaattcgcttctatatcagtgctgatatacaaatattttgctctcaccttcgtccaggaatacggattatactccaaccgcggaaccgtgccgccgctgtaacgttccgcgacaaacattacagggcctgagaaaaaaaaaaacatggcactgctcatcatgaaccccattatcccagtcgcctctcccaattgcaacctgcgaatacatcgatgatgtccgagttgcgaatgcacgggctacgaacctatttcgtacacgaagccgctgaagaccgagcaccgcggccctcccgacagccacagcagcacgacgtcgctgcgagggctccgctccgactccacgaagtagtagaagagctccgtcccggtctcctcctccacgcccacgtacctgcagtttcatgtgatctcttgaatcgatcagagattcaggctcagagtacgcctctgcaaagaagcagagcaatgagcattctttggtgtgtgagggtgttcagttcacttacccggtctccaggtagaagggtagaggaccatcgaatcccggcaggtgggtgaccaccgtcgccgcttgggcaggcggcggcggcggcagcagcagcacaagggcgaggcaagcgacgaggcgcagcagcagagagaggtggcactggcagtgtccgtcggcatgcagccagagaagcttcaaggccatgcttccctggtccgttgatgattcagtctgttctaaaataaatatgcactagtactgtactactttttctttccctcgagtttgttaggtaggatgtgtggtgaggaaccgaggatcgtccatccgtatcgttagttgggttgtcatgtttttctccccttcatatggtccgtgcctgtggagcccgaggtctttgcattggagcaagttctataatatagtgggtcctgaactcctgatatagtgggtcctgattacggttaagacagttataactcatttcatgacgatttcacctgacttatgggtccttccatccgtgtactcgcgcctaattggtcggaggtgtgtttcctcacatgatgggtgtgttttctccttaaaatacccacatacacatatttcattaacactagtgaaattgattagtaataatctctaccactaagttggatactgtcagggttacggatgagacatacatcctatcctatgattaaccaagtatactggattggtataccccatatcttatgatttgtttccgtatgcgataaggaaatatataaaatattacggaaaatacccttacaggctagtaactatcagaatcctactcggaaaagatagggataattctatatcgtggagggtttgttgtctccgggttctacttgaagactaaggcaattcacagtataaaaggcataccccttgaggagttcatgatcatcgaatcatagcgccagcacacccaccatagtctatgaagccagaggacgccagccaaagccgtcgggagatctcgttgaatcatctcgacaaggatctcgccggtattgtcggatccatctgttctctttgtattctatggttttccatatcaatcccatataaactggattagggctattacttcacgagggggctaaaccagtataatccttatcttttatacgttatgatgtcgtatcgtgtagaaccttgtaccaacgtactccaataccctatttatccggtctacagatatcccccgtcgacagataccatattttatttcattatatgcagatattggcggttagatattatgatttaaggactgtcaacaccagattcagtactcaccattgcagccacaaacagcaagaggcatgggaaaagcaagagggtagaagattgcaattgctctgttcatcccccttcatctctttctttcatcctcacatctatggccaaaaaagctccaggtcagggattgcaattcctctctgtctcaaattgcaacggaggaagagcacgtgaagatgacaacgattgtgccattgccgcggattggtgaaaggaggcgaagagggatcatcagcgcacggtgcgggatgaggaatctcgcgaatcgtgactgccgctgccacaggagagaggggagcgatcgggaaagtagccactggatcaaccactgttgttgaccatgaaccctaggccgcctaatcgccggcgtccaccgatccggaaatgaagaggatggagaggagagggagagaggggcggtaccgggcgtagagggcggctgtcggcttcccctcgccttagagtggccagatctgccagcgaagaggccgaagtcaccggatccggcggtcccggcctcctcgttggcggatgcggcggcggaagcgagaggatggtgacggcaatggcccgcgtgctgggcggcggcaggcacggcagcagagagtgcgcgggggaggtcatcacttgcgggaagaagagaatgagggaggcggcacgcggtggcggccattgcttgggcaggagatagagcggagcgagagaaggagaggaggcaaatgaatggtggcggctagggttcgaggaagggggttagggttgtttttgttttgcaaaaacactcttaatcttctagttttcagagcacggttcgattttccaatttttcgcttcttcgtatataatattgttttctacagaggacctgtaagtaagcacgcaaaagttagaactaaggacctataacaaattatcaggtaaatcaaggacgtttttgcaaaatcgccaagtgagtacacggacgcaggagagctcacgaaaactacccgccatctagcgcctcactgacgcgtcgacacgcgctggtggccacgccagcgccaaacacagaggaagcgttaatcctagctagtttgaagtattccaatgtgcaagttcatcgcgcgcgtatcacgtggttaaactattggagcagcgactattagttggtactaatagctgtcgacgtgtgacgggtcccaaaactaatgattcggtaaccgacatatttagactatatcaagccctgaatcagtagattgatacaggttcaacaatctggatcttcattgcatacgtttgatcaagactccagaggagatgttattacaaaatatatgagtatttacaaacttgtggctaactaatacagcagaagctatatgatgactcaactctgtcgttttgctatagaattaaaccatctaacaatactagacttcaagactaggtttaaagggaactaacttctgtgattgaactcccggcttcgataagaactccaaatggactctgaaaaaggtggggcttgaagcaagggtgagtacaacgtactcagcaagctattatattcaatatgaatgtatgaattagtagtatttgagtagggctatgattacttgcagaaagcagagaatataggaggagaaatcctgcaatgcgtttgatgcaacagtatttaataaaatctggaattaagtttctaaccaaataccatatgagtctcggtactcaattccatgagcacggctattcgaatagtttcatgaatattctactgcagtagatgtacgctttacccatagtccacgacttgccaatattcattagcttagtcatggcacaatattaggttattaacaatagtggcacctgttccatgaactctagtccccatgcgctctgaacgtaacgttatcagcagcgagaggagttctggcgttcccggggtttttagagagaactggatgagagaccccacgtcatctcaaccaggtttccataaaatcacacacacagatcatgagcgaaaatcaatatatttacctgcgcctcggtaaatatcataagatgccctgctcggcataagattgcctcctgcgcgaggacttacaaaaggaaccactgtacagaggtaccacattgttaattaacataatatctaggtctgtccccattctagaagctacggtcgtactcgttcgtttgacataagtatttggtggcaattatatcgaccgggacagtactagccacccagaaatcaaccaaatcttacgtattgtcccaatctaagttcattaaattttatgcatattctaactaagcatggctaagcaaaagctagcatataactggttcgctatatgttcagattatgcattcaaaatcatgtatggctagtgtatagaatataatatagaatgtagggtatttatgctcaaagggaaggaataataacttgccttgctccaacgcaaataaatccgagataggcaacctgattatccgatcctcgaaataccacaggttaccatccaaaataaaatagactctactaagaaagatgaagaaccaatttcaataaaatccataaaatagtaagaaagagataaacggttatgtgggctaaggtttagggtatagtctatctcttttatagggtatatggattactgtgttgatattttatgcggaggttctagagggttggaggctagaggggattaagcaactactcttgcttatatttcatgtgtgggtttgattagtaggaggatgggaagtatactggatgattgaactagttgaacagatatatagcaagtatcggctgatggtaggttttggtaggatcatacctagggtttagtatttttgggtagcatatcggctagactctatattttatgtgtaggttctggtagacagaaagtaggtggctaagagtatggtggatagatagtattgtagagggtatgtgtagcgcccgttccgtcgtggcgcctagcgggaaaattatctcttaaaaaccataattgcaaatttgtttctttgcttgttgtctagtgtccg

SEQ ID NO: 7943 - DNA, 25345 bp, Oryza sativa
  unsure (1)..(25345): unsure at all n locations
tgcacaaacacacggctttatataaaagtccattaaacttcttgcaaacacttctaatccatcacgtggcatcctatatatactcctaagccatcatatgacgctctaataaattaaaaaatcatataattttgataaaaggaaacacatctcatcattgattttcacttgaattgttgatatgttattttaggctattggatttatctcatcaaaagagaacaacaggacctcccccgttaggttagattgatctaattacccagagcctcaaaattaaagaaaaaaaattctatgatgcacctcctgcggttgcaggagatcgccatcaccgtgtcaagtttctctgatgagctacaactttatatcgtatacaacacaacttcaactttataaacatggatccgtcccattcatattttcatgtgctaaattgttcacctagacaaaccaacaattgatatatactggagcatagtcgtaaaacatgccatagacatataataccacatataagcaacaaacaactaggggtgaattagttttccggcaagttcaagtaaaaccgaatttacgtgtggcgcgatgcatacaaacagaggtttaattaggaggtaaaaatatgtagtataaaccacatatattgcaaacctaaaaactatcacatgatataaaaataaaagtttgagatttatccacatcatcatgagtaaaacttttatttccaatatacctccacaaatgcttgtaggtcatcttacagcaatgcacataataaactaccatgattgtttaaattcctaagtctttccaacaaagaagataaaatagggtagatattgtgggcttcgcattgaatattatgcacaagttgcgtgaacacaccgtgtaaaccaactgacacacacacacacacacacatattatattgggagtaagaaaaagacatttatactcttaagaccgtcagaatttttgttacggataaaatataatgaatttaagggtaacactttacacataagtgtaataaaaaatgcctaatgtacattagctaaaaaaagttataaagagtgattgtctggagtatataaattcctaatgtttaattataaattttagagtaaaaatatttaaatcatgacgacactgatgaaaagtcgacactgcaataataatcacatatgcggagttatttttagctatgaaataatattcgtaggctatgtgaaatctcaggcactcttccccttaattttttttctcccctaaaagaataatctcacgcactctacacaaaacaatgagttgtttcccacaatccaaaatcaatttggactacaatagacttttttgtttggaatatatatatatatattcatatacactaaggcacccattaaaaatgcagcatatagaaaaaaaataccaggtgcatcttagcaacgagatacaataataagttgtaaaatatctagcaaattttactacataccagaaagacctatcaagttctatcaattgttggcaaacaataatatgggcacaagtaccattattttcacatagggattttcaactttttaattgtatgaatagttattttcatcacaactacgcaaatgatttttgtgagcattcttttcacatttggctcaaatgtgcagccttctatgtggtgagtctcttgcctcaaactcatgagtcatctttgaaaatattttttgcaatccttttacacaaaacaattttagtggagtgcttaaaccgcaatgtagcgttgaagcttttacacataaaactattagtggagcgcttaacccgtaagatagtattgaatcgatctactccnttttgttatagaanaacatagctcaatttacatcataatgaattttattctttcaaaatttttatatttctcgtcatacaagtcatatactcatattaaacacaccaagaggtgaagataatgataaatcaattcagtaaattctatcctatcctttaaagtacctccatgggtttctccacaatctgcatgtataagcgcctttaaggtggcaatacaaaatcaatagcctttcttataataatatgattaaaagttattttttttctaataaattattattttaagattcaggttgactaggtcttttcttcaaaataccgtagggtttcacatattaaaaagaagcgctatacaagatatgtatatttgatcaattaaaaagaggggatagcaggatggttaaaaaaaaacttacgagcaataaaagtttctcgagacttctcaaggaaaaagtaaacaataaaaattcaattaaaatgaaaaatgctttactttaatttcaacttattttgttagaactatttccaaaacaaaataatatacatgcccgcgcgaatgcgcgggctaccttgctagttggtagtaaagcatgatggtttgttttattaactaactccaaagtccgctttagcgcattacctttggcccttttgctctactaaaactaggcggtaaagaaaagaataatcttttgctatatgccaggattccaatgggttgcactccgtacaaatggaaccggaggatcgaatttgttcgatgttactgttcgtgatatatgacctggaaccatatatttttggatgaatgtagtactaatttttagagaagtataaacccatttacattcgtagaatcaaagacttcgtaggttgatgtctcctgaaatgcaggaacaatgaacagggttgttatatatttggttgctactatattttaggctaagatttggcatgccaattttttgttggccacaattttaacaagatctgacaaaaaattgtgcctatgacatatgaacaccaggtaaagttttttcaagccaaatgtgtaatagcaacctaacaatacagtaagctggtcaaacttccttatcaaagatatagcaaaatgtggctactactaaccaaacatccccggaagtgacaaatgtgccaattaagtagattacatgaactagctgctaaccaatatgttacgcggttatttgttatttatattttaaaataaaaaatatttatgttttaatgattttgaaattcgtaattaataacaatcgagttatactcggcctataattttagttgtaacagttctatatttgacaagtctagctaatatttagaataaataaaactagtagattgtattcatattggagtctcaattttcataacatgcatatatatgggtttttacgggatccatgatatttaatgcaaacctaccatgatctatataatcaagtactactagattttttttagttgatataagagtttttatggcgttcacgaaaaaaagtaagagtttttatgatgtgttcgattaatttaggtgtagtagatggatgtattatttggtatcagaataattttatagtggacatgaaggtgggggctacgggtatacggtcttcagtcgaagtgatactgtacgatctactgtatcctaattcttacaggtaactgaaaacttcttggcaacattagagcaccactgattacgttgatgagcacggtactgcagctcagttgcaaatgcaaattctttatgtcaaatactacaacttctcttatttcttccagatcaagaaaaaaaagagttaagcaaaggccgtatatatacagcacagcatacaaatgaatacctacaaacacataccagttgcacacacacgctgctgcagtgtgggcaacggaaaaacaaagcctgtagtaattcacaggcacacgagctagctagagctagcgctcgagccgatcttcaataatctccaggacggctgggtagacgcgcagggctgttcgccgccgtcgatcgagctgaacacctatggattatattacgtgtgtacagcaaacaagccgatgccggagacgacatatttttttagataatagaaatggattacatctccggcttctgtcatacacatagccatagccggagacgacacatgccgcgataatatttctaccgggcccagaccgggatgccgtgcgggctctgccgccgctgcggctgctgctctcccctcgcggcggcgggctgcatcttcgccctcttcttcatcatctccgacgcgtcgtcggcgtcgatctggcgctgcctgcactcctcgctgcagaacggggtgtcgcctctgcacgcgcgcacaaagcagaaaaccaccggtcacaaaccagaacgcgcgtgcggcaagctacaacgtacactacaaactccatgcggcgctcacctgtacatgaagatatccttgttcccggcaagcatccgcccgcaaaggaagcaggcgtcgaggtagtggtggtggcgcccgcggagctcgccggcgacgtcgacgtcgcgggacgtcgtgcgccgggggctcggcgacggtgagactgactcgaggttgccaacgggctccaactccaaggtggcggagaagtagaagtaatcctccatggctcggatcggtggcctcttcttaacttgctgctgcttcttaattggttgcaaggggggagacagagacagttgagatctctgggctgaagaggactgtggttatatagaggagaggagtgaccggagtttcagtttgcctcctctgagtctgttctcatctagttttgttagtgtgttctaaaattttggcggacgatgaattacggatgaaatcaattatttaatgacacagatgaaaaaattaaatactagaaaattgagagatatgtttaaaaataatctaaaaagtgctgaagatatatatttttttaaaaaggtgacattcaataggtcgagaagtgcacccacaataatccataacccctgttctgaatggcttatggacaacggattattgccggtatgttttctaagcttttaaacggtaagatcttctttttttttaaaaaaaatcatcagtttcttagtaaacgtttttaatcaacttatcaacttaattaatttacaatatatacagctcattagttttttcttttagataattgttataaactcggtttcattcaccatccatcagactatcactatttttgaaaaaacccttggactaacaatagattgctcttgtcgatcatctctccagcagtttttatatcattgatgctcttcttagctgaacttgttttaaatacatttgatccgtgaacgtgtatcattaccagagtgacgataaaattaaagatagtacagaagaatgataaaaagacaaattattaattacgtccgcggagactttgcattaacgtagaaatggtaaaaatcaatcctgaggtcatgcataacgcatagctgaacattttattatcatattaaaaacaaccacgttcgtatgcatgtggcgttactatgatcttcccttgccaaaagtgaaaattatattgctgcaggaaaacgacaagctaatcgtaaactcattgtcccaattgaagtctttgttaaaagcatggggagtaagatgtaagaatacatccatcctccaacgaaaggttggatcctccaaattaaagaaagcaagacagaaaaaaaattgtggttattaccaggttaggcatctagctggccaagtggcaacaaatctaaagctggctcctttgagtgctatgtggcgaatcaggtggccgagcaagagcaaaaccagggcgcagggtggcaattggcatggtcttctgatgatattataaggagcagctacacctcgtgggctcacgacccctatattctatgcgttcgcccctttccatttctcggcccctttactttgtagcacacggcccgtccaatttgatggatagaatagttttgtttctagaagtcatcacttgctcctggtttttgggtggttttgtgtgttgagcagtgcagcatgcttgcttggaacaccactaacatagttgaattagtatgcaaattacatgtttaacttttgttgcaagtgaaataaactaagatattttagtcaaacagataggtggtcagccatggcgtaattctgtattggaggtcaaaaaatcctacaccctccgtccaagttcatttctagcatctctcatttatctcaaaataagtttactttttataatcattgaatcagaatatataaaagtagaggataattatattaagagaaaattcatgaaatgccattgacaaacactctaattccagaaatgccattgacaagcgcaacttcctcaaaatgccatcgtacaagcgcttttctccccgaaatgccatcacaaccatagtgctgttaactcctatccgttaagttgtatgaaaagacaatcttacccttgggcaacctttttgctaaaacaacatcattttgtattgtttgctcacagaacattattttgaattgatgcatatttaaattcacagacgtgtattattttgctaccaatcaaattatttcaaaattaaattcacaaattttggcatcaaaattatttcagaaattttgctatcaattatcagggttgtgatatgagcaaaaataggggcatcaattatcagggcaatacacacagaaagtaccaatcatgatcaacatgaattttcacaaaataaagggttcacagtacttagcatcacaacccaatataaagagtacttagcatcacaacccaatataaatggttcacagtacttagcatcacaacccaatacaagagtactttgcatgcttaatacatcttagttcagacaatacatgtgacagtaagaaactcaatcaattattctcctcttgcttctagtccccattgctggactactcttcttgcttctagttctcattgctagactgtcatgtggtacttcattattcttcctccttttggcaggtagagtagtaggttgtactgttggggatggttttctcttgattttcttgtctttgtcctccttcttccccttccccttccccttctccttccccttccccttggcaacaggtgcagcaacatgttgtagtggcacaatggtcatagagctgaaaaaaaaagttatttagcaatcgatttaagttggcattaatcaagtgcaatgggtacagtaaaaaacaaaaatggctaccttggtaaggatggcaaaggctcattattagactcaagtccagaatcactaattgtcccaccaacggcactttaaaatcatatattacacattagttaagttgctgcagcctaggagcaataaaaggttaacaaagtggaaagtggaagatagaaatttcaccttgataggctagccaagatttgacttgacatagcagtaggatcaatgttttcagtggcaacagtggcagcagaagtagattttggttttgatttccttttcagttttttacaagaaaatgaaaataagcgaagtttgttggcaaaggaaatcaacatgaagatatggatatagaaatcacctttgttttgccactaaagcataggcctctttggcttctggatctgcttctttgcaacttgtccatctatggccataatttttgtagataggacacttttgctgacatttggtacctgcttttctcttgcccttcttattcccctcaaccccacctttgtgccttaaagttttgggcctccctgcagaactcttcaatattggaggataaagaaagaaatcacgtgtattctttggccaatgggaaatgtcagttagagctggaatgcgggctgcatatgtggctttaaatctggccacactatagcattcatcaacataatcatgcacctgcacccccctaatagatgtgatgaagcacaaggcatgagcacaagctttccagacacttgccactctctacatgtacatgtcttctcttcaagatcaactacatgcctcttaccaccttttgtgaaaatgcaataataagattatgtccatcaacattaataatgggaattgcaagtataaaaattcaatacgacatacaacataacattacctgggtctttatcagtaacctcggcaatgaaatcatcacttctatctaggtcaaagtttagtcctctacttttctcaagaagctccttcatgacacaaggtagaatgatattaccttccaatttggctaccaccttcttcctcacacgaaatttatccatcaccttttttctaatcttatcaaccaattcgtatggcataagacctttatgctttctgatccaattgttgaagcactccgctaaattgttggtgatgtaatcaaccttagagtgcgtggagaactcgcttcgcatccataacctacaaaataagcaaagacaaaatattacattcaacttcagttcacgtactgaaaaaacaagtattcgactaaaaaaagataccttttgtggtgggttttcaagtatgctatagcttcaggctttacttcacctattgaagccatgtgttcatcgaagtctataggagtccatgcatatgctgctggccataaatgttcctcaaaaactttgccatggaacttgagcttgaaattggacacaaggtgtcgcatgcattccctatgctctgcataaccaaatacctctttaatagcatagtcaatgccttttcatgcatctgaacaaattgatagtctagctggttcaccaatagcttcatgcagtttctccatgaaccaaagccatgtctcactagtctccgagtcaataataccataggccactgggtacagccaattgtgtccatcaatagcacatgcagttgctagctgacctctatactttcctgtcaagtgtgtactgtcaattgctaagtatggcctacaacctcctaaaaaaccttgaatgcaagggtgtagtgccacaaatagccttgtgaatctcttcttgtccttgaatgtcatatggtcaatggcgactatacttcctggggacctcttctcgatctccgccttccaaccatatagcttgtcaaagctactatcccagtcaccatacaatttactcatagctaattccctcccagaatgtactctcttgtaggggatggttaacttatgtgtgtcctttatcctcctttgcaattccatggccccaacactagcatcctcacgtagccaccccataaccttatcacaaacccacgctctctttgcattcctgaccttctcgctttttctagtactaagacaaccatggtacatctcatggaccttaatctgaaaaagaaaaaatatgcaattagataagaaaataacaaaatatgcaatgtaacacattaatgtaacacatacctgcactgctggaccaccatgaatagttgacgcatgaagcctccatccacatccttctttgatacatctagctctgaatctactaggatcagttttttcaacaaaaaaactcgaattctttcttaatggaatattgagccacagccaatctaaactcacacattgaaggataaatagtctcaacagtcatgggtgggttttctttgtcatatgcaacttgtgggattactggatctgcctgagcatctcgtgcaatccactcttcatcatcactatcagtgatactcagatcatctcccccttctacctcaggcacattatcagtttcagcaatagagtcatcactctcagatgaagagtcatcactctccgatgaagagtcatcaataccaactgagtattgtttctcatcatctacacctacatgctcatagtgcggaatggattttctaggtatgcatcacttttggatgcctgactagtgctgccttcctgagtaaaaaatgcctgagaggggactgaaagtgatggagtgcaaggtacaatagcttgggacaaattaatttggtttcccagagtgattaccactttaccccttttagtatgatgaaagcactccaacattgctgtcaagtcctgatctttgcatattggaatgagttctttgctactagcatgaatataatgcaaacatacagtttcatttaaaccccatggatatttttcacaaatatcacccagaaaatctttgaagtttgttacgtctgcatcaataggccatttgaaagaaaaaccacccggaaattcaggcctacatgtcttacccattattctcacgtcaagtaaataagtagaagatgtgtccattctgttgatgaacacatcgtcgatgtgtgagaagaaaaatgtgaaaaatgtaactgctctgactccctaataaaagtatattactcatagggcataagatgaaagacatacccatccggaatccaagatgaatccatcccctcatgttcatgctctccttcactgtgctccaatccatctataattccaccacaatatctcattcacatcatgcagtacaaattcttcaaatgaaaccaaacaaaagaaggaaaatggaaccacctgagagggatgtgccacctgctgggactattatgccgctgctagtgaccaccgtaccggcgcatgcagcccccgcaccaccccctgtgccgccacttgccacctcctcgcctcccgtcgcctgagagcctgccaccgacgcgccgccacctggagccgccgtgccgccacctgggagcaccacatcgcagtcgagggccgccgcaccgccgactgggagccccgcgccgtcgctaggggccgccgcgccgtcgcctggagccgcgggccgccgcctgagggtcgcgcgccgccgcttggacccgccgcggtgacccgcgccgtcaccgggggctgtcacgccgtcgcctggagccgacgtgccgccgcctgggagccccgcgccgccgctgagggccgccgcgccgccgccgagggccgccgcgccgccgccgggggccgccgcgcctgagtgccgcgcgccgccgcccgggagcgccgcctcgctgccgccgccggggatccccgcgccgccgcccgcgagcgccgccgcgccgtcgcctgggggcgctgcatcgccgccgccgtcgccccccatcggttaggtttagggttccctctttttttccccaatctcttttcttttaccgcctgtagacagtataatttggagcgagggtaatctggtcattctggtaaaaataaaaattctaacggtgtggactaaacggtaagttgactatgatggcatttcagagagaaaaacgcttgtacgatggccttttgaggaagttgcgtttgtcaatagcatttctgggattagagtgcttgtcaatggcatttcatggattttctcttatattaagagtaaataaagtaagagatagttatattggtatttgataaactgatggtattatatttttttttacttttttattcatatgtgtggaatgggtgaaaaatgattctattctgagacgttgatgagactatgactgtatttgtggaattgtaaatgagatagtgattatttttttaagataatggaaatgcttaaatgggaaactgatacacttccgttttgccggctgcccatgcttttcccagcaaaaaagagtaacatcactttgctgcctattcctatcggtagttacatcctgcaagctcttttcgcttgccatctgtcgcttaattgctgaaaccatgtgccggcctctacagctacagcacctacacatagtttcagactccagatcaagcctgaaatgcagcgatcagtaagctaagggccctgctttaatcaagccttaagtacgtgtctttcaaagttttgcgagcttatgagaggcagacacatcgcacggttaggcgcgaaaacaacaggggcacaggacaccgatcgttccattccatcccttgcgaccaccacaaccatcaatggtagtacagcaatgctcctctttcccttttggcctcttaaactaaagaatttttctttcgtccgaatctttctttaactgctcttttttttcgtgtcacgaactcgggaaggcgtgcatattagcttcttgtaatttgcaagatgcaagtggttacgagacgtattagtaccttttgtcaaaagggaaagaaaacaagaaagaggttagtacatgagacgctacctttgggacactttaccatgcataggttgattgatagacaatgcatgctacgggtgtgtttagcttacgccaaaattgaaagtttggttaaaattggaacgatatgacggaaaagttaaaagtttatgtgtagaaaagttttgatgtaatggaaaagttaaaaaattgaagaaatattttggaactaaactcggcctacattgctacgaccgatctgaactgtactccctccgtcccaaaaaaaggcaaaccctgtgtttccgtgtccaattttaactgtccgtcttatatgaaatttttttataattcgcattttcattgttgttgaataataaaatatgattaatattttatacgtgacttgtctttttaattttttttataatttttttaaataagacggacggtcaaacgttggacacggaaactaggtttgtttttttttttttttacggaggggcgaagaatgtagcagctaacgtcctactacggtgctagtgtactggattgcatgtgtgcagttgatcgagggggtgaccggtcaagtcaatcgtccgaatgacgacgcggacaaaaggtgctggctgactgggtctagccacgcgcacaagctggattcgcttgatagttttcgcggaaggacgcttatgattttgctttgtgagagagaagcctctgctgctgcctttttgcatggttcggtttcagcggtcggagcgtgataactagccataggttacgccgtgtaaacagtgagcgacattgggctcaagaacgtcggaagcctcacgaacgtcttgggatggaagtacgcagatggctgtgctgtgtcatgtttgttttcggtcaccaaaaattacgcactgttaagctcaaattgcagtgctatgtgatagcctgataggtggtagtattagttttccccatcttttaaactgtactatagttctaaaaaaaactgtactataaaagatctctaattactcattatcaaacagtgcaataggtcatcatactaatcggtttgtagtactgccttaattcgtttgttcgttcgttaggaagccggcagcggccccgcctcaactgttcattttctttacatttctgcatttggggccaaggccaacggaccaacatcatgttgccggtcaggatggccaagatcattgcacaaaagcagctacaatgccttaccggttgatctgctcaggtgacaagttaatagtacagaatcgaggcacacattttacccagtaggatctacggctctcaaggatgaaagaactggttgcaacgacacagcatcaaagttctctcccacaggtcgaaaaggaagggaaaaatcctcacacaagaaaaaggggaaaacgccgtcatatacacgtattttctctaccgcgctatttctcttgctctaatacatgcacagaacaagactgcaagggtgatggacagaaaactggaattaactcggagcttgctgcttgccctgactcatctgaatattccttgtgcgttcatctcatctcgatcgggcgattccctttactttctcaaggggaccccggatgctttacttgcgcctatggcttagctcaggacgggcacattcgccgcgacggcgacactgccggcgtcgagcctgtggcgctgctcgtttcttgcagcgcgctccctcgcattcgtggcgctaaccctcactgctgcttcgtccatctccatctggtgatcccggcactcctcgctgcagaatggcgtgttccctctgtttgttcacaacaaaaagaaagctcagtcagaaactattcagaatcagagctcagagaagctgatcgcttggtgatcactttgtattctcctgcctaattatccaagtgattcaaccgataggagcaaaattgagcgtgaaacagacctgtacatgaagatgtcgcagttcctggtgagcggcttccggcagagggagcaggcgtccatggcgtggccggacaggcaggcctcgccgccgtcgagtggctcgatgtcaaagaacgaagaagaggacgacgacgctgacgccatctcggttacaacttacaactcgagctgaaagatccgaggagagaagaccgatgagctgagcaagtcttggggatcactgccaatacgggagagacttgaggctctcctcttttataaaagagaaagggggttagtggtggttgctgagtttggtgcagggggatgcgcgagaaaccacggctagatttccaggaatccgtggcaaacaaagcacggctcgcatcgccagcacacacgcgggacacggctaaactggccgaaccggcgcggctagggccaacacaagaagtgttgccccggtttttgtttgtttggttgctcgcgattagtctcccctggttgccttggagaccttggtggcgccggcgttgtgaactgcaatgctgcagaatccaccggaagatctgtaacaaacggggacccggtttctttatgcgcaaattcgattctatggggacctcttgttgtggccttttgctagctgtttggttttgtttattgcgccggtctcgccacgtgttgaggagtgcacatgactaggacacattaaattacaccttcaatgcggtattaaggacattaactgatgatagtttagtcacatttattatagtgtacaataatttcgaaacagagaggacatgtttctacgtgaagcatgttgctggctttatgtattttctcactcctttttggaggagaagttggcaatgaaaaagaggaggaaaggcaaggaaactaccggagcgaggagtgagtagtgaggctgtagcagcgatggcgacgcacgcgtctctagttctgtaccgcaccgtgtaaactttggaagcgtcaccggtgtggacacggacaatttacggtggatccaggaacaaattgcaggggatctagtagttaacatatgtatagttgcagtccgtgtttgattggttcttgacacggataggaattccccttgacccgtgttgaccacgttggacgtacgccagactgagacactgacgatgacaaacatttgtgtccgagccgacgaccccatggtcaagtaactaaagtttctgtcatgcatgtccttaacggacttcagggagagacagattcaattcgtctgcttcagttcagtacgccagaaaattcatagacgtgcagggcgcgttggcgtgtcgaatggtccacgactccacagtgggagtggatctacgatccaggaagcacattttccgtttcgtggttaatgcacattttctgttttgtagtttaatgacctggtctgaacatgcgtgatccactgatcccatactatagaattgcgcggtgcagcagttcagttcatcagaacggtgaccgggatggacaagggcatgcgtgccgaaatttcatttcatcaatatttcttcttgagttttgcttttgaaggagattgttcttgcttcttaaccatatatgtttttctcagagagaatcagaaatattgaattctaaatgctgtaattttttttacgtatgtatgtagatactccctccgttctaaaatataataacttttagccttcaggatttgtcccaaaatataccaccaacattctcttcccaaccaatcacaaccctccaccattaactttcccacctacctccactattcatccaatcacaactctacaccacccacttctacctaatttcttaacaaccgtatataattctaaactttttatattctgagacagagggagtaatagtttttagaatcaactagccaagcccaaaatgtttagaattcatactccgtttatgacgggctgggtatcttagcccgtgtaggcccatgaacgtcatgttgggctttgttagtttatgacgtttttttggggaataagttcactatgggtccctctatttgtcgtcaagtccgattttcgtcccttgaccacaaaatcggatatgacccgtcccccaacttacgaaaaccgggcaaacatggtccctcggcggttttgatagtggttttggctgatgtggcgcctacgtggctaatttgactcggtcttcatctgacttggcactgacgtggcgcttacgtggcaaatcgaatcgaaaaataataaagcccgtgggacccacatgtcattttcacacataaaatttttttaaaaaatagtgggactcacgtgggccccacatgtcatactcaccccctcatcttcttcctccctttccatctcccctctctccatatctctcccctcctctctctagcctccaggcgccacggctcactgggtcacgggaaggttcagcggtggtggccagcgacgcgacagcagccgccggcggcgagctccacctctcggcgcagccgcgcgcgtttctaaccatgcgtgcgcgcggctatctgatggcgtgggcggcacggatggattcatggatctaatcccgtgccagcacgtagcccccggcgacgcgacggcgagacgacgacggctggcgacgtcgctctcatgccggcaagagagagtacatcttcaactgccagcattaatttgcatcgagagagaaaattagcagtagcatcaaataatatcgtttcagtttcgtcgtaattaagctagctagccatgtgaggagtcagttccatgcctcgatcgatcgtcggcgtcgaagaggggtcaagaactcaagattaggcgatcgattccatctgactcatcggctgaatcatacgagctaccgtcaattaagtactcgtactaacgtacgcgtgtaaatgctattgactgcatgagagaactgtacaagtcctgtgcttacacaatgtactacggcctagccatgatctagatgatgcagcaaaagaccttttaattaattagtcgatcgacaagcgatccatgcatgcatgggagtaatttacaggcttcgagttcatacactgttgcattgtgacttgcgaaaaacacagtgctacactgagaattaatgatggtcatccgcagctaagtaatgatctgtgagcaattagcaattaccagttactgacaagaggtgagtaggtaaaggcattattagcaagaactgcatcggatcaaagttcattccggtggtcaaaactcaaaaccccagcgagctgaggcgtgagagcgacgtcgccggccgtcgccatctcgccgtcgcgtcgcgggggggttacgtgctggcgcgggattagatccatgaatccatccgtgccgcccacgccgtcagacagccacgcgcgcgcgggtcagaaacgtgcgcagctgcacggctgcgccgagaggtggagctcgccaccggcggcggctgtcgcatcgccggccgccaccgccggacctccccgtgacccagtgagccgtggcgcctggaagctggagagaggaggggagaaagatggagagaggggagatggaaacggaggaggaagaagatgagggaggtgagtatgacatgtggggcccacgtgggtcccactattttattattattttatgtgtgaaaatgacatgtgggtcccacggctttttaatttttccggatcaaattgccacgtaatcgtcacgtcagatgaagactaagtcaaattagccacgtatgcgacacgtcagccaaaatcactgtcaaaaccgccgagggacctcgtttgcccggttttcgtaagttgggggacgggtcgtatccggttttgcggtcaagggacgaaaatcgaactggccgacaaatagagggactcaaagtgaacttattcctttttttgggctgtttatgacgtcctaaaattacagcccaaaatgttcgcgggttcagatatgaaaagcgggagaaccgggccgtttcatacatgggctttccgggtcagcctttcgtatttctggataattttgcttttgctcaactgttcatctttttcctcgcaattcaagtatactatccaatattgccagattcccctctagaagttccacttcgtcagattaagatggaaacatgcacacttttttaaggtgaaaacatatgaccatctagtgctaaatcataccgataaaatacaacacgttattcggttattgctcttcatgttgcttcattagaacttatcttgagggtcaacgagcatgtcagctcttctgccccgagataattgattacttcgattggccagacgatgatgcgcgttgggttgacaaaacgcattggattcaaaatattatcggcgacctatcagctgtgcatgagctaaatgtggatacgcgaatccacaatcgttttaccgggagcacgcattcccttgcaagtttcaagtcacccgatgagactagccgatcatgcatggaacacgccgcatcaaaccatccatcaacaagatcagatcgatactggataggtcacacacggccgcgatacctatcaacctcgtgaagaatcagaccagactccaacctaaccatcccactaggagagaacgatggcgccccaaaattacaaggaagaaaagaaaaagaagagaacgatctgaacctgcaacagcgacccattcatccatcgcggcaacaacaccacccgtgaagaaaacggatcagatttcggggcggctgctacgagctatacgaccgattcgcggccggacttgcagccgccgctgccgtgcaaccaatccaatcctaagggggaggtgatgccactggcgtcgcacatgacgctaccggacggcgggttaatagccgggcgcggcatccatccatccatgcgaccatgcgtgaggcatggggtcagtctccgtcacgcacgccgcggaggcaggcggatcgcgttggtcattggtgacggcggtggtggtggtagcaggtagcgcgacgagaagtgcgtgccctcgctgcgatttcgctcatctcaaccacggctgttttaatggccctactaactgaacgctgctgcagtccaaaaggaccaacctttttatgaaggcacgcgtactcactggcagcatgcatggggatggggtgcgctactggtgtactgcttaccgacggtactagtagcgcgttggacggactaataacttatttcatcgggttaggctgcatatgcacgaatttgtgcatcatctacggcctggagccctggacgctagcaccttgtcactgcatccttcaattccctttgtaaagcttagcggtaaaaatttctcacagatcggaatcgctctacgccgttggtcgatctcttcgcagatacgtcaagatcgtaaggtagaagtaattaattactccgtcatagcagtggcagtactagtactactcccctactgcctactgtaatgacagtatcttgcatagtgctggtggtgcctgccgttgcgacgagtccgtcgaccatggcatgcatgaggggcaagggctcccctatacccacgtcccaacacccatccaccctggcaacgttcgtgccagcctgcggctgactgctcctccctgccacctcggcgaatccactccccaccaccagcgatgtcaagcagtcgcacgccccgcgattcggaagccgttcgctccgcgcgccggtggtgtgcgcgccagcaaccgacaaccgaaggcactgtgctgccgtgccgtcccgcgcccccgcaataacttcaccgctccgaggaagcgcgtcagttacctcgcgccaaggcattaacggcctccgcgcgggggtttgaggtttgagcaaatgcgggggaagggaaaccaaccacgtcgaaaccgcacggcagcacgggatggatgaccaccggggtagcatcacagcacggtgggtgtgatcggctgttaatatcaccaccaagtacagtaccccctataccatagtaccattggtaatatctacatcagttatgtcaatgggttgcaaagacgccaagacaggcacggtggaagcaaattaggagcgaccagttggggattatgagagccagaaaaaggaaaagaacgtgcagcttcagctttgcaaattgctccgtactactattaacaatgaacttatcaattgaattctcctaaaccccaaatataaaaaaggagatttgaggaagtaatcctcggtggtaaaaaaaagttggaaaagatatgaacaagaagatgaaagttctaagttttttttcttcttccctaattatgattttctgggatgggcaatgatgcctccgcaccagacactcacgagatggacggccgagatgagacgacgacagctcaacagaggatggcctccacgccccctgtccggacgcaatggcagacggggcacgccatggccacgtccacgtcgccggcggcgaagcaatcgccgcagaggctgaggtgcctgcaggggaggagcaccacggtggccggcctcaggcggcaggtgaggcaggcgcggtcagacccgctgcggcgcgggtccacgtacgccgacgaggacgactccgccgggcccgcctcgccgccacggagctcatcgccggacgcccgcgccgcggccgcggcctgctggagctgcgcgtggagggacacggcggcggcctgctccgagagggccttcgcctgccacgccgccgcctcgctgcggaggcgcgccagccgctcctcgagttccgcgccgcgccgcgcctcgcgctccgcctccaacgccttctccctgagccggcgcgccgcggatcgctctgccgcgacaagcagcgccctgttatggcgccgcacccgatcggccatcgcccgcctgagctgctcgccctgtccaagaacgtgccggcacatcacgccacggaaaaaacgaaccaccgaaacaaacggatcgtgtggggggcaaaatcgtcgattacctgctctttgatgaatcggtcgagctcctcatcttgccgcttcatctgtccggcaagctcgtcggagaacgagacgaacggcatgggcgacgacgagtagcacaaggctttcaggcgtttgctctcttgttgttgctgctgctgctgctgctgctcatccaatgccaggcgaaggccagtggacacgagtgccgccggcgcgcgggacggcgacgccgataccctgttgtggagctgcgccatgttgacaaacgacgtagactgctgcggctggagcgtgaacagattgaccaactcctccttggccggcggcggcgccatggcaatggcctccctcgagcgcttattcctccgattaatcccactcgctgcaaagaaaccaaaaccacatacgcccatgtcacaatccaagaaccgtagtgcggcggcgccatggcgcgaccttgaactccttcaacatcaggctatctatctatcaatcaatcagtcagtcaccaccacccacctcctccgctgggaaagtacacctccggcgagactccggcgaacatctgcggcctgggcaggtccatctccttcgtcctctccggctcacctctgtaaaccagacgacgaataatccatcagcccaaaggaggccaaacctttaaaacacgtagccgccctaacgaagaagaggagacaagccgcacctatcgtggaagaggagactggaagggtactgggcctgtaccgccattgttaagaaggaagagagggagggcgaggcgaggcgaggcgagaaacggacgggtgggtggttcgcgaagcgggaggtgacgacggggaagaaaacttcctcgcgtggttttaataggggtgcggacgagccgagtccaattccgagagcacccacttcgcacgcttgcttttaaaacctctcatcgcaaggaacaaggaacggaacgggctcgcaccgcgcgctcgctcgatcgtcgatgggaaacgagtgatgcgtgaggagggagcgttgcaccaataaaaacggaaaagaagggggcctaaatttactggaggcagaggcagtagaagaaagatggtagcggatatgggtggttaaaattaggatcccagaggatcgtgggtggattaaaagttaagcgtctgttcttgattttttttccttacgttaatgctgaagattagtgatcgataaatggtgtctgtggtttcgctgtgccacgcaataatggtggccaaggcttttggaatacgccgtagttagtaggaggaagttggaatacaaggacggaagaaagtttcctttgtactagctgagccattgaactttcgaaatatgagatcatctatctattttttttagataatggtgagatcatctatctatagatctaccaaatctttttctatactaatatgataatcaaatgaaatatttcacattatttcaggagacagtgaataagtatagcatttttttatgcgacagcccttaattagaacatgaataatggtataacatcttagtctaagaagagaatactccttccttgtaaccggcaacgaccgatctggtcagttgcgttgtgtaacaaaactgtattttttctaatatagtgacgtgtactccctccgtttcacaatgtaagactttctagcattacccacatacatatagatgttaatgaatctagacacatacatatgtctagattcattaacatctaaatgaatatgggcaatggtagaaagtcttacatcgtgaaacggatgaagtaatttttttacgcgttcgtgaaaaaaaagagagagagagagaagagaatgtcatgtagaatttaattttttaagtaatggagatgagagaagaataccgtattaattaccaaacggtatagtagacagcttaatggaataccatatatacaatatgtatattatctatataacttaaataattaattgtaatatattattagacaacatttttataagtcatctatacctcgtctagatataatgtgaaaatattatcgatagtggctgtacgaatcattgttcattcaattcacttagattataaggatgaacaaactaattacaacttgttaagtacttagagttatttagtaactaaatcattaaaaaaagaatttaagcggagttcgactttgtatactgtaatttcaaatttatggattatctatcaagaaaaaaattgttactccaaaccatgatgttatatttattaagtagaagcacacatgagttgatcaaacatataaatttcaaatattcaagagttcggatttgtagatttgataatgtactaaactgaactctgcaaccattagagctgggtacttattaatattcaatcatatcattaaacaaaaaaaatacaattgtgactctaaacccaatataaccttatatttcttaatttaatcagaaaaatagcattataacccaatgacaagtatactttgaactccctccattttcagattataagtcgttttgactttggtcaaaatcagactactttaaatttaactaagtttgtagataaatataagtaatatttataacataaaattagttttattaaattaataattgaatatattttcataatatatttgttttgggttgaaaatgttaatattttttttctttaaaataatttaatttaagaaaataaattatggaagtatttatgagaataaaagagtacaattatccttgccccaacaaaaatttcataggcacgtattagagcagacgagctacgtggcctggcatagagctagcgaaggccgttgcagtatcgtgacacacagctcaatgtgttgcttctacacatttttagttcatagaaaaaccagaatcattaaacgatattcctacctcctaaatatatcacctaattgtaagctaagcatagttatgatattaagtgacgtgacctatcttaggcgtattacactgtagcattgtcatcaagcaatattatgtatggggtttccaacaaatatcttgtgacatggaactcccaaccatttaatgacgcatttagccaccgatatttatattagcacgtatatgttgtgtacttctttttgcgagatatattctgtgtactttggcgaatttacgtttcgacgtggacgaaacgaacatctgatgccagcgacaaaattcatgttttcattcctcatgagaagcttccaaatacttgattttccaggcgccttcattccagctgtcaaatattcaatcagaagctgcaattataaatgtacagactaccgagtataaactgaggccccaagtaacacgttgcgttgcttctcggcagataagagaaatgcataaatacaggggagcaatcaatcgttgaatttgtagcgttgcctccttttcaagtacttgctgttgttgataaggaggagaatttttatggagaaaataaaaaagaaaacccgtgtcttgttctagagtgtagtgtgtttggttttatggcagggctttgtttgatctttctttccttttcatgactttcattgtcttgcgggggaaaaaaaagaagggacggaaatcaggcggagattgaagcatccaacctactcgagtggttgtcgaatgctttggtttggatttttgggattctttgattgatgaaaaatgatgaattgaccctaatgctaacaatgacatctgttccactggctttctttttatatttgtaacaaataattctccatgttttgattgagtctagctagctagctagcttcatatatatcctaataggttaataccaaacttgataggggatttgtgaggtcgccagtgtcatgtcgtgcctgaattggagattaacaagcaagcattgaaaattattgttgctttccagttggtgcttcctatatacttctagctagcagctgcaccaatacacacatgcatatcttagctgccaaggactagcaagcattggcgtgcgtaggacccaaagttagatgcaggcggagtttattgactactagtaccagttgtaagttgattgagatttggtaaacagcattaggaccaactagaattaacctctccacttttaactcgacatcttcagaagcatggcgattgaagcaagaaaccaaagatgggagggaggtgggggcaaagagagagagagagagagagagagagagagagagagagagagagaaaagaagaagaaaatgtcctctagaatattgcttgagaccgaaagattcaaaagggagagctggcta

SEQ ID NO: 7944 - DNA, 7790 bp, Oryza sativa
acctcgacatagtcaaacttagggtttgatttttttttgacaggcagtagatgataaaacgaagaggaaagggaaggcagaagcagagcatagaggactccaggttcactgtggcactgtgccatactgtacaactgttatgcatggatcatatagttgaagttcagaacaacacgtcaagcaagtactgtaaaggcgttcacagtgcaacaccaaattttggtgagcctcacgtgtcacctagactaagaacaatattagctacttgttttcacagtgcaagttgtctatagtgggtcctactagtactaactttatcactttaccaccttttcctctccccctctctctcctcttctcctttccccacagcaagaattttttttatttataattttttttattaaaagttttacaaaaataattttccattttgaaaattgacggaaatagtcgcctaccgccctctgggagggcgatttttaaaaatcgccctcccagagggcggcgaaaatgacgtggcagacggccgttcgctctcgggcgacggccgtcaacgaaatttgcaggcggcccccttgccgccctccgcgagggcgattttgtactgtgcggggggccgcctgcaaatgggcggcgagggggggcatggaaatttgcaggcggcccccttgccgccctccgcgagggcgattttgcactgtgcgggggcccgcctgcaaatgggcggcgagggggcatggaattttgcaggcggcccccttgccgccctgggggagggcgattttgtactgtgctctatatttttttatataaatatcaatagttatcaaatctttttatattgaaaactatacaagattaaaatctccaagattggtaaaatacaattttattattttttaggccatatttggaatgttaccgtacaaatattttgttaatgccaaaatataagcaagttttggcactaccaaatatttggtaaggtaaaattgcatttgatcatatttggtttgctgccaaaatgtaaaattgtagtgaagaatgttgtacataatctcaattctagattacgtattaccaattaataggcttccattttcgtgtgtggtgtggtagtgggaaagaagatatgaagaggttgccttcagattgtcaattatatagcgtcgttttcactgcaatatatgtgaactcaatgagatacattattcattagatgtgacaagacgatcacgcgtgggcgtgattcactttatgtcaacaggcagcgccgaaagttgatagtgataactcgagctgccgcttttcatgtgtgctgttgtggactgtgcgcgctactggatatggcactaccgtgaagcgccgaaagtgtgttgttgtgagcataagttgttcaagcaccatacgaatgaaaagaactacgtagacgagacaaacacaagtagtactgcagtagtaatagcaaaagtaagtactgctttacaagtttgtaagccaaaagaaacggtcacataaggactgaagaggtagaacactactgacgaggcctcttacccctgtccctcctaccctgcgccctaatgtgcccctgggagtacgtgagtcggtccgggggtacggcacggccaacccgtcctgcctgtacaggtgtgacctctggctgctcctgagtgtgcgcctctggagctcctccaagctgagaggagcctagtacgtcctggtggtctgcaccgtgcaagtcgtcgtcgtagaactggctagtaggaccagtcctaccggcgtgagacgaagaggccccagtaccgaagatcccggctgcaaatcctgctggacaaggaccatcagtttcgtataggtatttaacagtattaataaaaagtaaagtaccgtgtgggcgagggatcgacgctccgtgagaggaagagctgacgaacgcgcctgaagaggtggcgaacgcccctgcggagctcgcggaagcgccggtcgtgcctgcgaacgcgctcgaaggcatacgaggtcctgcgatgaggaaacgtgcagttaaaacatggtgacacattcgtgcaaaagctgaaacaaaaatgaactaatatctgggctgaactgtaccgtgcgaaaccggtgctgtaggtcgcactgctccgaagctaggggcgctcgaagacaaacgaggtcctgctccgacggtaggaccgcgaggccgtgggtgtaccggaccagctggaggtacgacgtccacggcgctgcgacaggagaagacgcgcatgaccgcacgcatcttctcctgcatccggtcgaaggtcgacctctgctcaacgtcagtcaagtgcaaacctctgttcaacctcacctggactgcggtgatatcggcactgatatcccgtgccgcatcagcctatgcaagatggaaataaaaaattcagtagttgtcctatattatgcaagataaatgacataattgttggaagtaatacaaattggacgtaccgccacgaagtagtctcggtcacggtgcgtgggatacgcgtccgtgacagcggcaacgtgcggctctggggcgtctggagtgaaggtcacacgcgcacgagtgcgaggaaggtaccagcgaaggtagtcacggtagttctcctccgtgtgtgggaagagctcgttgatcacctcctctgtagctaacacccagtcgtcaacgtactgctgtacacgtggagcccaaagtgcgcctgctagctgtccccgtcgagtcaacctgtgaagagaggtaaattgtatggctcgatgatgtaattatcataaaaatttagaaatgaacaatccgaactcacgagtggtcggcaggggggacggtcggctgcacgttgccgggaaacacctgcctaagtccgaactgtctcatcacacgctgcggccagtgaggctcaacgaaaatgtcgaacaccatcggcaggatggtgagccagtaagcctggtcgcgtgtgcacaaggacgaaagtcctagcggtgctctcgcagcgacggcctcttctgtgtacggctcccagatgacgtcgctcggctggagacggtcaaactcgaacacgaagtccgggtaaccacgtctcacctggacgtgagcgtaacgacgctgcaataaacatgatcggaattagacacgaagttgcactaaccccacgtcgacaccagtaagtccccatcgtgggaccgtcctctggccactgcgcgctgcgaccaaccccgtagggtgcgctgtccaccactggtcgccctatggcaaacctctcggctgcccaaagctgaagcaacataggacagccagcgatgatcgctcccgcgtcagtcttcgtgcacgcctcacagagggcacggtacgtggctgctagcacggcagaaccccagctccactgcggcacgtcctgtggctgagcatccgcgatggaccgtgcgtagtggaccagccggaagtccacagcgtgcccgtgggtgctagtgaacatcacccacccgaacaaccacaacaggtacgcctcaagggagcgtcggaccgagtaatcatcagcgtcagggtgcagaaggtccgcctacagttaagaatgaaatgttagtacaaaacactgatccggtcgcaaataagcacgtatgataataacaacttatttacttacagtgaactggagcaaccaagccttgctaggcccgactgtagagtacggaggaagggtggtggtcggtcctaggtgtggaaggcgcatcacctgctcgaagcgcgcagtgatatcctccttccacccaaaaacaccgtcgacgggaccaactggtgctcccgccagcggtagcccgagcaggtacgacacgtcctgcagtgtcggagccatctccccacagggaaggtggaacgtgtgcgtctcaggtctccagcggtctacaagagcggcaaggagtgaccggtctgcatcccaccgcttcgctgggtcacggtcgtccgccgccgcctcaacaagcctacaaagtggtagaaggcctgccgcacgcaacctgtatagagcaaacttcaaacataagtataaaacaaagcaaagttgagttgaaatgtgaacatacgcgtaccaaggaacgtgacgggggtcgacacgcaaccactcgcgcgacgtgcgtggacggaaggtgccgagctgtgcaccctcgactgctgacaggaacgagcggtggttcctgtcaatcccacggttcaacagtgccggtgtgtcgtacgccatacctgcatcaaataggttgatcagaaacatataaataattagttcaacataagtaataaatgttcataagcgaattactaacacatattaaacaagagtacaaacaaacaaaagtgtttagtccgaacactcatcacgataacattatgatacaacaccgaatagttcgcaatactactagtacaacaatagtcggaggtactcattacaacaagattgaattgaaattacacgatagaagtatttagtccgaacactcattacatcattttatttcctaaatcgaaagcattgttacaccatggaatcgcctgctgcgcgacgacgccttggccttgcgcgcctgcttgttgttccttcaccaggtggtcgcctaccatcacttgcctgtccagatggactagcatctgcgccgcttggaacttctgcattcttcgggcatgtcttgtaagtatggccgcgcagatcacacttgctgcagcgtaaagtcctcctacctgcttctgactcatccatatcatttctgatgcgtctagtttggcgtcgaccctttttcaccctaaacttagatggatctgaaatataaaaaacttgggcactcagcgttgtgtaagatcctgagatcccgaacccatatatctcctcactccatgtatgaaagattgcttctttcctgaaataatttgagacgtacacattgggagatatgccacaatcaccggcagcagcaagaacgtgtgagcaaggaaggtgatgaagcttcggcttcatacaactgcaggtacatccaccatccgccttcaagacacattcctgcacggcttgcttgcgatagataccacgcctgctcctatcaacacacattatttcataccgatgcacttgtgtgccttgagcaacaactctatgtctccgtgcctttttgattttatcttccatgtactttgtcactacgttgccaaacactatgttgttatcggccatggacggaccaattttcttgtatcgatccctaaagtaggcttgcgtgccgtgaaggatgaattcaacaatagcaaccaatggaagtacccgaactcctcgcattacccagttgtacacctctgccaaattggttgtcattatgccataccgagatccatcggtgtcgaacaatagagcccacttctccttaggctcattctcaatccactgagagaaatttctgatggccgaccctgacctccttctcattgttggtgggtcatcatgtaatgcaccaagaggtatgggaggctcgtcaccttcaacttgtggtctgcgagattgctcatctgtttgcttcgttgtcaactcatccaacttgtcccacaactcattaaatttcttctcttggttctgtgcacagagcctcttaaagagctccataagatgcttgttcttgaattgcttgtagaaatttgcacccatgtgacgcatgcaccaccgactccgaacatcaggccacttagctggaagtcccttctcatcccaaccgttctgcaagtagtcaatagcccgcaacatacccgcatgacgatcatgtataaggcaaacgttgggcctcatacgcaccactgcaatgtgcactctctctaggaaccagtaccagctttcagtgttctcactctctacaaatgcaaaagccataggtagaacctggttgttcccatcacacccaattgctgtcaatatctgacctcggtatttacctgtcataaaagttccatctatgcatagaacaggtcgacaatgcacaaaagcattgatgcaagcacccaatgagaaaaaggctctttgcagcacactctttgttctatcttcaaccgatgtaaatgtatgtaggtcatagtaagtattattattcctctgggcaatggtggctaacaaacgaggcaaattatcataagaagcttcaaatgtgccatacctcatctcaatgatcttttgtttggctctccaggcctttgcatagcttatggtgtacttgaatttgttctcgatgtgcctaataattgattttggttcaaagccaatgttaccaacaacactgctgtacatctcacttgccacaaaagctgaagtgatgtttcggtgatacttctccaccccttgtaagtagcacttgtgctcggtcacaatgctaactttccaataatcattccatttacccttatatgcatggacacgccacggacaatcttccttcatgcacctcacttcatacacataatttgttgacttgaccaccctaaactctctctgcaatgaaactgcccaatgcttcaccgcctccttcatctcatccttatgagcataccttgcaccctcaattacctcgtactccttatactcccagggtacatgatcaccctctgatataacaagaccagagaagtcctcatttgcccaatcagtggccattacatcaccttcctcatcggatgatgcgtcgtcctccgcttgctcattatccgaatcttccctctccatttcatcaacaattataccgactctctccccctcatccgccatgcccatggcctgctcctcccttggttgattttcctcattttgcatcgatggtccaacaacatcccctgcattgctaggaccctccacatcttcggtttgcattgaaacatttgtatctttctcttgtaccgacacaaatataacgaggggccatgaccgttcaaaagccatttccacataccgtttccaagcagcagtgctgtccatcggcattagttcccaaaaataaccttctattgcacgactcactacaacagatactgacattgtgtagacttcttggtctattctaaatcctctcaacaaccaactataaattgactgaaatgttctctccgcaggcctatcgatgcccttagatgtcattacaaaatctgacagatcaacaccatctggaccaaatctaatatttccttcaccgtgaactatctgaaatgtgaccttacttgacattgtgcctgatgaaaacaataactgcgttaacctcgcatttctgtactacgccctaagttacattctctacaatattgttctctaaatttctaaaagtaggttacattctccagatcaaactaaactacatcttacaattaacactactgtctatgtctcaattcatactattatattctatgctctggatctacacatatgtgctgtgtgctacagatctgctaaaatatatggaactaaaactaaaacgcaacatatgtactcaaacgtaatatattagtacaaatgcaaaagatgtatgggagcatacctgtgatgaagtgagcgaaccagcagggcttcgccgctccccttctgctgccctcccctctctctctctttcgttttttttggatttttagtgaatataatgaaatttcataggggaggggctgggctttataggggggaggcaaaaatcgccctcccccagggcggcaagggggccgcctgcaaaattccatgccccctcgccgcccatttgcaggc

SEQ ID NO: 7945 - DNA, 14407 bp, Oryza sativa
ccgccgcacgctcgctcgacagggcggcgatggctttatggagacgtgacggcagcaggacggaatgtgagggaggccccgagcgagacggtgttcacggactccgtcgacgggagcagctccagctctgacgccgcatccaccgacgagtggccggtgacgatgtcgccgcccaggcgcccatgaagacggtaggcagcgccgctgcgggttcatcagccactgcgtccttctgcaactggcgtccctagaaacgacgctggcgaggctcgaccgacaatcgatccaagcgagaatatcttgagctgaaggaatggccacccgaaccgtccacgtgggaatggctccggaacggtggggacgtagagcgtgagctcctcggtgaggttggacaggctagtcatctcgttgacggcgtcgccggatttcctcgggtagctcagcagcgaattggcaatgacagtgccgtagttgaaccgcttcgctggaggaactcgccgaccagctagaccttggtgtagcggacgccaagctcagctgctcaccgccggagacgccgaaccagctccacaactcgatggggtgcaccgtccattggaatgtcagcggcggaaagcggcgctgccgccatcgccgtggggtgatctggcccatcatgatgctgccgtggtgccggagaaggtggtatgtgttaaataaatgaacttatgtcagttgggatttgatcttgccttgatcttatactcttatttactttctgttagtttgttagctattttccctcctcccatggttttctgctcgctctgttttgagtcagcgtgaccgcgatttgttcggtcaagtagtggagcttgacgagcgggagagtatcgagctgagaaaatgaacagcaccatgaactagcgtcggtgagcaccacctcccttctgctcgagctcggttgagggctgggagcttgaccttcgtgcccaccgcccaccgccggccgccgtcgcgccgccgtcctcctcctctcccgcctcgccctgtcgatgcccgcgtcgttcgcgccttccagccgcccgcgacgcctgcacacgcctgcgcctccctgtcgacgcccgcgcaaggtcgctgcacgcccgcgtcgtggagctccgccgggctgccgtcgggcatccccactgtggccgccgccggcggccgccatcgcggcgccgcgctcctccttttccccctcgctccgccaaccgacctacaggtgcagagagagaggaggaaccgaggaagagaagaaggggaagatagatgactcagcctgacatggctgaatcagccgccacgtaggataaaaccggtgtcaaaaccaccaaaggacctattgtggccggtttttattagttaagggacgctagatatctggttttatggttggaggacgattttgtaactccatgacaagttgggggaccttcggtgtactttttccaagtgggaagtggctctgggcttttggatttgtctatgtatgcagccattgggctctactatgcttatacgagtgcgatgaggcctgatgtgcttactctaagaataagttcactttgactaccttaactagtcactgtgtcgaccccaactattaaaatcgatgttatttgactccctcgatgattttgaaaggccgtttcgctatcgtggcaactacgtggtggtgtagacattgtctttgtcctacgtggcgttgacgtggtgcttatgtggtattagaatgaaaaaaatatatgggacccatttatcgctcacaacaaggaatattgcgggagccgggagacactaacatgtgagacccacacatcatcctccctttctccttaccttcttcctctctctctctctctctcatcgtctcctctatgaggttgttgcttggataggcggcagcagcatcggcatcgccatagaggtggtgtctcttcggcgctggctcgtgcccacctgccgccaccgcacaagaacgcacggttcccggaccccgtcgctggtagagtcgaccacagaagggggaacaccaccatggcgcacagacggtgcagtgcaggaggcagcaaccaggaagggagtaagagcatgccacttgtcgtcgtcgccacgggcgtcgcgctgtccgacgcggtgttggtgctccttcgttgtcctcatggtgttcctggcgtgcgggaggttccagaggagggccatgccgggtgcttaccaaagcggcacaacacaaggttagcttcgatcctggcccggacctgttctacctggacgtcgttaagccgtacgtcgaggccgaccatggcgacgacgagcggtgttgtaaagacgttgccagagttggtcgggctgaggaaagagcccaggtgggaggataagacaacggagttgctatgtccgacaatggcaccaagccgtcgactttgttccattcctcgtgctacttccactcgtcgcacttctcataccccgagctccgggacatgaaggcagcggggagcaatggcatgtcaccatcgccatccggtcggtcaagatgtcggagcttcgccgctgctccagctctccctgcaaaaggcgaaaggggagagaaatagaaagagagagaagggagagagagagggaggaggaagaagggaaggagaaagagaggatgacgtgtgggtcccacaatatttcttttgtgaatgacaaatgggtctcacatattttttttaattctaatactccattcgttcaaaaatataacaatttttagcattcaaagtttgtccaaaagtatataactttttcacctacattcattctcaaccaatcataacctttcaccattcaaattcttcacatactttctcttctcaactaatcacaaccctcttccatttaatcaaacctacttttttaatgctcgtgcccaagcctaaaacttcttatattttaggacggaggtagtatcacataagcgtcacgtcaacgtcacgtaagatgaagaccaagtcaatgccgctacgtagtcaccacgtcaaggaaaccaccctccaaccgccgacagagtcaaattgcaccggttttaatagttaggacttaggagggtcaacatatctgatattgtggtttaaggatacgaatcagattatgccactaggtaagggaatcaaagtgaacttatttccttactctactatgcatgtgggccgtcaggtagccacggttcaagcgagaatgttgttcggcgatcgatcgccctggggatggggcagcgatcgatcccctcccccctccctccctccacccctccacctggtttccttttttggcaccgcattacttttctattttagtaaatttatacacctaaagtttatacacctcaagtttacacatataaagtttagagaccaaaagtttataagtcaaaagtttatatatccgattcaaatttgaatttgaattcaaatatttttttatatatagtatttctatacatctaaagtttatacacctaaagtttatagacctaaagtttataagtcaaaagtttatatacccgttcaaatttgaatttgaattatatctgattcaaatttaaatttgaattcaaatattttctatatatagtatttctatacatctaaagtttatacacctaaagtttatagatccaaaatttataagtcaaaagtttacatacccgattcaaatttgaatttgaattatatccgattcaaatttgaatttgaattcaaatattttctatatatagtatttctatacatctaaagtttatacacctaaagtttatagacccaaagtttataagttaaaagtttacatacccgattcaaatttgaatttgaattcaaatttttttatatagtatttctatatataaatttttctaacttttgtttttttaaaaaaattgtgtggtgcactgcagtggaaagagaagaaggggaggaggaagggaacaagagggaggagtatagggggaggggggaaaccgatcactgggcaatcgccctggcgatcgatcgcccattagcctcccccggttcaagtggcctccatgagtttttttttatgaaatctgcttcacaaggaaattagtaaaatactatactcctgcgttaaatatgattcaaatctataatttcatgtttgctgtaaatgagtactaagtctgattttccaataatgctatatgggttttctccccctgaacttataaatgtcactcttgcacgatgcgtggggagcaggcaggagagcacgtaggcacgtactagagcgaagggtcgcacgaggggatgttctgtttcacgtgcggacgtttgcacgcggcacaaacacatttgtgattattcacaatgtacacccatttaaaggaggtggcaatttattgaggaaagaattggaatatagccggaagtacattaaagagtcgattttcatgatcaatcgcattgaatttagaatttattacattgatcagtttccttttgaaggtcctttctcttctataaatctcagtgtacctggaggagccaaaccacaaaaaagcatcattagcttctccccggcctgagaattcccgatgcatcccatcatcgctacactcctcctcgccgccgcaatagcccccggtctcacggtgggttccccatctctcatcaacgagacatgcaccgcaacttccaactatggctactgcttgggcgtgctctcggctgatccggcaggcgcctccgccacggacaagcgtggcctcgccatcgccgcggccaacatcacgatgcgcaacgtgacgtccacggtacgcgtcctcaccgagctggtagaggagctcaagctctgcatcaagtactaccaggacatggacgatctcgtggccagcgccatcgacgacctgcgtgtcgggcgccccgccgttacctcgttctacaaactgcaccgggcctcggacgagcccggcaactgtgatataatgttgtttgagggaagcgcccacaagaacccggtgagctcggagaacatgtacaacgaggccatttcaaagttaaccagcgacatcgtgtaccagttggtacattaatacaattagcctaagttgcatggataggtccacctccccctcctcctccttaatcttactctacccatgtattgtattgggaggctgtgggtagcatcatgccatttccaggcatcagctaatacagtttgctggcaaggctgcgtctgattgtttctatgaattctgttgctattgttgtgcttaacaaaatgttaaatgcccatagtccatatttgggggtgggtgggttctgatgcgcgactgttcggagccccaaaaagatactgctgagaatttgagagacctcggccactccagcttttgcgaatctccgctacagtcgcctcgttcattctccgacccctcttcctcctctccggtggatcaccaccaacgatggatgaaaggggggtcggatgtctcttctcatctagtagtgtaagtagtagtcttgctttctcgtttggtcaggtcatcgtgttagttcgagttcttctcgttatcatccatcttttactgctcaaggtgtccgtcggcttcgacgctcctcgtcttggtggtgtggtgagcatcaccggttttttagccagtgattggtcacctctttgccgggtttcttctcccagccgttggatgagatacttttagatctgggaaaaaaaggttgcgccaacctttctcgatttctccgacgagttctatacaaaggaggtggtcttcttcttgacctccagtgaagatcaattacacggctgaaggtttcaagttttgctgagatggtctcaacctcccatgcgtggaggccctaatcggggatgcccctcagtttcttttgcagttagtggtgttactcttgctatccttgccggtggtatggatggggctggcttctttggattatctgctttggcgtcgacccctatcaaaacttctggtgggtttcttattcggcgtagctttttagataatggaatataatatctcggcctttgctcaaaaagagctacagccaattattacaaaattccactccagaagagagtgtagttcaagacaagttgaacacaccaaacaggaaaagagaggacacaaactaagaaaagcaaaacaaaaagtggagctagaaggcctcgtcaaagcctaggactgaagttcgaagccaatgcatagaccattgacaatccttgcacgaagaggtttctccaaagcggtgcccccaaggaggacgcgacgtggatcgccgccaccgctcgttcggaaggaagcaaggttttcacccggagaatatggttagaaaaggagaggggtaatctaaaatgacgcctccaaggaggggaacgatgccaaacggcgtcgccgtcgtcagccggccaaacggctcggcaaggctttcgcccgcgattccctgtccaaacccacaccactaatccgcacaagaaggatcttcatcgatcaacaacattgtccctttagaaattcggccaaggccaccgcccacagttcttgacagcgcgcccgcacccggactcctccttccccgtctccacatgccgctgccgacgatgacgcaccgtcagcctcggatgatggccttgcaccaccgtcgacagccgccactgccagcgccacagccaccaccgtcgccagccgccatcgccagccaccatcgccaccgccaccaccaccgccaccgccacccccgtccagccgccaccatcagccaccaccgtccagttcgccaccgtgtaagcctccaccattcgccagccgccaactgtccagaccggcttgggtggcgcggacctgaaggtgcagcgcacagtgcgggtcgccggcgccatggaggaaggcgtcacgggcacggcgtacaattgacgggcgccgcgcctccctcatggcggcaaggttcttgacgagggccggcgtcgcggcacgcgccgtagtccgccgccttcgtcgccaacttcgtcgccgctacatccgccaccatcgccgccgccagccacccccctgccaggtccgtggagcggcgccggcatcgaccgagcccgtcgccggtcgcctcggccaagcggggcgaccggatctggcgcctgcccgtcgccggagccgcggacctctaccccaccaccttcgcatgggcgtctcccgcggcgctgccgcggccgccgcctccgtgcactctgccgcctccgcgtggcccacgcgccacaccgccgccgacccgcgcgtcccaacccagatctggccaaggggccggatccaaaccgaacggcgccggatttggctgtcgttgccaggaccacgctctcgctctttggtgtcgtcggcgccccaaccggctgaccgggagtgagggagaagggagccccgccgccgccatcttcgcagtcgcccggctttgccggcggctgctcaggcggcggcaaggtgggggagaggaggagagtgaggaggcgacggcgaggtttcgccgcccgcgtcgcccttcggcgtagctgaagttgttatttgtttgccatctcctcaacctccatctatcatctatgagaggccccgttaaggattgtgcggtggcgtcatcttgtggagctcacttggagctcacttggatccaacctccgccgatgttaggattcaaagtttcgtcgtcgacgttgaagacagaggcagttcgagcaggactcaattgttttttttttcttttcttcttaagtcctttactacaaaatgttgagctaaagtgtaatctgcccattgttaaggggctcctttgcaaaactggatgggacggaaggagtatattgttcttctgaacttctttaaataaataaatacattgtttttcaaagagaaagaaagaaagatgcacgactgttcagcagctgtggacgagacaaggaaatccaaagctgggctgccccttgaaattctggcccacgtgtaaatgaggaagggaccgaacggaaaaccaattctctcctcaaggcccggaaggcccaacctgcaccgtcaatttttgaagaagtgctagcaaagggcgcgcgctcgggaggaagaagtgcaccatggattgatccgtggtctttcagattggaatcggactcccattgccgtctactactaacaaacactttgttctgaaaacacggcaggagagatgaggttatgggtggtatggatcacaccaacgtgatgacaaagagtgtacgttgtagtgaaccaagacaacacgtgccatgggcgcgcacgagcccttgtgatgcgattatggattatgtgggattgccactcgcccactcgccttctcctgttatgcttcttcgtgctgatttagtaagacgagatgcaggacggctgatggacatgatcaagcaagttccacgtataggttatattttagtatacgccaccggcttctcctacttcttcagttaatttagtaagatttgacgccacaggctgaagatatgcatcatcaagtaattgggaagaagatgcagacctgaacatgctatatatatatatggtcatgggcggtgaacaatttttattttcgagggaattggccggtgaacaacctaatgtgatcttacttcttaagtatatgcaatactatcttactttcacggcttgatttctcatatcgggctacgggatcgaacaaaaatgaagcaatggctgtttagcatgcctgcaagttaacgttgttttttttttcatccaatatttcacttataaaaacctcccacgcataacaccaacaacaccatctgttctctgttgacacgtaaaattgattcacgcaacaacaatgaaaaccgttgtgctttcgtgacgacgaacgactagttttcaagcaaactagcaaagatcttcactttcgtggaagaacccgactgattttcagcgcaaaccagtaaagatcatctgcaccctagataactaggatttggccaaagaaacaagagtaaaagtacgatgaaaacagtagaagaaaataatataggatgataattgttccagagccctaccaagtgcaaaatccatagtatatagtaaaggaatacactgtactgcatatatagaaaactctaggtaaatccgtgattaattctatctaatcaaaaccgtcatttttaaacgacagcttccatgcagacgtatacacgcctcagccgaaagtcgcctctatcctgcaacgctgctccagcccaagtttcagaatttgtctccccttactctggcaacaatgtgatcctgtgtggctagacttcaacaggcatatcatcaaacatagccatgcatccaaccccagccacataaaatcaaccactgaagcctcacatccattgaatcggcaaaagctccatcgctgcatgctagctgcttgaactgacaaaatctgagaattgcagcctcccaagtcctaaccttcttctctagtttctgcagctccccagcaactcgtacacctcccgatgcatcacaaattcctgcccttgtcaagctaaccaattcttaagcaaaccactaaaacaattacaccaactattctatataatttggcctgtctaaaatgacctaaccaaaagccaaattatgctactaacattctccaagaaaaaagacaccaagaccataccacatgttctctatggcgtgtaacacactttctgtctctacttcatgttagtgatatgccctagaggcaatcatagagatgattgtatcacatattatgtttacatatttatccgacattgttccttgaaatagataactccttattggttaatgaatatgtgattctttcatgagactttttatgttgtttgttactatttctaaaggatccctgatcaaatatcatatgtggaacaaatatgtttatatgatcagcacatgtattaattgatgattatgtctcatggatcatggtatagagataccaaattaataatgtggacatatgttggtgaacatgttgttaggtagacccaacatgagacactgcaagagccatatgtgttgtgtcatcagtgatctcattgagtgttgatgttgaatccttagacctgagattatcatggttctcaacatgtgtagtagcttacttagggactgctaaacgctactccgtaattgggtagttataaaagtagttttcgagtatgctatgaaacatgtatagtgggatatgaataatcaagatgggatttgcccctcctatggagagatatctctggacccctcgatgttgcagattatggaagtgcatggccataccaaaggtgattgaggagtcaatcacaagttatataatctatcaacaggttcgagtgaatgattgagctattagaggatggcacatatctagccttgagcttaatcgatatcgtgaggcaaaggggttcatacaactatacactagaggttcagccgatatgatctttatgtatgcccggtgggtatacactagaggttcagccgatatgatctttatgtatgcccggtgggttaataagttctgctggagtgtgttgcatagtagttatagttgctatactctgcttacctgttttcactgattcttcggttaggaataacccatgtgctaatttccagcctcctagtgatgcagctgctttatctatttattgcgttgattccaatggatgctgcaacttcagctgtgtgcaatcagccgtcgatgcgattcccgaaaatagattgacaagaagtgtcgtttgaatcaactccggcacatacatgtaagtgttttgcattaatttattggactgctaattctggtgggatacattcatgcatggtttaagggatgtacactttcttttgcacagtgaaaaggtgacagtgaacttttcaaagcctaatgtaacattccaaggacaaggttttgagtcgacgatcatcgtttggaacaatagcgcaaaaaatacaggcacattttacagcgccaccgttgatgtttttgctacaggatttgtaacgaacaacatcagttttaaggtatgttcttgtgctcacaaaacttaatttgcttaattatgtatacggcagaagggtttagtttatctactgattcattctgtgtagaatgcatccccagctccaaagccgggtgatcgtgacggacaggctgtagcaattagagtttcaggtgatcaagcagcgttttgggttgcggcatgtatagctaccaagatacattatttgatgatttaggccgtcattactttagtgattgttttattgaaggttcgattgattttatctttggcaacggcagatcattttatgaggtacgtaccacacaaatcttcgatggttctagttacgttttattttcattgagtgagtaacaaacttgccatgcatctaaccaagtttctgtgcgtttttcagaagtgtattttgaactcggtagctacaagcgatgggatcaacggtgcaatatgtgcacaaggccgtgaatacgcggccgatgacacgggctttgcctttgtcaattgtcgcatcaccggcagtgggctgattttattgggccgtgcatggaggccctactcccgcgtggtcttcgcgcacacggacatgcccggtatcattgtgccgagggttggagcgactgggacgacccgcaacgagatgcgtacgtattctttctactactacttccgtttcattttatattagctgtatgtttctaaacatgtatactacggttttatttgttttaacagcacgatgttctacggtgaatacatgtgtacgggtgtgggcgccaacatgaccggtagagtaccatatgccaaaccgctgacggagcagcaggcgcagatatacctggacgcttcctacgtggacgcggatggctggttaaaaccgttcaacgattctcttatagttaattgagtacaataccatgtaaataatggcgggggtgcaattctttgtacttaacacggttgtttagtactactaagggaccacctatatattcgtcgataaattttctccaaaaaatttgacagatgtaattatagtacaatcgtaatgtaattacactgtaacttatatgtaattacactgtaacttgcatgtaactacagtgtaacttgtaaataagtttcatttaattttgaatctttaaatctattacaagatttgttttggtaaggaagaaaaataaaatcacagcacacatatatgtgtaaggatttgtttccacaatctctattttaccgaaataacatattacagagacatttttgaaagttacatacaagttacactatagttacagtgtaattacatgcaagttacagtgtaattatattacgattgtactgtaattacatctgtcaaatttttaggagaaaatttgtcgacaaatatatagcaaaatcgtactactaatatgtatatatctggtatccggagtactccctctgtttcaaaatgtttgacaccgttgactttttagcacatgtttgaccgttcatcttattaaaaaaaatttgtgaaatatataaaactatatgtgtacatgaaagtatatttaacaatgaatcaaatgatatgaaaagaataaataattacttaaattttttaaataagatgaatggttaaacacgtacttaaaaaattaacggtgtcaaacattttgaaacggagggagtacttatttactcacaatttggcgataaatgaaaatgagtaaccagtaacgatcctgtgtactaccacaaagggggtgtttagatggggctaaaactttttagaccatgtcacatcggatgtttggacgctaatttagagtattaaacatggactaataaaaaaactaatttcataaataagagatgatccacgagacgaattttttaagcctaattaatctataattatcaaaagtttactgtagcatcatattatcaaaatcatggcgtaattagacttaaaagattcgtctcgcgagttagtccaagctcatgaaatgaattttgtaattagtgtatatttaatactctaaattaatgttcaaatatccgatatgacagggatttaaaataagtctccggaaaccaaacagccctaaagttacgaattttctgaagtctcatcaccgcaaccacccgaaacgcaacccctctctggagatcaccagatctactcgtccccaatggcggccgccgccgccacctccccggcgcgggcggcggcctggaccttcgccgccgccacatgcgtcaagctcctgctcgtccccacctaccgctccaccgacttcgacgtgcaccgctactggctcgccctcacccacgccctccccgcgcggcggtggtacaccgacgcctcgtcgcagtggacgctcgactacccgcccttcttcgcctacttctcccgcctcctcgccctcccggcgcccctcgtcgacgcctccctcgtctccctccccgtccccgacgcgccgccctccttcgcctacctcctctacctccgcctcaccgtcgccttctccgacctcctcctcctcctctcctccgtcctcctgctggccacggacgcgctcacgcggcggcggcggcggccgttcctctccctcgcgctcgtcctctggtcgccggcgctgctcgccgtggaccacgtacacttccagtacaacgggttcctgatggggctgctgctgctgtcgctgcacttccttgagcaggggagggatctcgccggcggagtcgtttttgctgctctgctgtgctcgaagcacctgttcctagtggcggcgccggtctacttcgtgtatcttttccggcattattgctgtggccggggtgtggtgaggggattgggaaggttggtgctgatgggggctggtgtggctgctgtgtttgctgctgcatttgtgcccttcctgtactatgggcaggtgagttttgctcggttaatttacctttggaatggacgaattggtatgttttttttttgtttagatactgtaatccatctgtaatcatcagttcacttaaaagtaggaaattatttcttgagaggatttcaggatttttcctgtagttcatcaagtgttcagaattagaagatcggtgaagtttataattaagtagttccctatcagtttgtgcacgtaggttgcataattggcacaatattgtcttactcattgcaacaaataatcttgcagatgcaacagctctttaaccggttgtttccctttggtcgaggcctgtgccatgcttattgggcgccaaatttttggggctgcaggaa

SEQ ID NO: 7946 - DNA, 16623 bp, Oryza sativa
ggggggggggcgatccgctgataggggcgtgttgagctgcaccgcgtatttttcaaccaaagtgcacacgagtggcgacggggtccgatggccaagttggacggtggacgcagccggggtcaacgtacgccgcgggcgccatttgcgtgtatgttgtgtgcagtggatggatggatgcgtgggcgcgccgcgcgcgtgtggagcagtgggagagagagagagggacgctcgcggcgttcgtggcggttggcgcgactgctgaggagggcgcattaccggtgggtgttcgttggcgacgacgctgaaacgagaggggatgatgcattggtggagtttgttcggtttgtccacagattgtggcatatatgagccagaaacccgggggcggacgagacgactgtgcgttgggcccttgacccctgtggccatgccatgatttgcaagttgcagccgcaagccagcccgtccactacggggcgagccggcgagcttactcaggctaccgcatcaaggcattcaggcacgcgtccgttggcgttgatagctagctccagcatccccacgtctcgacgtcgacgagattgggggacagcggcggcgcgcgtgcggtacatattggtagtacatcaccgtgcactgatccatctctcatctgcctcggccggccggccgactgaccaccacgtcgtaatccggtaatcccttctttctcatctcttcctcaagtcgagccgttgcacgctaattaaagaagcttcgatgggcctgcgtggagcaatctgaattctgaaagcacgcaggccggcatcgtgcacagcaacaactcagcaacagggcaacagcaagtccctccgggatcccgagttttcgtctcttaagggcccctttgatttgtaggaaaaatgtaggaattttggaggatttcaatcctatggaaaaaaatcctatgaaggcctttgagacaaaggattgaatcctatccaatcctttaaaattcctatggaatgagtaatcctatgcacattttggaggaaagttagcaagaggtctaacctcttggaacatttcctctgagtctatctctctcatctgattcctgcgtttttcctgtggtccaatcaaacggccattcctgtgtttttcctgtgttttgcaatcctctgttttacaattgtattcctgtcagaatcctgtgtttttcctattcctctgttttttcattcctacgattcaaaggggccctaaacgtttatttaagggtttaggctgtgtttagttcaacacaaagtttagattttggttgaaattgaagatgatgtgactgaaaagttgtgtgtgtatgacatgttgatgtgatgaaaaagtactgaagtttggatccaaactttgagtctaaacacagccttagagcattaccaacgattccactgaatcttaaatctaaaaaatatttttaaggaacttttgctaatgctcacagtcgtaggcgtaattaatgtatagatgttacatgtctaattcatacaccacaccacaagcatttcgttgttgatgagtatgttacctatcactaaaaaaattagtcataaatacgaatacccatgttaagtttaaaacttgaactcgcatagataaggatcctgattagttaaagcgacactcactttctgatacgatccttccttacgtaccgtgaggccaccgttccttcgaccggtactgcctctcgggccgatgtcatgccaggctgccttggtctgggcctctcggcccataacatgtgtacatgtgccgtgttgtgcgttttatcgtgtaggaaagaagaggaaactcaggtgttcttcatgtaataagaaaaacacagaggaaactcaggtgtgacgaactgcagaaattaggccctgtggcaacgtatatgaacattgtagcctagtttgcgcatggcatgggcactttcccaccccgtgcatttcgtagaaataacaggagcagttgaattagatgaacaattagaattccctgaacctgaaacacataccgactgttgaattagatgaacaattagaatcccctgaacctgaaacacatacccacacctacaaggctacaactgacagcgtacaaaaattgcaggcagtgtccgtatagagcatggagattgaagaagtttcaaagctgcactgtggacgttcagacttcatagtgcaccaggtgcgtctcatctcatgcttatattcaagctgtttctcattgttctcctcccaacacccatattgccctttgtcatcatggcaacgaattccccgtagtcaatgcgaccatcctgatgaaaaggagtgaaataagtgcaattagatcactgctacataaaagatattttcttctaagcgcagtaactagtaaaccatatcaatagacattcaaccacgaacatttggacgatatgtattgaagaaacaacacaaacagcaatgggttcagcaattcacatgttctacaaaatgaatgttcaagtttcgtacaccacagtatatcactaggaaagcataacctgacatgtcatgtcctgcagatatatccctagtgattcccatgaaattattactacctccatttcaccacatatatccaatctgttaggaaaatcaagaccatatgtattttctatatttccactatctaccccaactttaatgttgtggaagaggtcaattggttgtaatattcagttgatatgtgaggtatggctatatctcgttaatttttcttagatttagtgctgcttttgtttttatgtatggttaaattgttttttttttgtgaaacagtactaatgcagttttgttccatgacaagctttgacaagtgaaatcttttaaagttccttaaacagattattaataaagagtaaagtgcataggcggtccttaaacttgtaaggttgtgtcatctaggtccccaaactctcaaaatgcacatctaggtcccagaacttgtcaaagtgtatcatttaggtcccaaatcgacatagcccctatagaatcctatgtgacgctgatatggcatgccatatggacgtgatatgtccttttcttctttctcccttcttttttcttcgttttcttctcattcttcttttttttcctttcttctactcgggaaaagaaaaaaaaaggagaagaaagaaaaaaaagaggaggaaaagataagaaaagaagaaaaagataaatgggtttcatttgttagtcaaaatgatgccacgtcttgtccgtgtggcatgccacatcagtgccacgtaagatcctataggggctagggcgatttgggacctaaatgacacactatgacaagttcttggacttgtatgtattttgagagtttagggacctagatgacacacccctgcaagtttaaggaccgcccgtgcactttactcattaataaatatttgtatatccttcctgcatgtgttagctataacaaactaatggggcaacatgcttacattatcctgatcagcttctttaatgacgtcatcgagaaaagcatctggcatgttatgctctttgcaagcttgctgaagctcatccaccgtaatataaccactgccatctttgtcgaaataagaaaaggctgccactagatgttcctctcgctctagtttattgagatgcagagtagcagcaatgaattctatataatcaatggttccactgttgtccacatccgcctaaagttattcaaacaaaaataaatatgtaagcccacagttcagttttccaaggaataataaactctacaccataaaacatacacccgttacataagggagactgtaaattaaaacaacaggggcacacaaaaataaaaaaccgagatgaagttataagcatttactgccacataagcatatgctcactgaaataaaaataacctttctgtgtttgtcctgtttttgttcgcccctagttagttgagtgaaagctttctttgtaaaccttgtttacttcttcttaatgcacagtacagatatgtaaaccttttgagtattcacaaaaattgaaaataagttctagctgaagaaagcctaaaaaaaaatgttttcttgtggtttggaaatgaaatcacatggcaatcagagaagacaaaaatatgactcaacttcaaataatcggtgaaatacagtagattagtttaatagagatagtttgtctaatttcactcacacggtcacacagacaacagttctgcctaagatgcaaaccatatactagacactaaggagacacatccatggcattcagtttctgcaatcaatgatgttttaattcaatgaagaaaaagcatgggtcactgatcataaaacttggcttttgtgtacatgtgcaacagtgcaaggaaccaggtggcagactttcagtgctctttctgttcagaaagaagcaatctggatcataaaatatctaaaaacatgcaggaaggatccttaagctagcaatcataaatgttaattttaatagatttcaccaacttaccgcctccataagatcacgaatctcagtatcctttagtgttgagccatattttctcatgccttctttgagttcatcatatgtaattgcaccactattatctgtgtccattgccttgaacatttccttcaatcctgcaatctcctcctctgaaaggctttcagcaattacctggcaggacaaaccgtcagtcagcataaaacttagcaaatgtgcccccataagtactggtcatgtaatagagtataaaaactagcccacaaaagaaaattcagataataaagacaggaagcaattctgaaaaaaaaaacaatcaaaaggaacaagacaaggtaacggacactctagccagcaaacaacaatggaggatgacttcaaattgcttgtgaaaggtgaagtactatgatagctaccacagtaactttagaattgccaaaaggaaaagaatgtactcactcgcaaagccatcttctttaacttattcattgctgaaaactgcttaatgcgagaaagtacagcaggatcaagaggtcgatcaggagcgactccatggtcacaaatccacggatgacctggtcaggtatgaaaataattctttaacatctttgtccaacagctgtgcataagtagttaccatatactgttacaaaactaaatatttgcaccatagagggcacatttcagaacaatacacacaccaaaacatactgagttattgaagaaaagaactagagtaatggtgaaaataactaacataaaacttcatgagctgttaggcgctccttggggcgaggattcaacattcttcttataagatcctttgcactatcagaaatcacaggccagggatcggaatcaaaatcaattacaccttttaacactgcatcaaatatcccttgctgcgtctctgcattaaatatagtacaggtcagcttagacgagtgaaaacacaaggtttgaatttccaagtcaatttatgataataaaggagtaaatatatacctgcccaaaatggcggtacaccacttaatagtatgtaaagaatcacaccagctgtccaaacatcagcttctggtccgtagcatttacgcaacacttctggggccacgtagtatgggcttccaacaacatcagtaaaaacttgacctaagaatagtaaacaacaaacggaatttctttataagataactaattacactgaaaaattaatacagtaaatgctgcataagatgcacataaatggtaaatagatttatagaagagagattcataggaagtggatttcgcgatagatggtacttttagctatatgtaaagtagcttctattagttgcaatgaaacagttagttttagcccttttagaagtggtcaaatcagtatatcggtgaataacatatatttagattcaaataagtgtacaaagacaggttcgattttgattgttcctattgctgtagtctgtacagcaaagcaccaaacaatcaatttcttcttcttttctttttattattcatccaccagcagcaggaaacaattcagaaatcgatcttcacatatttgtcccataattaatttatcttttttgaaaaactgtaagtttaactatttttctttagtattcataaactttttaaatgaatgcaaaaacccatattttgctagcaatctcatttacgaacaacaattgtacccaaaaaagagagaaccccagaccaagagcagccttcaccatctgatgcgtaaatgttaacatctaattatcagattggatcagtatatgttgagtcccaatgaatgaatgaaatgattttaaacgactaaactatattcctattctctattctcaaatcttaatttccatacattctctagtcagatgagctaaagcaactatgtatcattaattccaccaaccaaaccattccatctattggactattaccatcaacgattgctcagaaagtgatggagcaagcgcaacagtcacagaaataaataattgagtttctaacagcaggggtgactcaccaggcttgaagaacacagacaagccgaaatcgatggccttgagcgacaaatcgtcgtctttattcgccagcaagaagttctcgggcttgagatccctatggataaccccgagcgagtggcacgcctcgatgacaccaacgatgattcgcgtgagctcggccgctttgcgctcgctgaattgcccgcgctcgatgatgcggtcgaacagctcgcccccggcgcagagctccatcacaatgtgaacgtactgcgggtcctcgtaggcgcccttgatggcgacgacgttccggtggcccgcgaggtggtgcatgatctggatctcgcggcggacgtcctcgacgtcctccttggtgatgagcttccgcttggctatggacttgcaggcgtagtccaccccggtggcgaggtcggtgcagaggtaggtggtgccgaactgcccctgcccgagcttgcgcccgagcgcgtagtgctcgctcaggctcggggtcgggtgcccgagcacgttggccgtcagctccgcgggcgcgggcgccccgcgcttcatggacgcggcgtgcggcgcgtccgccgccgccgcagaaccgcgcggggccttcttcccggccggctcatcggcggcggcggcggcggcggcgctggtggcgacgggcgcgtaccccgcctcatcatgccgctgcgacgcgccgcggaagctggcgaagtacttggatctaagcgtgacgccgcacgtgttccccatcacgcgctgatgatgcgcgccgccgtccacgcggcctcctctcgcatctaccctaaagcctcgccgcggggtttaggtagcgcgcggcgcggcgaggcgagcaatggagggagttggaaacttggaatcggaagcggacggaagcagcagtggggattgggaaagagaggggggaggtggattggatgaggaggaggaggcttcacgacgggttcgcgtccacgtttgcggaaagcgaggggaaggccgctgctgccgtcgcgggacatacatgcaggctgcagccagcgtcgctctggcgccgcgactctgctgctcctgctgggaaggcaggactccgatagatttactcctgccactgccactgcccccacactggctatagcaaccgggatggtcctgctgattcttcggatcctgccttttccttccttcattattcgtttggttaatgcttgatagttttattagtagtagtacagttctccagtattttgctgcctgcgtgcattgcatacattaacattcacatcctgaatactgtacgtacgtactctatcagataagggtctatggaagctggtacactgacgagtcacgacagaagaagacgttgaaaatacatgccagcgcgtcgtcggtgagaacaagacgggttcgtgcaaggggagagaaagggaccaccgaatggtccgcgggcaacgtgcggcggcgggggatcaggggcgttcgtgtgggtggtggcaccccaagttgcagtagaaacgcttgatgcttcccttcccccaaggcggtctcttttctgtaaccaatcgttcgaaggtctcggcaggttacagctagatagccgtgcctacccgcaaagcggagtgcagatgactgcacgggtagagttgagagcaagtttaatagtatagcccactactagctccaattcatctctagccaatttaatagttaattcatacaatagttgcttactatactattaatactcggtcccacctgtcatacacacattacgtcttagagtccgtgctgcagctggctacatatttgtagcccgctgctcttctctctcatcctttatctcattaaaatatgtttacagctggctaatagcttgctattgtacctgctctgagtcggataaaagagggctacacaagctgccttatcaaatttgtacttgtgtggaagatagacaagagaagagagataaaaaaaccggttacagatttgtaaaaaaaccggctacagatttgtagtcagttacagcacgagctctaataaactatttgagagagatgggtggagcattaatgatacaatatatttctacagctaactattatatgagtgagttattagattgacggtagatgatggtttaaattttggagctggtagggtcctatattattaaactttctctaatcggatgagatctaatcggatgagatgaatgaaaagaagaagaaaatgcgtttgggtaggattggtgccatatcgtctgattcacaatcattacgactacaaaagcaaatcgggactattcgtgcgcgaaatcatgtgatgaggaccgaatcatccggttgaaaggatctggaataagttcatctaaggtcccttaacttgtcaacgaattcgattttcggccttcaactgcaaaaccagatacaacgggtccctcaactattaaaaccggtgcagattaggtccctggcggtttcgatggtggttttggcctacgtggctaattttgacttggtctcaatctgacgtggcactgatgtggcgcttacgtggcaattcgatctgagaaaataataaaccccataggacccacatgtcagtttcacaaaaaaaatagcaataatagtgggaccaacgcgggcccgccatgtcagtctaactcaccccctcctcttctgcttcctctctctccttctcccctctcttcatctctctcttgcggccggcgacgacgacggcggcggaaatggagaagagtggccgccggccatctctctcttgtgcgcgctcgccggtaggccagggagctcgcctagctccttcccaccggcgggagaggagggagcagcgcgccggggcataggcgtgacgcgccgggcggcgctttgaggcggaagtatacgctgatgacgtggccgtcggaggtgaaaaaggtcgtcatagactcacggtattggcggtgtcgtcggcagcggcggagcaggagttgtagttggagtcctcatcgtcgacctcgagttcgtcaatgtgctcgagcattacccaccgttgttagctgctggcggccgaaggtaacgccgccatctcctgttgggtttccatgggccgcggcgagcggatcgatgggttcctcgtcagtccggccggaacggtgttttcttgcccaaaacaatgatcattcattcattcatcaatcccgtcgtaccacaagcaaatgatgatgacgaagcaaaatatactccagtcagctagtactagttgctattgcttctacctttgtatgattaggcacataaacaaaattaagaccaaacagaacgcaaactaagcaactccatggacgcgccgtgcagcatcctcggtggaatgcacagcaccgtgccctcctccaccgcgacgtcgttaggagaagagccggagattggacgacgagggttggactaaggaggaggaggaggaggaggacgacacgcgggatttgccgagcgcgagccgacggaagagaggagcggaagagaaagaagtcgaagcgggagaacgcggagcggaggtcatcggctctggcgccccagccgaggccgtggatgaagagcttcctgctcgcgggatcggcctccgccgcgcgctgcacggtcgtaatcgtcgctggggtcgtcttcgcggctggtcgcctctcccctctcccgccggcgaggtggccccctcacccacccgcgcggacggccgcctccgaggatgcgcgcgtgtgtcggccggtcggcgagacacgttcatcccgccgccgaggatgctgaggtcgacgtcgacgtcgtccgcagccacggccgcggcggcgccgccgggctggttcccttctccccgctagtttccctcccgccagccgccgcgtcgcgccccttctccccgccggccaccgccctctccccgccgcctgtcaaccgaagagaagagagagaggagaggggagagagatgaagacagagaagatgaggaagaggagaatcagaatgacccagcgcaagagagagatgaagagaggggagaaggagagagatgaagcagaagaggaggggatgagttagactgacatctggggcccatgtgggtcccaccattattattattattattgtgtgtgaaactgaaatatggatcccacggggttattattttccgaattgaattgccacgtaagcgccacgtcagatcaagaccaagtcaaaattagccacgtagacgccacatcagccaaaaccaccatcgaaaccgctgaaggacctaatttgcaccggttttgatagttgagggaccccttgtatctggttttgcggttgaaggacgaaaatcggattcgttatcaaagttaaggcaccttagatgaacttattccaaaggatcccctctccccgttgcaaggcaagaaaagggttcatagggcacaatctgctcatgttctccctgggcctcgcgctatggcccatacggcatgattgcccatcttaagctgataagctctcacccaaactgtgagagcttagttgaccctaatccattttactagcaaacctacattcattggcttgaagcgcaaccacgtgatcatgcgatgagtcctagcgcgacttcgtctgttcacgagaaggattaattcctaattcaaacacaatcgtgcggtaaacgtagataagtactcaaaaaccatgtcccacaaagaggaggtcgagtcgacgttcacagaaaggagtactccaatcgcctagcacagtgcgaagtgatctcggaaatcgacctgtgactgttcacccgtggtttccacgactcgcacgagctaaaagctcacagtaatcaccgttgcagataagcttcagattaagagcaggtataatagcaggctataagctagctacaaacatattttaaaaagataaataaggagagagaagagtagcgggctacagatttgtagccagctgtagcacggactctaagacgcagtgtgtatatgacaggtgggaccagatattaatagtgtagtatataactattgtatgaataagctattagattggctatagatgaattgaagttagtagtcggctgtattattgaacttgctgtcgcgcgatagtgcgatctgactcggctcgcggatcccatccgcctcccgacacaccactagctccaccacccaccgttccgtatcacgcgaacgcgaagtaatcagcgagaggctgccgctgaagcgagcggtggtcggtggacatcagcggccgcgcttttttggtcgcgcgtggccgtggacggatgaggtttattatgccatcgcgtcgcggcgtatacgtgtagcttgtcgcggcgagcgtttggccgacgcgcaacgcaacaatcctgtgctgcttgttccggttccttcccaacccttttgcaagaacacatcccggtcgtggtcacggtctcacggaccttttcctgggaccttttttgcacttttcttcggttgccatcttcgtaaataacctcaacgacaggggtatcactcaaaactatagtacgggtcccccgctttctcttcgtcttccccgcgctgaccgagcttcgcgatctaaaagtcaaaaaccaatttagccgataattcggctagtcattccataataagcccaattcttgcactaaattggggcaatctgctctttgttttcggctggtctcgggggatgtgtggtggtgattaaccccggaacccccccccaattcccagatttaatttcacttgcaatctgtgattcttctggtgaggtgcaagtgcaacgacaggtataattgaactacaaatcgttctatttttcgatttctagaaattaaatttgggatagtcctccagaaacctaatcctttttgtcacttagggtgttcaagtttgttcttgggcgttcttggtcctttggggttccaaaggcgacttctttcgagaggagggaaagaagggaaatgagggatgttctcgtggttgttgaggattgcgtccgcgtgcttgggcccggcccggaggtacgcgcgtacgaggaaggatgaagatggcggcgataatggcggcggcgtcgccgacggcctgctgtggtcgcgggacctggggcgtcacgcggcgggtgagttctcctttgccgtcgtgcaggccaacgaggcgttggaagaccatagccaggtcgagacgggctccgccgccaccttcgtcggcgtctacgacggccacggcggtgccgatgctgctcgcttcatatctgatcacctcttcgcacacctgatacgtaagtagtcgcttccttatactgttcttcttgcaatagaatccactccagttcattaatcgcaactcttcatggcttagtttagtttcaacttgtaggtggtgatgaatgaattttgtgtggttttactctttagttgcttcatgatgcacctgttggctatgcactgagcagtagcatttcctttattagttttttggttctgtaattattctgaatcattggagttacctttgttgattgctctttgctggatgcaattcttgttggtatacattccactcatcgagtatgctgttgtttcatgagcagtgcaatggacaacgcaatgctcttaccagtgactgagtggaatctgatcattggacaagctatcaatattcttggtcctttgcaataacagattactagtaggtactgtagtttcttgtcgtgttcaacatcttaatgttgtcttttacttacagactgacttgatttacgtgagatgctactgagtaagtgtatccactgactgcatgatgtgaccttatccttgtcgttaataaatggcaagcatatctcaaccgaaattgttcagtgcaccaaaatgactgctcaacctttcctatctttctaggacttgcccgagaaagtgaaacagtatcggaggaagttgttcgaggggcattttctgctaccgaagaaggtttcttgacacttgttcggagaacgcagtttttaaagcctatgatagctgcagttggatcttgttgtcttgttggtatcatatggagaggggtactatatgtggctaatttaggtgattctagggcagttgttggctatttgggtagaacaaacaagattactgctgagcaaattacaagggatcataatgcttgtaaggaggaagtgaggcaggaacttatttctcgtcatcccgatgattcacaaattgttgttctgaagcatggcgtttggcgcataaaaggcataatccaggttggtaagcaacagttattgagtaactattacaactataatatggtttcaaggatggttgtgattgtatattaatttggtaatgattggaccatattcacttgttacacaacaacccattagaggagccaagtaaaggggtagagggcaacaaatcatagaaattaaagtttgtgctttagaaggattttgtgtttcttgtagtttacaagagattatgaaggtgatcatgttatttattttggtagtaagagaacaagaaatactgccgtgtcatttagattccccaatgatggcccaaacatgttgagcagtacattatcaagattttccgcatatgcaaactaggtacttgatgtaaaactattgtcacattttgtgattacttaccaggtttcaaggactataggtgatgcatatttaaagaggcgtgaatttgctcttgatccatccataactcgcttccgcctttctgagcctcttcgccgacctgttctaacagcagagccatctatctgcacaagagttctttctctgcaagatcaatttgttatttttgcatccgatggtctttgggagcacttaacaaaccaacaagctgttgacatcgtctacaaaaatccacgagcagtatgtcttcagacctttacttacatgtgtcgttgcttgtttttctttgtttgtgggactatcccgcaatgcctaggctgattacttggaaaggtgctaaatctaatttccataattttggtagggaattgcaaagaggctagtaaacacagctttgaaagaagctgcacggaagcgagaaatgaggtttgttgatcttaagaaagtcgaaaaaggggtgcggcgcttcttccatgacgacattacagtcgtcgttgtttacatcgaccatgagttacttcaggagaaaaatgtttctgttcctgaactttcagtccgtgggtttgtcgactcagtaggtccctcgagaatttcaggattcgatgctatttcatgatatggtgacctagcagctcaggttttgtgccctgcattgcagtagcatcagagttttacgctagagcaagcattgctttcaacttggtttttgttttgtacatttacctatttcaggtactaaaaagttggtttcatgcttgcaatatgctcggaataatcacaacatgctgtttttcttctacgtactacatcacaacagatggatactgatgtgaaaattcccaatttttggtaatctgagcaaaacaaaaaatatatttttttatgtaaacactgaggtattggatttttattcgtaagcaggacaacgtaattccgcagcgtcccattaaaacaattggacgccaccgatctagagcgtccggccttctcacggacgcgatgttctcattgcgtccatagcccacgggccaaagggctctgaaaacagtatccctgttcttctgcatcctatcaccgtaaaatccccaatctgaaaacccacgagtaaaccagcggccacaaaccttaacggcgtggcgacggcggtacccatcccgttatttctcttgatcgagccttaaggtatcaagcttgccgtcgtcgtcagttctaagtacgcacccacgcgactagctctcagccatcaggttagtcgtcttacacatgatgagctcttttggttttttcgttggagactaaatcgttgtgcggcattctctttctttagtgatacattatagtgctgctgcattaagcattagttgttaatttttgtgcttatctttataagacaatgacagattagttattagcaaatagcaacatgcatcctagcttcctaacaagctttgtaagctagtttatctgcttatcccagttctgtcaacataacaatgcgactataaggaaacaaaagtgtgaaataatctagaaattagttttacttttgatcaatcatcttacgatgcttgtttataagttcctgaaaaagaaatcagttgtacgttgtttgacatgcttccttaattttttgtatgctacaaactagtaagatgaggactaatcaagatgggttaggtcggttagttacaataagtgatgaggagataggcttactggatggagatcaaactttagttcagcaaactgaactaaatgtttcagaacgtatcagtgccttactatggatgcctcattgccagcacaaaatctcaaaagtttgggaaaatgtaagctattgctagcttctgtcatatacctttccaaaaaaaatgattggactaatttgtatcctacgtatgcaggctaatgatggtgttagtgtcaggtatcaccacgtgggcattctataccattatttatgtgaaccactactgaagagacttggattctatcaagtttcccagatggttgggatgagtgttgatagatttctaattggagcattagtagagagatggcggcctgagactaacacatttcacttaccagttgaagagatgacagttagcctacaagatgtgagttgtctatggggcttaccaattcaaggtgagcctattataggcaagttagcggggccatgggttgatgaaattgagacattactaggagttactccaggaaaacaagtgatgaagcaaaaaaagcgaaaggcggacggtgacttggaaagcgggggaaatatgacatcttctaactactccatcagcttagagaaattacgagatcagttcaaggagatgccacaaaatgcaacaaaagaacaaattgaacattacactaggg

SEQ ID NO: 7947 - DNA, 8684 bp, Oryza sativa
  unsure (1)..(8684): unsure at all n locations
gacgttgtgcaaccgatctatcacttctttgtttaccttgtcttggccctctaccatgcctgaaattggattgcagaaccagtccttgaactcttgatgtgactgaaatacatgaggcatcaaaaagtgcatgagagaccaaagttccatgaggtcattttgtagaggagttccagttaaaagaatgcgtcgcttcgaattaaaatttagtaaagtctgccatctttgtgatttccagttctttatcaaatgagcctcatcaagaataagatacttccatttttttcgcttaaacactttggagtcctgaataacaagcctgtatgtagtgatgcatacatggaagtaatttggtttcatccaaccttgacgtttctgttttctctcttttgcacttccaaaatatgtcagtattttaaacgcaggacaccatttgagaaattcagtctcccaatttagcataacactagttggcactacaataagatgtggaccccatattcccttctcacatgcaaggtgtgctagcaaggagatggtcataattgtcttccccaaacccatttcatctgctagaattccattcagcctcttttcatacatagcaacaagccagtccagtccaatgtgctgatattctcgtagagaatgcttaagaaggaaagggaattttgtccgcacatttgttgttgagaacgtgttaccagtcggttgtgctgatcttgcagcagctgcagcatcagcaatcacatcactattatctccattggccatcgctttagtatcagttacatcaccctctttagcagtattttcctgtacaataggctctgatgtttctagttgtagaacactaccactgacatgctcaggtcccagcatgcctgcagattcatgatcttcaaatgtgtcattgttgccctccacaatctctgcagactggtcattattcacttttacggtctctgcagactgatctctggtcagtttcatggtatctgcagaaagatccctgtttacctccacggtgtctgcagactcatcatccacaggcatgttggcattgacatcctcaactgatagtgcaggtgaattttccaattctgttgtgtcatcatctgcatagccatcctaaacataaaaaaggcattacaaatggaccacagtaaagcataactgaagaaagaaatagaaattcagcagataccttttggtatcttgcaagaagttcttcaagtgggatctcactctctttctgcagtaacttaacctacagattaaaaaataataataccaatgatccagaactgtcacaagaaatatgtattgcacaagggtgcctctagtacaccatagtagtatgtcttttgtatcagtcctagtttagacaagaaaatagttttgcatcaatctaggccaaattaggttgtatacactcgaatattcaactggatactttgaatgtgttgccatcctagagcaagtttattgtatcacaaaaagtggtatagtttaaatcggaatccacaaaattactatctagttgttataccaagatatttcgtattaaaatattaaccttaagtagttgtgatagcacagataataaatcgattgtattttattgacaagtttattctactggcaacaaatcaggaactagagtggctaaacttcacagtgtgaaattttgaataataatgatgttcaatgcttatattcacctcatctagaggatcacagtcttctttcttcgccaactcttcctcttcagacaaagtagcttcatcatcctgtcaaaaaagatgagtttatagctgtataagaaaaaaccgcaaaaagagtgagatagactaaatcgatgcaaatgataactaatccatgaatggatgtttctagttttgaaggaccgccacacagtcataggatgcagaatatatgggaaatatgaaggcagtgggaaaaacagatgaagatgttcatggtacctttccttcatcattagcaacataatcttcgtcgtcctgaaaatggtaggtacataacagttgtctacattagagtgttaccacatgttgctcagataacaaataggaggggagaaaagcttttttacttggcagtcagaatccaaagaaaactataacaggaatcacaggaatttgtttgaaaattctaatccacgtcaactttaacaaacttcatttccctaaaaagctttgtacttgacaaaaattgccagtttggctaattcacccccatataactatatttccatccattttattgggtaatgtagtctcaagagaaatcaagtcataatgcaacgtccccccactctgcattttccttttctcttgaagctacaggagagactagagaagttaaaatattccatttaatacgggtagcaaggtccaatcctatttattaacttatttgcaaacattagttggagtatgcaacaaaactaagggatcggcagtaagttgccaataaaatcctttcttccccaccccaataccattcagaaaacttggtccaacaacaattgtctgttcgtactttccaatatttgaaagatttcattatcttgttactaggcagtggacagctggtagcggtgggcataaaaaccgaggacggaagaccggacccaaaaaaacgaacccaaaaagaccgaaagctcggtcattggtcactaattcgggtgtacaaccagaaagaccgaacttaattcggtgagttcggtcgttactttggattaaccgaaagaaccgatggaccgaagcagccaactacctccctgtatccctcctgtacaaggcccacaagtccacaagctcattcgcatgaacacatcagccacaaccttatccctttcgtccatcacgcaaaggcaaacccatctgcgccagccttctaaattcgcaacgccacccatgctaagcctccgagcccccggctgatcgttgcaacgccgcccgcgcctagcctccgcaccgctcgacgctcagctgctcgttgcaccgccgcccgcgcgcagcctctccgtggcccctgctgctcattgcaccatggccagcacccaaactccgcaccacccaggtcccgactgattgtcgcaccaccacctacagcctgcatccaccctacctccgcgccaccgcttgggcctagctctcccagagtccatgtaccttcggtcatttcggtggagaccaaggatcggaccgatagttcagttaactaaatcatcattaacgatttcttgttcactacttctgttttctatttgtaaaaaacgatcttcagaaaaactgaactacccagaccgaattttcggtctagacagaatgcccacccctaacagctagtctttctaagagatatgagtgaaatagaccaaatggtattggaacggagaagacaaaatccaaaacaaatacaatgataataaaaatgttcccctccaaaaataatgataacaaaaatgtacctttgcatcaacagatgagatattgccattgcatttcacctgaaaagtcaagaaagtttgatggcacgttcagagaacattcaaaagctcgaaatcctgagtcccctgtctttactatatactacataagcataagccaaatgacacaaagaaatcaagcatacagtnnnnnnnnnnnnnnnnnnnnngtaagactggtaatcatctgcttcctcagaagaaatgccttcatcacttgaagtatgatcagattcatcgttgcatccattagcctggttcaaaggatctggaagaaaccatacacaacacaaatcaaatgaaaggccacaatgtgtcaagtatttcagattccaaataccataaaggtgtctgaaactctgaatatataacctttaatcaaatcctttgaatctgagtcactaaaaacgtctctgccatctggactgctttccctgctaactgagaaagcttgaactgatcaaattatcaattgagagcaaagtggaacacagaattgattcctaaaatatgtgaaacatggcaaaagagaactgtttttcggagatcacctttatttttagtgtacaacttgagaatatcatccagtggtagatcagcttctgcctgcaaagcagccaattcctcgttgcgctcagcctccgtaatttgagcttcatcctcatcgattgtgtgttcatcatctttctacagcacaaacacacacaagagtaattcaatgtcctgagaaatgaaaaacaaaccaaaaaggaaaaggagaggtgtcattattatcttttttggacaggaaaatatgtattccttgccctggtacacaacttacaaaaaaagtaataatggttggtgccagtaccagtatctgtagaaatctaacaagttgtaatgctacccacgaaaaataaaaaaaagaatcaaaaaaatcacaatagtagcttactggctcttcacccaaggaactgttgtaatcatcatcgatttccacattgtctgtaaaagcatactgttaaaagctaaagaaaaaggacatttaaaatttcagagatatacagaacatttcataaagctacacaccaacatcagtcggacttgatgcatttatgttctcttgtgctagttcctgctgggatctttgattagtctgtaaagagtcattttcttgattttgaaggcgcacatcaacaagattttctgccagcattgttgaatatctagaaaaagtttgcacaaaacaacagagagtgagcatgcagcgatgaacttactaaaaagtaagatagttccaaaacaaaaccaactgataatagatggtagtacctttcagtctgtcctaagaggaaatcaagttgcttgtctagggccttttttttcctttcctcaagctccagttggttcttataaaaaacctgcatcaaacccaaatataaatagcataaggtttagtatattggaaaatgtggtgttctaaatatacactgagccacaatgaacttgccagcttctctattttggtccagaacttcttcacgtccttagaaatatttagggcaacttttctcaggcgaacttcttcctcctatgaaaatcgcagccaacattaagataaaacccatgaatactgatttgctatccacataatctacggtcattgagtatgtcgctcaatgtgctggttatatatttacttgcagttgaaagaacaaattaggggaaggaacactgcttggttctcaacttatcttcatcaaagttcaattcaatgtgctgttataaataatgtcttatgtactaatgaaatatatttcctagactgaccatagtttatgccaaaacatgcagtacttgtgaatttaacctattctaggctttatttgtcaacctgatcttattgatcaaagtctccaccaaatttaggtttagcaagcagttaagcaatcagttagctatggttcttcattctttattctcggcaggttaaagtcagatcatggtaataaataaagggtactcagttaaggtccctgtgtactgcagtgaggataaactaagatgcacatcactcagttcagcaaacggcaagcatgcagatgtggccatgtgggtcattgccagcaataaattacagtccagcttccttgtcgccttcccagcctccaacctttcccattactacagtttattattctatgtatataaatgataaagctgctgatagccttcaatatgggacagaattgtaataagacaactctcatggagtcatgttaatctgcctaattaataaaaaaaagacaagcaaaccttctgttttctctcgtcctttgttgcttggtcaactacacccttattagctctttgagcaatccttttagccatggacagcttccattttctctcagcatcaaactcctgcacaacatttaatattaaccaagccaagggaataggattagtatatcttcattataaaaccatgcaaattcactcagtgaaagaaggatcatgatctgtcaaatgtactaatagcaagtaacctttgccagccaagccatttctccaagaagatggtcccagtgagttttcgtccttcgaggctccccccttggggcttcaagagcctgcacaagataggacaaaacttttcagtcagtgcaatacaaagaaagtgaaaatggatttacatatatacaaaagaacatgacttaattttccttctctaactaggcctgacaaaatcaaaaacagtattatgcaagcgtggaatagaaagaaaaatgtgtgtgaagataagagaaatagtataacaatgatttgcagctactaaacataaataccaatgctaaaagctaaccttctggcgtctggctcttgtctcatgatctaactttgatcgaggaccttttgatgccatctttccgatattttgtagagaactatctcatgtcttggggcatattcagaaaaatcgtatacaaactgtaaaatacatttagtgcatgagataaaaggtctaaacttttttccaaaaaaaaaaagtattacagaaagaagagaaataaaacagtgaaactaggtcattaagtcatccgtgaatggtatgacatgttttgaactccctacgaattgtccaaaacatctattcacacgtttcaacgagtacccaaaaccaaccatgatcatcatagtcacaatgcaacattaataacccctaataaccaacagagctaattgacagtatctgagcttatacagcatgtgacaacatgaaattcctaacagtacatgttggagttacctgcaaaaacaatatgtagcagaaggcaaattgcacctcagagcaacactagtcaaatgcactgaactcatgttaagtcccatcactctttggtcaaactgattggtcgatcggagaaatgagcacaaaggcatcacataaacgctcagcctagccacattatcaccatcctaactgatacttatgccgcattaccttactcccaataaaagaataaaatatcaccaatcttatgcaccaaaacttcaaaacctgaataccgcaagctgaaaggcaggcgcccatgccatcgacgcaaacccctgcagaaatgctaaaccccacaaaagtgcagcccagacccaaagcacaagtaggagccctaaactacagcgacatagagtcgaatcgactcgatagtttcctcacctcggcacaaaccctctgaaccagagaggcacccaagcgtggccccggggttcaaatcagagaggggcccacccaccccaagcgccccaccggcggcgaccggcggtgcggcctcgcggcggcgaatggccccgtcagggccagccgtcggaggggatctcgggcgagggcctcgggcgccggcggagcaggtcgtcaccggcgagcggcgccggaggcggggcggcggcgagatcgggggagtctagggcacgggggttgcgggggttgggggactccttcccctccgcctcgacgcctcgggagctaaaactcgcgcggctgcgaatggacggaaacgcccctgggggttgcgaggtgcgggcggcgcgcgtggaggcagtctggggatttcgcgtgggctttagtggattcgggcgcttttgggattattttcgcagctgcggggtgtcacgcaggcttggctttgacgaggaggaggtttgttttatcgttttgccccgcttttgattgcgggacgagttcgctgagccggaggaaggatgcgaaatcggtccgccgctatcgacccaagttgttggggtcgtctccgtggggccctgttgcagtgagagaggtacgtcggtttttcaaggagtactccttacacaggatcgcagaaacctatcactatcactctctatcagttgtgcggttgtgccatcttttgggggctgtgttgtaaatggcctggagggaacaatatgggtagttttgatgggctttctaatgggctctcaattacccttctacccaattaaatttgccaagaccatcaaattggaatagctccactttaaccccctcaaatataggtctaatctaattcgtatatctcaaccgtaatgccggatcttgaccctccaagtattaaaaccggggtgaaatgtctctcggtggttttgagggtggttttcgttgacgtggttccggcaaagtcaacacatgggtcccacatgtcacatcccctccctcccaccctacccccctcccccttatctctccctctctctgcccccttcctcttccctcttcgtccctttctttcctagacagctcctctcgccttcttctccacagctgcgtgcacgggatcggggggctagaggcgagcactcttctcctcactctctctcctagcttcgggcacaatggaatcgaggacggcagtcagcggcttggacgacagagccaaggagaatggcgacggtgtggccgaagagaaggacatcacgtcactactagcctcgaggaggtcgacgctggcctcccgttttgtcatgtcatgcacatgtgtctttccctcgatcctgaaccctgactggacgtataggtatgtggtatgccaatgacagttattgaagctgccatcagttatgcatttatggattcgggtctagtgaatagggtatgcctaagcgcccaccc

SEQ ID NO: 7948 - DNA, 29415 bp, Oryza sativa
aatcccttatatttagggatggagggagtatgtcccaaaataaattaacctagtacggaatgtgatatattttagtactacgaatctggacagctcataaaatgtatcacatcccgtactacgttaacttattttgggggcagaaggagtacgattcctcacatcaacaactccgcacaactaaaactaaccaaattttagcaatatatagtgcatgcatgtattgtagtatagatgtaattcatgagttaatatgaaaaaatataacatacataaaatatataactaacgactttagtgcgtcacttcccaattgtgagttatttttttaactgccgccttactagatagctagccctacattatgatgtcatctcagaaaaatcatagcaaaaaaaaaaggttttcgaatagactatatatatgttagacacaacgtaaaactttcaacatcttgttgttttcttgtggactttaagtaccttcattttttttacaattaattgtaccttcttgatcaatatatatttgcttgttaactaatctaatgattaattagaaatacatgcatgcataggcgttcccatattatagtattgattaccacgtgaacataaaagtggaattgctagatttcaagtgcctaaaatttcacatatagtacctaaaattaattgcagtgctatgcaaaatgcgatttaggttcattttaactacattatgttgttatatatatggtttgaattcatttttgtctatatatgtttgaattttctttcatgtatcttaatttgtaatgttttatgagttatatgaatttatttgtatttttgtatttttttcttgtttgttagaataatttattgttcaaccattgggtagttgtaagtaccactaagtaacaggaatgtaatggaaccattggattattatctaacaagggacgataaaagtgagtggactttttgaaaatttcaggcgcctaaaatctagacactcacgaaaaaaataattacacaagggcatgatgatttactaacacatcttgatatgttgttgatcatatgtaaccataatcaactcatgatcactcatcatgtatatccaaaatatttggccttttagccctgtcgtaggttttaatttgcctagtagtactggccatattatatatctacatcttcatataaaatagctcactagcaagataagtatatatatggacaggaatagagctagacaccataagttgccatttcatcctggtaaccgggctatatatgtaatatggatatttgtcaccttcacaaatacaattattgtgtcaatcagtaatatgctataaattcattggagtctgttgtggaccctaattacaactgaacaatatatagaagtgcatgttactatgcagcctatttaaacttaaatggggagaaataaattaagatagagttaataaactagggagaaacatatatatataaggagactgaaagcaaaaaaggaaaataattgggcttagtgggactaatgcccattgaaagaagcaagaatcaccctaaaaaacaaagaaagaagcaagaatcaattggaaagaggtaagaactatatattttcactcaaacaaaagctaattaaactatatgcgtacggaaaatatatgtctagatataccatggtatgataaccttgctggaaatgaagatatataagatcaatgttctgatccgctcgatctcaatttgcaaaatattggtcatttcagtatacagattcacggaacaagaaataattaagctatgttttgactatagatactcagatttatatacttgatataattatgttccaaggaattaattagttctctgggagattggcaacactgtcaatctatggagaaactttgttcagcataactggggggggataagagatgtaatagaagcttatttatgaaagaattaatggatcaaattagacatctattttcatcatgtatattactatatatattaattacctattattctcaatctagatcatatatatcattagatatagagatagtaaactagagtttatattagaacttaagaaaacgagcaagactagctacatgtaaagttttcatgctaggtgatgcagataataattaagaaaaagacgttctaatttcaggcaagatgctacattttaatttctgtgcttagctactcaagaatagtacctgtagtccttaattagtaattcagacttttcaattcacaggatagataggaccaaccggcaaactctcatcctagctagatggatgttcatagcctatacgaagatcctcaaaaagaagctaggcagattccctcaaaggcatgctaactgcaccctaggagagaaaacttaaccatgagctatcaaattgcagccaccatctagagggtatatacatgcacacatatagcatggactgagcttgggaagcaaaaactgaagcaaagcagaagaaagaataagcagacgacagttacatgtaccaacacacctcccattcgtcccccttttgttttgcgaaggagatagtagaagactttcctttctcttttcaacttcccataacgtactccctctccctttcccctttcccctttcccaatcttacaaatggaccaaaatgtactcccttgcaagctagctatcctcatcagcatcaatcaatccatctctattctctgaattccaaacccttccagtgcaaaacaaaaaccgaaatgcatgcgcctactctcttactacagatgattgctagttatatatcgacaatgcatatgcatctatatatctagccaaggccggctcatgtcctcccttttgctcccatcactctctgaacacacccacaccgtgcaggccagtagtcctagctagctacactacactacacttgatgacttgatcagtgaaaaggaaaaggggagagagagagagagagagagagagagagagagagagcatataggggagctgagatcaaaacagcacaagcgcacagccaagaacggaagcagctaagctagctagcagccgcagcacaacgacagccaacaagtgtacacctcctcactgtttgctactcccaaatcaacagtgatcgctcgtactcgccccataaattctcctagcgggacgtacaaggaagttatggccagtgagtgccactgcatatattgtggcaatattgccccctctttacagactgccacggccataaagatctcgtggactggtatactgttcgcgctcaaggcccagacaatccaaactatacgtaatctgtcccactgccatcagtaaattttccagtgtaccccgctaatcagcaacagaattatgcgtaatctggtccaccctgcatcacttaattcagtgtcccccgttaatcagcaacagaaaaatttaagacatggaaaactcaacaccgtactggatatgccagtagtatatatatcccccatatgctgctactagtagctagctcagtactacactctataccatgacgttacttatacagatatcatacatccatgatatatatacatgcagaagagagcgacagtactactgccactgtagcaggggaaaaagcggcggcaaagagggggaaaaatatatagaagaggaatgtacgttcacgacgactttcactgtaaatactgaaattatggtacagtgaatggaagagaattttgagatctaacctgcaattgttgctctctggagttgtttgttgtcgatcgatgcatggttattaacgcgccgtccaaacgttggggtcgagatcgatgcgatcgattggatacagcatatcgcacacatatgatgtgcaagcgaagtgaggcagccaggcactgcttgcttgcttgctttgtgttcgtccatggatatatgttcaaatcttggcagatgttaggagagattatataaagaattttgcagatgtatgttatcatatgtaggaaatgggcttgtgtttatggtaacaaatcattggacagaagtaatcgagcaagaatggaatgtaatagaacaaagcaaaggaagagctcaagctcatcacacggatttggggaaaactttcaagtttcctaataattctctatatcttctcaaaccaacagaaagattccaattaagtggccaacaaaacaaaaatgtcaaatcctaatgctgtcatcaaatttcaggttataatggaatcacaagagaaagtgagatcgatgttgctgcgagaagaagaacaaaccaaatcaaaacagaagaagaaaaaagaatcgttgatgaactttcctttgtttttctctctttaggtcgctacagatcgagatccaaggccgaatgcgcgtccctcttggaggaagacgacgacgacggagacgatgcagcggacgactcggcgccatggtggtggtgaggaggcaattccagcagccgcagtgttggatccctcctcatccacgcgggcgtctgcaatgacagtgcattgccatgattgctcgactcgccggcggcggcgccgccgccgccgccggcatgcgggttgtcgaggttcacgccgaacagccgcacgcgcttcgcggccgtcgtggggctctcgatgaccggaaccgagtcgagcaccaccggtgagcccgccgcccttacaccatcgccgctcggctgcagcgtgtagtggtggtgcagcggcgacggcgcgcgcgccagcagtggtgcttgcggaggaatcctcgccgagccgaacaggaggacctgcctccccatcgcggcggcggggttgaagcgcggaagtcgaggccttgcctgaggcggtgctcgtagagcgtggccggcggcgagggctgcacgaagaatccccctccgccgccgatcccccacggggcgtagtgcgacgtgagcggcatcgggagcggcagcccgcggggcagccggagcgggtcgcgggtgtcggcgcggcgcttccagtcgatgaagaggcggtgccgcgccgcctcgtcgccgatgccgcgggagaaggagacggtgtccccggcgtcgaggcgcttctccttgacgaagcggctccaccccttggtcatcacgtagctctggctgctgttccagtaggagtagcggaaccgccatggcttccccgcgcggtcctcgaagttgagcaggaggcccttctcgttcgccgccgcgtccagcgggaagtacttctcggcgtactgcttcgggatcaccagccggttcagcttcccaacgtcgctcggcgtcaccaccttgtcgaacatgtgctccttctccaccacctccgcttctccgccgccgccgccgccgccgccgctcccagacgccccggcgccatcgtcggagcgaaagggagtgctgctccctgacgcagacgccgacgccgacgcggaagccgcgtgatgagcaggagacgacgacgacgacgtgggcgcaggcgcggcttcggccgtggccgtcatgaaggggatctctcgccttcccgcctcatcctgctcctcgtcctcctcttctttagaaaacctactgcttgtagtgaactccatagaaaactatcactatttcctcaaattcttggctgtatttcttgctcctctctcccaactcctccttcttcttcttccttcttcctcctctgcaagatgttcgaggataggcactgttacaaagaagtaagctataggatactagagagggggatatgatctacctatgtatgcgtgtatgtattgtattgttgttcctatgaattcctattgatctcgagctgtgtttggaggaagcaagccaagctctagctagggagagggagaagagcagagagaggaggaatcagagcggtttgcattgagtcttgtgcgcttctaagctatggggaattggggatatggtgggaagagagagagagaaagtgaccatggaattggatgtagatcggtggttcttactggttatactactgacactgtcatcgaatacgtcactccgtcattttctttctccattttttttgttcccaaatacaaggcattcataagttcaaatacttcgatgccattttcatccgtacaaatgatcccaggaaatgtctgcacgtgcatattttagtaagatattggaaactattttgatatgattattcctcgatgggttgtcctctcatttgcttaaaaaccatccaaatagttatgaaaaattctagaaaaatttgataaaaataaaaatttggcaaattaaggtcccttcaaaaataaaaatttttttgtggtacttaaagaaaggtgtcattcttactaaagataatttagctaggaggaattggcatggtgatttaaaatgcgctttctgtcatcagcctgagtcaattcaacacctgttttttgattgctatattgccaagttcttgtggcgagcggttcatattttgtttggtataagtaccccatcaaacttagttgagttattccaacagtggtctaaggggggtaataaaaaacaaaatactttactgttaactgcagcagcagcgcttttctggacagtttggttaacaagaaacgagttagtgtttgacaattacggaccgaaatcttttttgcaggtactattcaggggtacgcattggttacgccaatgggcgaagctgcaacggcatgaggatctgcgttcacagttgatcgcggcatcgcaacatcttgagtcatcagctttgcaattttttagttccaatggatggttatcagctagacacatcggtctttagtcgtctgaacttttatctcggttttgtttccaagtgttactctgtaagaacgtttgttataattggcatgagtctatcttttgatagatgaagccgggtataaaatatccattatctaaaaagaaaaatttgataacactcatgccacatatctatataacttaataaaattttaggtccaaactgatcaactcactagtcgagatataaaaaacaaattcaacgtatgaatagtgacatactgttcactatatatactttatattatcactttttgaaaaaaaatcgtaacacagtttgtatttaatttaaaagaaaaaggtatacaaagggatatcccttcgaaggattagaatccactctctcagatatttaaccaatattttctaatgatgagatttttttctagacaccacaactgtgtgtggtagcatttgtatttttatgacttaattattcgtcgctgatgtcgtggggtctaataaggagaggacaaaatgaaactactgttctagtttctttcgatctaaaatatagttaactttatatatatatatacactctctccatcctaaattatagggcgatctctttttaagaaaaattaaactcggtaacttttgactaataattatactaatcatatttatgctaagtattatgcatgctatattaatatatttatattttaaagtactttcatgtgatgctaatttcatatttgttagtaacataatatggaataaattaattgtcaaaatatgtcattgaagaccgtgtaaaaaaatatatggcttataatttaggacggaggaagtatgttattttcgaaacttaattgcgaagttgtacatttattttctttttctctctttgtgaaagaagatgtaggtgtagaggtggagaccggagaaagagctagaaaagtggggtgtactgtaccgtgtagtttcttagctttataaaggggttgagatggattgagggagagaggtggagcctatgaatttctctgagttgggctcatgtgagcttgtccttgtcaccatacgggtatcaaatatcacacgcctgcctatatagctgctaagctacccaaaggatatagcttgattgcgtagagtgtagacctggttcctaggttgggcctcctggtactcatcaaggggattttgtcatttatatatgttcatgtcttgaaaaagatttgtgataattgtatgatatgatgtggaatgagaagaccgcagtgtatatatgcctcaaaaaaaataaaacagctagcttgacttaattaattaatatgttcagcaatatatagtactgagtatgtatctatacgttcaagagaacttactagtataacctaaaatcaatatatattggaaaaagtccaaataccctcctaaactttagatggtagtccgtctaacaccctaaactttaaaaccgggcatccatcccctcgaactttgccataccatccatatatattacccctaatgtggttttggacgatggttttgtatatcttgaaagcttaaacaaacaattttaaataactaatataacatatttgcatatcatcagttataaataatcaatttatttttatatagtgatatcatactattattatggtggtactcgtttgtaagttggagctaataaggagcaaaaaagaaatatctaagtaaaaattttaatatatatgtccaaagtgtatggcatgtgattaaactcatccaacttatatacaaattagataaaaaccactatgcaaaaccatcttagggggttttacaaacggtgttgtaaagtttacggggctgaatgtccggtttcaaagttgatggtgctagatggactttcatccaaagtttagggcctttttttttgacttttgccatatatatttgcatattgatgtcatgaaaatctcaaagattttctacatgaagtatatgcaatattacccccaaacaataaggtcacttacataatatgtatgcaagctttgatgctcatatataaagttactatgatttccccaaatgcaagttccctagccattggatctcaacgtaagaactcaccgatgtctgacggtgcgacctgaacttcagaaagcatgccaaattgaggtctctagggttggaggggcgacgacgtacagatccaacgtcacaataagtgcactagagttgcaggaagacaagaggagcggagcaaaattattgagaaagcggagcaaaattttattatgacattaatctattaatggtttgcatatactctattttggaaagctttacacatgttatgttcaagcaaatactttagtctagatttctacaaaaaaaatgacgttttattttacataaaaactactccatttggtcaaaatatatatattttttgaaaattcttacaataaacataagttaattttgaacgttgttattatttttatgcaagttgtaggtatatgcaaatgacatagttaagttttatataaataagaaaaacattcatgatactccatgcatgtttataactattttttatttatgcaaaagaaataagtggtcaaaattgtatatcttataaacttctaaaagtataattaaaaaaacatcttttggggtataaccggaggaattatgttatatactggtctaaatgtcttgcatatccttcctattgcttaggttgcaatttattaatttccggataattggtgctaattaagctgtagcttggtcgttagtgcagcaaatataggtccacatcagttaattagtagtgggctgaaccatgcttatacgcgaatatttttcagcttcttgttccattcttattggccgactacaatttcccccttttcgtccaccatatgtatataaacaggttgaaatttccctaatggtagtcagtagtagtagaatttggttctcatttggccatctctctggtcaaaaactacctttaactgatccgtacgtataaggtgagcaggtttttctcagtagtcaccaagttgaagatctgctgctgatgactgatgtgatgaggcatctttccaaaccgacaaaaccctaacgatacacactagtgtggctagaaaggcaggtgcgttcccacttgtgcaatacgcgtgccttcgcatgtgtggagagacaaaagttgagggggaaatgggaggcagatcagcacaaggctagctaggagaagagagatcagtgagagagatggttggccgagttcaagatatctatatatcgatctagctagctcctggaccgcatatatgcagctctccccgaaactttaattattcgtagaatcgtagtatatcagtacaactgttcaacatgcctatcttattaagagttgagcagagcagagacagtggtagatatgtaacatgcttctcagatggttttgatttgatatgcatatgtcaagggagcatgtgactctctgggtgcccacttctctcactcttgctactacatggaatttaataatttgtggctaaggttagtatctaattatcaagaaaaggatctgtaggatcgaatcacaagaactaagccaaccagaggaggggtgaatggttggtatacccaaaaaccaaaaacttttagcggaaataaaagttaccctcgaaatcgacggagatcggtctgaccgagattgatctgtcggtctgaccgagtggatgccgccgatctgaccgatgtagaatgatcggtcgaactgccaaagtcgcctgccgctcgctgtcgccgccgccggtctgaccgccacaatgccatcggtctgaccgccggtgagttgccggttagaccgccgaaacccggtgaaacacaaatcgaagaactcttaaagtagataacaactttattgcttctctctgtgtttacaaagtgcaccaacagcactccttacaaaaatttcgactaaactcgaaaccctgactaaactagcaactcaattgctctcaaaagcgatacaaaaacgataccgggaagcctcacgctccccctctatttatacatgaggtaggcagcctaaagccacgaaccaaactcatactaagagtcctaaacaccttaggaaatcctctagtacaagatacaaactttacataaccaattgtaccaaatttggactccttccaaattcgactccgcatcccatacgcacacaatacctccatcgtatgccatatagaatcttcaccaaccacgtgcatcaactctagccttagtatcccgcatgatatctgaccaccacggacatcgtcttaccaccaagccgactcccggttcatcaccgcaaatactctcccgaggcatcgagtcacctacacatgaaacaaacaaagaaaccatattccgagaccaagctatcaccaacttgactcattgttagcaaacaacagtattacatacgtatagtatccatctagaagccataaccatgaaacaatcacggatatccaaagaaacaacccgaaaccgaaaccgacacagcgtcggccggtcagaccgcgggccggccggtctgaccgctagatcaccgccggtctgaccggcatacacagcccggtcagaccggtcacataaaataacagtgaatctgatcatcacctgaaaattgattatctccaaaaccacttcgacgataatctccaaatatcaaaaccaataatcacagatgccaattgttcatcacagaataaaaatcaaaacacacattgatcttacatgatcttcacgtgccttagtctgacatcatttgtgtaagcaaacacttgttttcagctggctctgttgaagggaaaaacattaaacaaagccaacacgtgttattcctattatatcggtcaatgatatacctatcttatcttgttagagtttcacatgagggtttgaaagcatccgcgttcaagtactacctctgtcccaatatatatagcaatctattatcggatgagatatatcatagtacaacgaatctggatatatctcatgttcagattcatagaactaggatatgtcttattcagtatcacgttgttatattttgggttgaaaagagtagaaattactattcaacaatactaagtttattatgtaaaaccaagtaaaaattaaaaaagggagtgtgtccatctttctcttgaaaactagctaaatcttagtcactattagctctaaattcagtcatcctcctcgtccctatataacccacaatcctatggtcaaatcctgatgtttcccgttactattagctctaattaaattcattgtcagtttgtcacccccgccccataacatacgctggctgaccaccacagtatgtgtgatgtctactaggcttcccacagagctgatgcattgcccatgtggaatgccatcgcactttttcatcctcttagctgtcttagctttcaccttgtaccatttggattaatttggtctccagtctcattttaatttagggtgtactattggtgaggtggtggacatccactagttcaaattttgttgtccacaaatattgttgtgtttatctttagttgtaaccaagagactagtatttacattgcttaaaaaaaatcccaggtgcacacgaacccctgaagattaactttgctttaattctgactccaacttccaccgcgccatctaccatattacccaaatgggatgatgttgaaatgagaacgtatcacaaacgagataacattgaaagccaacaaaaaattagtgacttttttctgggtcattaattgctgaatattctagcatataaaagaaattattatataccaagaaaacatgaattaattacatagaaataatgttaatatattttaagtatgcgacacgatcaacaacattttttttcttgtcaacattgtctattaaagtttgtgtcaaatatgtgtacgtgatcagttacagtttaggacttggagttgtactaggtataggaatagagtaagaatcggactctatcctggaaactctcttaaatagagggacatatctgttgtaaccgtaagacgacaatagcataggtgtgtgggtacgactagccgacgacctagcaggtggagggtcgtggatacctggatacactgtaatatgctagatcggggagaggagcgcccgtaattagtgtcctggagatgtaggcctcgactgaactccgttattaaatatcatgtctcggtatcatcattatgtttagatgttctatgacgttttctttcacgatttggtttccgatgtgatttcggggccggttttataacattatcacgcatatcctgtgttctagactagtaacagttaagactgcccttgcccagcaatcagatacattaattaattacggtttacacttgccaagagcccaactgatattaataatgtgcttatgcagtacatgtaagacaaaattttcgtcctatctatcatgcttcgtaatagtagcagccttaatttattggtaccccatacaatttaggaaactatacgagtgctctggctatggatctagacctagtacgcagttcctgtacaccttaattggcatgtatgtgtactgtagcccatgtaatctggtacatagtttttatgatttatttcagccgtcagccggcagccggtcctactctgtcaggttaagtctgataagatcctaacacgatgctgacctgccggctttgtttgcctgtcaccgccatggatatctcaatagtcctataaagataatgtagttcaaaaaaagaagggagaaacaaatatatctctggcgcttggaatcaaaacgactgaagaagtacttcaggtttttcagtgcctggcaagtactccagaataaatcaaacagagcaaattgtaactataaccttcgcgcagcagatatatgttttttataaatccaatttcatcctataacctgttttaatcaagaggtagtactactttgtttttttaaaacaaaaaggcaatccagggctgaaaaaaaaacatgcatcgccatggacacgaactgaagaaagaacagcaggcgactgtctcggttgtagttaatcattattgcctctgcataatattcccggccgcttaaattagcaagtgaacttgagcatctagctgacaaggcgcttatatatatatggtcccaggagcatgcgagctccaacgtaccaaaaatggaggggcaacgactctgactgaatgcatggccagtctggttagatgatgatctagattaaaaggtgtatacaagtgtcgtctctttaacaacaaccatagcagctagaagcagatgattattaaatggtgatcatgtggcttgcttttgtaacgataaaaaccatagcagtactggctgtaacctctttacatagcaggcggcacgtccatttcgtttttccgtcgtcagtgggtgtgcaatctcttgcattgacctgcacggtctaccacagcttcgatcgatcgatggtttgatgagatgtttagctagtgaaattggctttggcagatgccgctacctttgtaattctttattattattattctttgaacattttctaataacattttgaaaagaaataatcatcatgtaacttatacggaaaagaagcgagcaactttcggtgtcggcttatatatgtagtttttgcaataggcacacgcacgtgaccgctatttgcatcatgccttattggtttgggacgaaaccaagcgagacatgtaatagatgaatgaagcaactacaacccagttggaaggtcaaaatctgtaattttgaagttgcaaaacctaacttcgaagttagatcgagtactgttatagccatttgggctgtgttcgagatatggtggtttattaatatataattaattaaatattagctaaaaataacttgaaaatatattaatatgaattttaaagcaacttttgtgtagaaaattttattaaaaatataccgtttagcagttttaaaagtgtgtacgtataaaacgagagtggtgtgttgaaaagtgaagaaagaattcagccttagttgatactcccggatgtgtgaacttttgataactcctccttaaacgtatgtgtgaacttttgattactcctccttaaatgtgataatgggggcgtggtaagggtttggacatgccataataaccttgtgaaagggatgaaaacgatgttgcggtagtaaactggtgtcatcgtggctggtactgtagctaaaaggtctatttttttaagaaaaaacaatatgatggatttattacaaaattctggaaattcgaatccttgtcttgtttgagtgttcgctgctagttttaatcaaagagaacgtctaattttaaatactaacatattcaatgtaacagcgaaagatggtactaaaaaattcggcgtaacattttataagaaagcaaaaggctgacaaaaattgtacgaaatttacactatagtagtagctatctagagtggggataacaggcgaggattcgaatcccatgaagttaatggaggtaaagtgcagttctgcacatacattaaatccagcatcaagtggtccgagaatttcttcagaaagaattctgcatcatgcactcaacaaagtcctatgtacccctatgttcgaatcaggaagagaaaacggcgctaattaacatgatatatatgtacgatttgcttaaacacaggtagagggggaaacaaattaaatacgaaacagtgccaggacagggagaggaacggcacaacacaactgtactaacacaaattagtgtgttcaagggtattgcagcactattgtgttttttggctgccacaaattaacttccctactgtacctgtagatctgagatgtttggtttagattaactatggctaaaacgcactgaagacacacaccgtactgttcatttcggcttttgctcatgcaacgacagaggatatgtttccctccatgcatggctccataatagagtactgtaggggaccgaaccaagaaaacaaaaacagagcactatctgttcgcattgccataatccatgtaaagttgttcgataatcagactagaaacagttgtcgcatattttataaaaacgacaaaattatatatatgatactaaaaaagttaagtatatatactagttaccgacctgtatatgtgtggactatgatatattatatttaaccaaatgctggctatttttaaattatactagttggctaaaccaaaagtaaattaagtccatatatacatagttaaaacttgctaactattagtttgaatttcaaaaccaaattataaaggactaaactgagtttccactatgggtataactatatttctgttaactctgaaacttttagaattattagatattagaaaaactaaaaatatgtagtctttaatatcttcaatggcatgcttttatttaatatcgatccatgatacatatgaattacttaaattagtagccagatctttctacttaacatgagaacttacattgagcttataattaacgctgtggcagatagatcaacatgcttgattctcttgatgagtactccctccgtcaaaaaaaacctaatctagttgggaatgacagtacctaactaggttaattagggtttttttttatagtgaaaataactacttgtattattttcatctggccaacgagtgcatatagatattttaacatataataggcgaatagttaatcgcagttttgtctccgtcgcacgaaactaaatcgaggtcttatttttttaaaatagaaaatttactatattgactggagatttgattgaaattttgaacgaaaccaaatgttgggagctgggacaagcatagtccccacaattaaatcaaatcaacactcatcctggtgatgagttaaactggggcatttatacacagggacctagctatggcaaaggatataaccataggccgctcttgatgcgcactaaaccgctggcagagattcttctctatatgctcaactatcccctgcatatgtatatatttttgcagtacaagctagggttcttttaggctgtacttccctggtaataaaaactctaagctggctaaacagtccaggtaaacggcgacgatgctcataaattgtgtcatatatacgcgtcgttcaaaggtgagtttctggaccacacacactagctactgcaggatactatgcacggtttcgttaataacagtgccacagctacagggacgaacgatcgtcagggcagattaaaggagcacaggtggtgataattcaaacacttgctgccatgcatgcatgatcccgtaagctagctagcgtggaatagtaaaaggggaatggatcattagagcacagagttaggtctctgaacactgcagaaacttaatgctggttgggcctgaacccccaaaatattccaaagtcgctgttgcgtttcaccatcgcctccaagctagtagtaacaatcacacaagaacagcagtccacttgtctatagcgatatccatctagggatgactatgcacagtatataaacatgtatatatattgtgctacacaacctaacacatgcgtatcgatcgatctgtacgcatgcatatgcatctcaccttggaaattaattagtaccattattttcaaagccctgctactctacagcaatagaatgcacacatgagatacagcataacagcaagatcagtagtaggacgcatggatgcaacatatgcatggatcaagagccctttttctggttttctccttagcgtcaaactgtcaatcaagctgaaatggagcgcgtgcgcgtgcgtgaatgcatggcatggcacgcactctcacacggaacaaattctttgcctttgtgcagcggcccgcgcgcgcgcgcgcacacacacactactacaccaaagcacgctgcatgcatgcagcatgcataaaatggatgcatggtcgagtatcatttgaactttttgcatgggcaaatctcaagcttacacgtcttttgcagtagggaacacatgactttaaagggcccaaattttgctgcctggctgcccggccagcctttgctccaagtaccaccactactactacaacaacaatacaacaaccaagtctcatgttgacgcacacatacacgctgctggcctcactacccaccagccagagagtgaggaaaagactgttttgtgtgtgtgagatcgagagagagagagagagagagatagctggccggccgggtgtggtccagggaagaagaggtgtcagtgacagtgagctagctagctgggggtgatggtgcatggcatggcactgctcacattcatgtcgacacacacagatcgatgcatgcacgcgactatgttctgatcaaccggggagtaccacctttcagccccaaaatcaacggtgatacttcagtcctacagtagctagcacccaaccacgtacatactgattgatggctccatgcacacacacacactagacactactatagctgatcgatcgagacgtataggtgtgtgtaccgtgtatcggtgtatgtgtaggagtagctcgatgtgcatggcgagtagtatgtgtaatttgccgcgtccggccgtatgaccgtatatcgcttgtttggttggcaccgtacgtacgtacaagtacgtcgcatggagttagtgttatggatacggacgtacactgtacgattatctcatgttgtgtcgctgcaagtacgtaccatggggttgatatatacctggcgatacgctggtgtagcgtacaccgttacatctgtacaagcatgcagctactagcttctagctagctcgatctcacatttactggcgccatgaatgtggtagtcgtagtagtagtaagaacagcagcagctgcaggggtacatggccatctcacacagatctgcagaggcttctaattccacacctgacacatgcatcatgatgttcaatcttttccctctccccactgttggccggtagaggccgaagacctgcaactgaaagcaattaagcgagcacacctagagagagagagtgtgagagagagagaggagcatgcatgggcattgtcattgggacgcagtggcagaaaggaaagataaaactgatggagaggccaaagagatgggcagccttttgctatcgtagaacatgcaaaacaaaaggccccttctttttcagagagcggcagaaggaaggcaggcagggcaggggggggggggggggcgcttcgctttccatttccacgcagcccaaaagaggtctcggtttcttctcatctcatcgatctcggtttctccctagctcgatcatcagctgccccatgcttcctctccctctctaccggtcgagtagcttcttgttgcattgcgtgatgctacctgcaaactgcattgcgctatctcccctggcatattcatatcgctcgtaacgtagatcagctggcattaatttgcacaaatgcagtactactacatgcatgggatcaccggccggcacaagtcattgcagtaactactggcacatgggactgtacatgtgcccgcagcatatatgcatgatttgatttttcaaaaagatgcacgagtacgtgctcgcctaaacgatcgcgactctaattcatggcattgtacagatcgagcgcgctcgacatatgtaagataaatacaagttatgcactgcaatcgccatgagctagtagtgtagttctgaactccctgatcttatatcgcctaatataagtttataaccctcatctcgatctctctacgtccgtacatcgcaaagtgtatattgattaatgaactgccaggcacgcaggtttcgaggggttatgtaacgacacgctagctgcaatacagtacaggtacatactccatcagctcacatacaggtagtacgagatggcatgcatgcgggagttagcggcgtcgctagctggactggccggctagccacctctctcttagcagcaacagagcaacaggctagtcgcgcagtgagcactcactgagctccgcatggcacctgctactctgctagctgagctgccgctactcctccaagctgcatcatgcgggcggaggcccacgcctccgcgacccaagtaagacacgcacatgatcgacatgccgcgcgctgggccacgcatctctctccaccccatctctaccggcgactaggtacgtactactgttcaactgtatgccacgccgtcgtcgctctgaggctgagactctctctctctctctctctctctctctgatctatctctcactccaaacagtgcctgcttgacgactccggccaacagacaggcctggctggggtacatggggcatgcagggcattcatgcttccaagccatctcgttaatgcgaggcctatggactttaaccagcccatcactggactcgattggtggtccaaactcctcctcctcctcattatcagcatcccctcgattatttggttccatatcgtttgctaagaattttttttttcggaatggttaggtggccggaaggacttttttgggttgtttgaaacatgcataccttgatgatttcaattagcatgatcctcaaaaataatgttcctgtaataattaatcatctcttgatttttcagtaaagaaaaatcacgttgaatatgtggttcagattttggattgtggtgtcggatatggattatgtaagatctctctagtttgctgtttcatgttacgggggaaacaaatttggtgtggtgagggagttgtaggcatcagagttgaaatccttgtgcatctataaatgatacaggaaatgaatgttatatattttcactgccttaaataaagtttcctacgatgactccaacacattcaccaccttatatatgtagtgcactagtacaaaaaaatgtttttgcatgcatgcggtcagaatcgatcttcacaagggcctaggcggcccgcctgtacgtaggtgtctacagaattcaatattttcacgtgcgggcgatccaacagcttgcgaaaatctattatcgatcgtaggcggttgcctctcatttttcacagattgtcagatgttgtgttttttttcacagattatttcactttagagtttgcctctcgtttttatctacaaatttagtcgctaaatttcacataaccgaaaaatcacatgatcaaagttgaaataagttttattcgcaaaataaagttgaagtaacaataagtttgattgtatgttttcaaaagcattgattgaatggatatatggccagggtgaaatagatcgatcagtatatggcctgtaagggtgcgttcgttctgggggattgggtgagaaaggtacatagtattccgcacgcacgcttcccaaactactaaacggtgtattttttgtaaaaattttctatagaaaagttgctttaaaaatcatattaatccatttttgaaatttaaaatagttaatacttaattaattatacgctaatggctcacctcgttttacgtatcttcccaatcttctcgatccccctctcctcaaactcaccctaagtcaagctcatatataatcctttgggtcccacacgcagccttgcatgcatgcttagtgaccacggtattacgcctgccgcagcctgcagctagccaacctgcacctccggacttacttggcgcatgtgagtagaaccatccaaccagaagccaacaagctgcattaagggccgggtaaggcacgcgcgcagcgcgctcaatcttgcacggcaagggaaggatcagacgagagagacgacagctgagagagacgcgtacgtgttggtcgttgagggcgagagaatcagagaaagcaaacggatccggtataatacggtctgtgctttgtgtagcatcacaactggattgagagaaagaggacggacgacgcataaagccaccgatcgatcttgccgtctttggggcccccggcctctctctatcatatatatgatgtacactagaaaaatatccgtacgttacaacaggtgaaggttattttaattttattattgttatatacgttttagtttaggtgaaatctactgtgagaactcgtttgaatatatattttatccaacttcctttcgtgttgatttggtgtttttcatcatctgaatttgaaaatttagagttctaatttgggaacttttgaaatggaggtttcatatttggctcgtgggtttgattgcttgtggttgtcagccttgcgtggtttacacaggatacggaagacgcatgctcgacgcgaggtggtggaatcggacagcacgagcgcgtgcgacgatggaccaaaaaaaatctacggaagccaaatttaaattcagtttaatttatttattactacatccatactaatcaaaatataaaaagttttatagttggacacaagtattaagaaaacttgtgaaattaaataggaacaaattctaaaggctaaaattattaaattttgagacagagaaaataccaaatagcatactctatggccaatcacaattagaagattatgggctgatacgttacttgggctgaggcccaggcaggcattgaggacgtcagccccttcgctgtccgtctcgcctgcaatacctgtctaatctttttttttcttctcactaataaacgaaacggctaaacagaataaacgaaaccgcaaaacagaaacagaattggattagaaagacgtacgaaaatttgtggcaaaaatatctttaatttttataataggtaaagatatgggatgctatacacagatcgcggtcgatcgatagtgagggtgcaaatcgtgcatactacgccgtattatcgcatgatagtgtgtatgtatgctgcatgcataggctgtaggggtgggcattcggtctaaccgaaaatttcggtctcgatcttcggtctttcgattttttcggtctttgaaaagggaaaatcgaatttcagcgcaaaaaatgttaagaccgacaaattcggtctcggtcctgaccgaaattcaacaacattttcatatatgcaaagaaataatagaaattttcaacataaaaatcacaaaaaaaaaatcgtaagcacttatgagtaaagactcttattagcttgcatgcctagaagaagtatggatgtgaaaaaatagagtttaatcctattaaacatagtatattgtaggttgcatttagacattttttttataattcggtcttttcggtctattcggttacccgaggaaattaaccgaattgaccgaacaaaattcgttttttcgttacgtatgactgaattgatgaccaaatttttcggtctcggtttttttgtttggttttttttgcccacccctaataggctgggagctaggctcgctggagcatgcatgcctcgatgtgccctggcccctcatgatcaccatccgtttcctctctctctctctcgcgcgcgcgcgatccatccaccgtcctgctctcgaaccgccgtctcgtcacgtcgctttcgcgcggcgcgctttccccacccacctcttgtctctctctcgcgcgcgcgcgagagcgcaccggtacaccaccaccaccaccaccacgtcgtccacccgatcggccgcatgtgcttccgtgggaggcggcagcagacgtgcgcgcggagagaggatgtgtacatcatcccgcggcccgtgaggccgtgacaaggacggccaatcgccagatcgaatgaagcaagggcgcgcgccggctaggcgcgcgtggaaggggaatatccacatgcacgccggccggtgtggcccccggcccgggcgcgacccctgccttgccggcaagataccgatccatccacgacaccgaatgcgcgcgcgcgagatggacgaatcaaaaaggggaattatggagtagcgctgcatgcacactagctgatctactgtagattcacctactacgtacagtatatattccaaatagagcaaagacatggttgagcccatcgcaaataatattgatgatcatgatgatgttgagaaagtacaactatacagagacgagctgccaaacaccaaccaaaaagcgcattccgttacaaactatcattaagtaacatgacttttttttcagctatcacattttcggcctctaaaatgcggcacaaagccaataagttctttaactgaataacagtacgtgatcaagggataaaccccaactaccctaacaaagaaaatcgatcgataaattaaacttaaagaaccatatagattctaagaaataagcctacaaatattgtggcatccataatgaaataaaaaatcctttatctaccgactcgaatagtgtagcaccattgcgtataatatcatgcttcccgatgtcataacattataaactaatattatgcttcccgatgtcataacattataaactgataacaatccggcaggcctaataacttaaggttgcttggaccccaacagttcttatgcacacccacccggggaagggctcaatctccctaaaagactagtccaataggggaagggtggctctcccttttaagatagcttcctcctcccaagttaagcaaggtggggggaaaaagactagtccaataggggaagggtggctctcccttttaaggtagcttctccctaaaagactagtccaataggggaagggtggctctcccttttaagatagcttcctcctcccccttttaagatagcttcctcctcccaagttaagcaaggtggggaaaaagactagtccaataggggaagggtggctctcccttttaaggtagcttccttctcccaagttaagtaaggtgggattattcagaggctcacacggtcgccgcccgacttttgcgtttttgccaacgggtaatagtgtaggatgaacttatcattcccacccccttaacaagggcccagctctgataccaaatgataaacaatccggcccaggtggggttggccgaggtccaacaaattaaggttgcccggaccccaacagttcttaggcccacccactcggggaaaggtccaatctccctaaaagacgagtccaataggggaagggtggctctcccttttaagatggcttcctcctcccaagctaagcaaggtgggattattctgaggctcacacggtcgccgctcgacttttgcgtttttgccagcgggtaatagtgaaggatgtcctcatcataaaccaatattggagccagctagaaaatatgaagataacttgtatactatatatagctatagttctatcaaaactagttggccgaatagatttccgtcaaattaaatagtgtaaaactaataagtccattggaagtaaaattgtaattgtaacagggtagctcgtgaatttgctcaatttgctaaatggacatctcattgcgcggtttggcatgatcatgctccgccttatgttaagcaagtgttagagcatgcaagattgtaatattattacataaccagtaattagctctcatttccctcaaaacaattattgtttatctctatatagaaatacacctacatttatatgcatatacaaaggtggtatcacttaaagaatatcatcctataataattgagacaacaagacctcttaaccattaatgtaaaaaacattttttattagctttgtttttttatcccatgcaacaaaaattcttttaataaatgctaggagtaagagttaactttgagccgttgtcaatgatatttctcttatctccgttctctatttttcacgtcactcgatttacttgcatggcaacgtgtacatgttcataataacgatcgatcaatctgcgaccatatcaattcatcgtgatttaattaatggctttaatctatcatattcttttattggtagaaatttccagaccatcacagaacaaaagtagtggaggcatgcacctatccttttttaaataagacaaatagattgattgatagactacatatcatttgctttatctatctgttctctttcattctcaagtagaggagttatgacggtgcaccagcacgccttgccgacacacacaaactgacgtagagaagcatgaagtggaataatgtaggcggtgttgcaagggcccagggttaacctggcatataccaattgccatttgtgagtaatagtgtggtgacaacattacaatgataagaacaatgcatgcatatgccttggggggggggatcgtcaattcggtgaattcttatgggctatggccctcatgggagactccacagataaacaaacactcttacaaatattgaattttacgtgtaaatcctttaaactaaataaacacaaacgaccccactaaaatataaagtaacaataatcgatcccacagtatataaatttttgctttgctactatttcagaatacgacaacgtcaaggagagcaagggtgaattcatcttattgtgaacatgatccgtcagaattcatcatagtgatcgagatgcaaatagctagtgtattggtaaggagtgtgtgtggtatcaacccaagattctatgtttacttttttaacacacatattatttcttctacttatttaataatcaagtcccttcttggtagtcctcctcgatctctctctctttcacagaattcatggaaagggtcgtatattttttcgcgcttttccgttgcttgaccaacgataaaaagttgctacgtggagccgtgaccaaccgtgagttctttcttaccctttcagaacacctctccgttcacaaatttatgtatttatagactataaagattaagaatgaaggggaaatgaacggaaagagtactactacttaaattgggagtgccttaggttgcattcatcaaattaattattaactagtaataggaatatattatattcatttggggggtgcatttggtttagaagaagttgcagtctgcagattgggtgtagacatcagcatagaccttgctacagtgtctttcagagtttcagttggctactctacctgagctgtcgaacagggtttctgacgttcatgtggagtatggttatgattcgcaatataatgtgctacagcattacagcaatacggcatgcatgccttaaaaaaagtatagtactacggcatcatgcattagacaaagacaagacctcgtgtttgagtgattcatatcgattggatggtttaaaaatctactacgaaatggatataaaattcttaaacctattggttgtggccagtccagcgtggaggctccctgcgcatatgcatgcatgctagtaaaatttgtctattgattgatctggacgttacagtaattttatccacagtttgaaccttacacagcttatttattctttatatattccgatggaacgagctcaaatgaactagtacttttcttgttcaacagagagagatcgaaagagagaaactaggatgaaccaggctgaaaaaaaaaacctaatccgcacttctttattttgggactaatggaccttacgtcatcgtgcgatgccagatgaaagagagaaagtcaatctttagtccctcgactatcactcgaatctaatccacataccttaattaacgataaaactgggtgtatcgtccccttcaactatcaaaactggcttattttacctttccgagtgattttgaaggtggttttatccggtgtgacggttacatggcattaggtcagtgtttttatctgatgattttgatctacttgcgctagcacacggtgcttatgctgcataaaaaataaaatcactactgccaccttatccctccctctcctcatctctctctctctcccgctgtcacattgggaacagtgtggcccaacgcgcgacgcgacagacaatagcacaacgacagtggcaacgccgagcaaatccaagtgattaggaaagtgcttgggaaaacaatggcggagaggtggtaggaagaaggacatgggatgggaaaaagccaaggtcagaggcgaacctagcctttttgtcgtgagaagcccgatagcagtgagagtatgaaacttggaggccgcgatgatgacaagggcctcggagagctatgcttggatgaggggcgatgcggtaaggaggagctatacgtagtcaaagagtgggaactgggaagtggtggttagcgtcgtcactgtagagggagggcttgggccaatgacgccggaggaaattcttaatatggacaagttgtggcatgaggaggggcaatggcgagcagttctagcaagaagccttagaagcacacggtgaatactaggctctgatcagtggcgagatgtacggtggcgttgggggagagctacttagcgaaccattccaccaaagtatcgagcatctttagcgccacctccattcctaccaccaaggttgatagaaggcaactgcattttgattgaaccaaggagatggggagaggagttagagtgccattaagagagagagagagagaggaatggtgaagaggatgagaggtagtcacttacatgtgtcccccatttcaaccttttcatttcttgaagagagaatagctaatgtttcgctggatctggcagaccagctgtcggcaggcgttgcttcacatttgtggtcagtgtaactcacggactcacgagaacggatagttcgtcacttgcaaaagaaataactcaagcctattaggtttttcttctaatcttctttcgactagtataaaaaagggatgggaaaacaacacagcacggttgtaattaacaaaaagtcatacagtaccatacaggcagctgctgctccgtaaccggttgcccctggggcctggcacatgagtacttctgtagttctgttcgctgatgccggccgggcggctgctactgtagtgcgctgtgctcgaccgcatccgcgcatgtccgtcgaccgtcgttcgccttcttcgcggtgcactcagaattaaccaagcaaaattcctccgccgcaataccgaacccgcgagccagtcggctgccgaaccgaccgtctcttgcgccggtgaaatcctatcccaagtcccacacgctgacacgcgcgcctcatcagcgagatggttcggtctcgttggtttgggagatgcaacggttggcggacgaggaattcgggacgttgggcttaaggctacaatgggcaacaaaaattaggaataatttcaccggaggtccctcaacttaacaatgagatttttttaacatccctttaaccataaaagcagaaatgtctacccctaaactcactcaaaccgttcaaagaaggtcccatgataacacatatgggtagtttcgctgatgtggcatcctagtcagaaaaaaataaaaaaataaatatgtggggcccacatgtaagtgagaaaaaaaatgtgggtttaaccattctaatcagcaatctcctactcttttcctttttctctttagttttatctttgcagcagaggggggggggggggggagg

SEQ ID NO: 7949 - DNA, 23948 bp, Oryza sativa
  unsure (1)..(23948): unsure at all n locations
gtggcccacgcgtcacactgctgcggacccgtgtgtcccaacccagatttggccaaggggccggattcaaaccgatcggcgccggatttggctgtcgttgccaggaccacgctttcgctctttggtgtggtgggcgccccaaccggctgacgggagtgagggagaagggagcccggcggcggcaatgtttggcgtggtaacgtttcctgcggccccctgcgcggcggcaaggtgcggaaacccagacccttcgnaggcgccgggagagaaaaactgcttgaatgggatcgttttgtccagcgcatgattgttcctctcccggaacttacgaagggactgggattctgaatcaagctactgtgactagggatgaaaacggagcggatagtttccgtcggctccggacaaaaacggatacggatacctttcggatcggataattcttggatagttcggatacgaatacgaatgttttctcccggatatgaatacgaatatggtaccaggtttccgtcggatacggataataattcggatatccgcaggacccatgagacataccccatatctttctaactctataaccttcaatatacctttataaaatatacctttatagattttaatagtagtttatctcttaacactagtccatactattaatattatttaaattttaaaaaatatttataaattataccttattttatataaaatgagctaattatatatgttgatatttgtttctattagaagttgagttggttttcgtgttccgagaaaaaattgtttccgtatttgtgtccgatcatattcgattcttattcgtattcgagataatctgtatttgtttccgtattcgagctatccgtattcgttttcgtatccggtaaaaaatatgaaaacgaatatggtatgagcattatccgtccgtatccactccgttttcatccctaactgtgacaaaacagttgctaacttggtattaaagtcgataaacgccgaaacgacgacgaagacgatgaccatatgcaccagtcttcttccacttgcagatgaaagtggatcactggaagcggaagcgtgagtgacactgacaccatggacgacggccattagcagccgagttagtttggccaccaacttctctcgtctcgctagagcaatcttttacactttaataagcgtcctagcatctcaaacggacgtaagtaaaatacgagccgtgtaacaacgcaaggactgacataacacaagcatggcttttcgcaactaacagaaactgcttggagaggatggcacttgggcagccaacaagcttgctagcagctagcccaattccgtatataagtgaagcgttggtggttagcgatatcgcttatgctgactaaaacagtacctgcagcaactacacagattttgttggtgtgaccatgaatgaagctcagtacacttattattagcacggtagtggtatcgatggacctgggacccccgaggccccaataatgaatatatctctgtaaaggaattaaagggtaaaaagccctgcagagcagacaaatgttagtaataaatatataaactgcaacatctgaataactgagaccttggatttaccaggatgggaaaaaagaacgaaccaaagtacttgtactatttcatttagcaaccgaaaacaaaggtaccagtccatgccatgttaatttgtcttgacctgacaaactgatggtacaaatgtaatgtaccaatcaccaatctcaccacgccagatcaaaagggcacagttcgagggggaaacctggtgtctttctagtagtctactgggttacatgatttgtggtccatattttacaaacacgggcggtacaaataacaatcgtaacaatacatatactacaaaaataataaactacatatactccaaactctgcccaaaaaaacacgcttgtatccgggagaacaagcaaaaacactaaagcgtcagagttgttgaacttagagagaatgaaatcaagctgtaacaagtaatcttagcttcctgtcatgctttatcattgaacttacactctctacaaccaacacggtctgcaaaaaagtggcaaaaacaatttagattcaagtttagaaaggaaaatgcatagtaggacttaggataaacgttttatcatcttacgataacattcagcactaatcattctagagaagttgtaaaacgcaagagtgcttagctaagtactggccatggcaagcatagcacaacaaataatgcggaacatattggttacctgaaggcaagtgtaagccaaaccagtggcaaagtagaaatttgcattgccagtcccctgaaattattgtcatgttagtatcagtggcacacaatactaagagaggggaaggatgggagagggagataccctccagatccacaggttgtgcatgacagggctaaggagagagactccgatatatccaaaaaacaagaagaaagtgaattgcatctctacaaaatgtaaagagaaaccattagtgttgtagtgtaaaactaaaccattagttttctagaggactaggagtcattcaaaatatgttaaaagaaatgttaagcacctgctaattcattagcaaataggcccaaaagaccaagataaagagctgaatctccgaccttcaagataaatcataatatggtatcaatgaacttgtgggaaaaaaatcaggacaacacaacaaaaacagtttgatgaaattttacacaaccgagggactaaatttataggtattatcatgtaatgtgtacttaccgatggatacgatttcaatattgcgacaattgctgtgtaaatgaaggcaaggaagcatggacgatgcttcagacggattgccaatggtaataccataaaaacaatgttcatattgaagactataaggaagaagcttctgaaaaagtcaaagacttcagcaaagaagtacctgcacaacccctttaatgagacaaatggaatatcattgagttagttacataatttgatcaaaactcaccataatacaccaatatttggcgataggtccttaacggtaaggataaaaccatatgtcctgcagaaacacagcacaagtcaataggtaatggcaaataaaaccaattgatttcaaatgaaaagaactaagtatgaactaaggcacaacaaagttgacatgttggagtggatagagcaacatggtgttactagcataagatcaaacatgctaataccagaaacagtactccttaagaaaatctgtcctcgttcctcctttcaaaacttatctttagtgagggaaagtaacataaactagcacagtccccccatctcactcaaacacaaattttcatgagtaccaaagaagcatatatattctactaacaaagagttgagtatcttacttttcaaacatctcctgaagaccacccactttatttagaactatgctgctcaatagcaacacataaaatgtccagaaaagcatccacaatatgaagtggaaaactggtttccacaagaattgttgaacatctcttgagctagaacttttatcattgtctgatacgtcagttttactggcacttgagctttttatacgaaatacttttgttggaggagcatctggaccatatcccaataaaagaatgatctggaaaaagaactttgttctcaatagctgactatacaggtaatggaaggcattatcaaatagatgaatataagagtacaaacaaagcttgtgacacaaaccggtacaatgagaattgcaggataaagagagagatgtgtagccataacatatccaaaggcagcaagaggagcaagacctaaaaattagagacattccaagttttaaacagcatgagaacttgttagacttctatgtcactcaaaagatagatactgtcttcatgaaattgttgctactgatgctttgccaaatgaaggccctttttacataacaaaaatgattctactgaaaatttaaaaatagcagaacatgttgaagagaaacacgaatttgagttgcacttacgtgaacaggctccatatatcattatcacaaccattaaattctcgataggtgaagtacatgaacccacacaagtaactattgcccaggggttccacaaatatatgagggaagcaatatctcctgcacttacgttaactgcaggaacagtatcaataagaacaataagtagctgcataacaaacattaagtaatcacaagatgaaagcatcagactatcattagtaaatgaagaatcactaattttgattcaagtataacgtttcaattttacaccttataagttgctagaatcacagtcatctttaaaaaaaaatcattccgaaatgatgtattaatctgaaaataagttgtttcatagcaattccgtgcatctctattatgaaagactagattggctctacaataaagaatgacaattcaatgagtcaatgaaatatttgaagctttgataatataattctgcaagaagctctgtatgctactccattggtaaaaacaagtagataactagtgtcaacaaactaagaacaactaggtcagtatccaataaagcatattctgcaaggagggacacaaaactgtaggtcctcaactatagtgctcacctgaattactcactgcctctgtgagctcaagtgacttcaagtttctgttgcgtgctatttggagtctacgaccagttgctcggataagcatggcagctataaaatctacggccacaaaaatcaaactgtcttgcattcatgagtgtaatataaattacaagatctccaacatagttcaaaaagataatggagtacattggaggcttcattttttttatttggtctgaatcattacatggtaacataaaaataataagaacataatttaaaaaatcatcatagaaaatccttttcatccatggaaatcaagtggctaatactgttagagaatagagacacagatcctaggtgtaatggaaaaaattacataacaacttatttacctgcaatatatatgatcatgatgtccaacagacctgtaataccatgaaatacaaggatgtgagtatttcaaacattgatctgatattgtgataaaataaaccaatcctgtcaaagcatatagctgcagtagtgcaaccaattgcgatcagagaagcatcatagacaaggaattgatcaccttttgttagtcaatggaccaagaaccaatagaagcaaaggggaaccatgatacattgaacctgaaagacaaaacattcaccgtgctgaataatcacttccagttcatgctacaagaaaaacacattgcaaagagaccctactaaaacatcatggataaacctataacaatgacaaatacctgcacaattatttgctaagtaaaaggtatggcaattttgcgcttattttttttaacacaccccattagtgcgggcttgcagcagttcatgcttaatggagcttactagaagaagtagcacccaatcaatttactttacttttaaaagtgctctcatgtagctagtaattccatccctatactgagctcaacaattcacgacttcagttgtcccccccaaaaaaaagtaatcaagcaagattaagatgtgtggaacgaaccggagtagggcgacatggaagcctgcttcagccagtacccttccgccactgcaaaacacacaggaaaacaagctattagtccaattacggcgacaacacagcacagctcaagtctgggacgaggaggcaggggagcaagggagcgcttacggcggcggatggaggtgaggggggtggagacctcggggcgggaggcgaggtggaggtccccgccgaagagcacgagaacgagccggaacccgacggccgccgcggccatcgaccagaagttccggatcgccatcgccgccgccgctgccgcaactccgatctgcgcacagccaccgcttcgtcgtcacggctgtaaccggagccgcggcctggcgattgggccttctacgccaagtcgtcatggatgtcgcctttgcgtaattgagttgggcttcagcagccagcaccggttggatggcccaaatcatctgcaattcgggagtacctatacatctttcgaaagatttttataatcgtatcatacagatttttaatctttgtattaaaatctgatagatataataaaaagcaaaaaacaattaagaaacaccataatgaacattaaattaccatatcctcaagaaaaagaccaaatcaaatataaaatttaaaatttacatgtgaagattcaaaaattacagtgtaacttacaaaagttacagtgtaagtttcataaattacactgtaacttacaagaaaatgcactgtaaatttgagtgagaaaatcgagtgagagataagaaaaaatctttcgagtgagatatagcaaaatcgattctttagtgttaaggcccacattagaaaactttggaagcccgacctggaaaaataccagcacaatgttttagagtggttttcaccaacaggcacaaaggttgaaacgggaaaatatgtggtgcaaaccatatatagtggaaacttagaaactaccgttggatcgagaaacgacgtcagagtttgtggacgctcgactacccgcccttcttcgcctacttctcccgcctcctcgccctcccggcgcccctcgtcgacgcctccctcgtctccctccccgtccccgacgcgccgccctccttcgcctacctcctctacctccgcctcaccgtcgccttctccgacctcctcctcctcctctcctccgtcctcctgctggccacggacgcgctcacgcggcggcggcggcggccgttcctctccctcgcgctcgtcctctggtcgccggcgctgctcgccgtggaccacgtacacttccagtacaacgggttcctgatggggctgctgctgctgtcgctgcacttccttgagcaggggagggatctcgccggcggagtcgtttttgctgctctgctgtgctcgaagcacctgttcctagtggcggcgccggtctacttcgtgtatcttttccggcattattgctgtggccggggtgtggtgaggggattgggaaggttggtgctgatgggggctggtgtggctgctgtgtttgctgctgcatttgtgcccttcctgtactatgggcaggtgagttttgctcggttaatttacctttggaatggacgaattggtatgttttttttttgtttagatactgtaatccatctgtaatcatcagttcacttaaaagtaggaaattatttcttgagaggatttcaggatttttcctgtagttcatcaagtgttcagaattagaagatcggtgaagtttataattaagtagttccctatcagtttgtgcacgtaggttgcataattggcacaatattgtcttactcattgcaacaaataatcttgcagatgcaacagctctttaaccggttgtttccctttggtcgaggcctgtgccatgcttattgggcgccaaatttttgggtattctacattttacttgacaagatcttcgcgtttcttcttagaagactaggcttcaacatccagatacctgaagcttcatttaccggggggcttgttggtaattcgtctccttttgctgttcttcccaaggttctctctaccactatgaattcttatatatttccaagggagaatggctatctcaatggtttaataatttgttttaatgaacttacggattgcaggtcactccaataactacatttttattggtcatacttgctatgtctccttgcctcatgaaagcattctctaaaccccagccaaggcacattattagatgggtgtcatatgcaactacatgtgggtttatgtttggatggcatgtacatgagaaggcatcactccatttcactattccgcttgccctaattgccatggatagcttggaggacgcgaagcattattttgtgttgtcaataggtatgtttgagactttgagtcagttgagtcaccgttaactcttgcttaaactcctacttgcttttactgtaatacctactgtttcacaattttcttagaaaaacatctctttctgattgatacactcctttcaccataatacatactccctctgtttcaggctgtaagatgttttggttttgtcgtaagtcaaacttcttcaagtttgaccaagttttttttataaaaaaaagcgtagcaacatttttaaacaccaaacaaatatattattaaaaatatattcaatggaggatttaatgaaattaatttagtgttctaaatattattacatttttctataaacttggaaaagtttgacttaggacaaaaccaaatatcttacattctgaaatggagggagtactatattcacaaaaaaagagttagaaagcattggggtactggttaccatgtgaataactcatatcaggtgatggttcaagacctaagccaatagaaaatacctaattaaactattcggaacagacaccatcttttgcacactgaccaagaaaatggggaaaaagggaaaagccaaccatgtgatacaacattgttttgtactccctccgtcccaacatgtaagcatttttagctatgaatctagacaattgtgtgtccagattcatagccaaaaattactatattttgggacggaggtagtatttatagtggtatagtccactgctgcaaaccatagtacttctagctttaataatgaaaatggcgtgcagtttttcttatttttataactgaaattgtattttgatgaaccagtggcgttcatctgttctgcactttcacttacgtaaaatctgttcactatggagacacatagtcacatactgcttaacatgtataatgagctattgctgtaatatcctgccatttcttagtttgctaacttgttggacagttggagttgaacaccatttcataactatattttaataactcattgtgtcattctatggtagcaactggagcaaaatttcgtgtaattttgcctcaagacaacctgaactaccagtttaacaatgacttatgaagtgctgattatatattgtttgttttgctttgacatacatttttttgttttgcagtttcatgttattcattgttcccattgttgtttgagaaccaagaatatcctataaaggttatgcttctgttgacctatgctaccctcatgtgggtaggattttcttcccattttgctgcaaaatctcctcaagaagggaagaaagtaaatgaatcaggcagcgtggtcaggaaaaatagcttcattgggtggatcagttttagctatcttttaggaattgttgctatagaattatggtctcaagtattccaccactatgtatttggcagcagatttcctttcctacctctcataatggtgtcactctactgtggtgtcggaatgatgtactcatggatgtggcaactcgcatggattgtcaggcactaatatggtctctggttagcaacacgagcatgctgctttgccttgctgggaacccagcctcgcactaatttgtgataactcacccctcttgaccattgcattaggccatctttcccaccccaagttgctactggggtgggaacatgttgacacattcagttgtacagcgtgatggcaattttcggagatgtaaacctcttgtgataactcacccctcttgaccattgcattatgccatcgttctctccccaaattactactgggaacatcattcatatgttgacacattcagttctacagtgtgttggcaatttttggagtaaccttttcgtgatgtaatgtattcttttgtatggagctgcttgtaccaatccattcttcatgggttggtctttttcttcttctgataattctggaacgtgctctgctgattgtacgatgaccatggagatgcttactgtctttcttttccatttttctggaatgcaataaggtatccattggcctccctgattttactactggtgttgcatcatacttgaacatcacttgttgaaaacacattccaatcacgatgtatcaccgaaatttgttgcttgctgtttgatggaccctgtggtcggagttatctaccataccacaagtgcattcggtgtgataaaagaagttattcttttgttctcttaagaggctacagcccgagttgcagagtcccgttgcaattgaaccggacacgtaagcaactggattaaaagagagagagagagagagagcactggattagatgcaaaataaaaaccgagaaagtttaaaacagtagatgcaaataaaaaccaaaaagtagaaagtttaaaacagtagatgcaaagtaaaaaccgagaaagcttaaaatagtagatgcaagattaaaacagtagatgcaagataaaaaccaaaaagcagaaagtttaaaattgtagatgcaaaataaaaaccaaatagatgcaaaaataaaaaccgaaaaagtctaaataaaaacggaagcaaaaccaaaaaggataaagtttaaaacagtagatgcaaaataaaaaccaaatagatgcaaaaataaaaaccgaaaaagtttaaacaaaaacggaagcaaaaccaaaaaggataaagtttaaaacagtagatgcaaaacaaaaaccgagaaagattaaaacagtagatgcaagataaaaaccaaaaagcagaaagaaaaccgagaaagtttaaagaaaaacagctcaactaaattatcagagccaggtttcgatcctgggacctgtgggttatgggcccaccacgcttccgctgcgccactctgatgttgttggtatgattctttcacaaacttattagatgtcgaaaatattaatgggccttgaccaggacggcccaaaaactaagaaactactcatacagccacgcaggtagaataacaacgacaaataattctcagtattcagtaagacttaacacgatacactctgacagtctacaagttaatctcttggttgcagcatcaaacagcattctcgtacaagcctcgatcaagcttggtgtccacggcacaaaagaaaaaacgagaaggaaaaggcaaagcgaaacgaaacgtcggctccttttggccccaaaccttgcgtaacgtcgatcacctgtgtcacttgctgctaatattttttactttccagttgtcagaactcagaagaaaaaaaacttataaagaactcaaatttcctctttctgctttcgatcggattacgatatactatgcatgttcttggtgaacagcaagttgcagacaagtttgactccttttttgcctttagttagcgatggttttcacaaaatttagtccctctcacaaaattataagtccctccaacttataattttgtgagagggactaaagtttagctcaactttagtccctccaaccaaacaccacctaacttgcatggaccagccacatgtaacaacgcaaggtatagtcaaccatggtcccttaattttccatgtcgatccaaacgtatgaaagctcttgtatgagctagctgtgatgtcatggaatggaagggaggtaggtcacatgagacatcacccggatttgtatctacccttctacggaacctgtactagctcaattcagatggagatttctgattacgactgtatttattttcaatttgagaaaggtaatatcacgtgtgattatgtgtttgctaatgagtgtaattttggttatgtacttatgtgtcaggttattgcctaagccgcgttggccgggtgcacctcagcaaattaatcaccatccatgaagctgttaccatgtcagcttaggataaaattctgtgcttatgggtcaagaatcggataatctaatggaaagacttctgggtttacactgaacctaacccggatttgattatcggaatgccatgtaaacacgttctgacgttcctgtctgtcaacgtttcaggttgattgagttagaataaccacgacgaagcagggtggatcattctgcagaatgaaagactactactattggattcggtttcagacacttttatagtcttcttccctcattggataggagaaaggagaaaggcgataaccagagcagtgatctttttgttcgagtatcatatggatcgttgattcttcttgtcaattctcatcatgacatcatagtcttgatgagatagaggaatcaaaaggcgacagagcaaagaaggcggcaaggcagcttgctcctcacgctcatcatggcaatatggcatcagggatgagcaaatgagaagagggacaaggcgatctcatgagtcatgactaggcatggtaggtgcagccgaacaagaagagctcatcagtttcagcaccaaatcactgcctgcttgcctgaatctgaatgcctgcacaagaactgcagccttaagattgggcatgcaccaggaatccacatggcatatgttgcaacttgcatgcagggattgtgctttacttgcattggctccatatcaaagtggtaaacagttccatcttcttgcagttttgctatccaagtgtaaagggtagaactgaactgttgaatgacagtggttcagccaggtcccgtgtaaatattggaaaagaacacttttgcagtggggtaatcaggtgatgctacttgctaacaccttccctagtcccacctcagatggttgcacataagaaatcacacaagagaacaaactttaaactgaagtacttggtccagaactaacaaaaaatttaccccctgaataacaggcagccaactgataatcaaatcaaatgacacttcaggagtttctggattaggctagaaaatacaatatagtatagctagtaatcaagtgacatgttcagttccaaatttgtgttttttccattgatattttaggccaacaggcagccagggtgcatgatctctgcttgcttttttcaaagcctgtctccatggagtatatctcattatctctgactatttattactactaccagcgagcggctagttttgctgccatcgatagcaacaattttttaccgttaatagctcctataaaacaattggctactctcgatcatgcaacaaatgaaggtgtttcgtatcacctctatcctcaatccctaggacactttgcaagcaacatgagaagaaattaaagaaacaccaagtctcctagcccatgtatatatttttaagtacctatataggagaagaacctgcagctacaatattcctgaactcctcccggttccattgccccatggcattgatggattaaactagaccaagtcacaattaatctattcttgtttgttcttgtgcttgagacaaatagctgtgatttgatggctgctactagtcattgcttactttggacggccggtctccacgggattggtaggagaaagaacaaggctgtagtgtgtctcaaggcatctcagcttctcaagaaccgtaacttatgtaattaacctgcatatagatccaccctaaaccccagggatctgagacaaagtagacttgatttttctgcacaaatggcaaggttggtggtacaaaagtgatagagacgaaacacggtccctgggacacacatcacatgcgtataaatttactttcagtagacctaagctgacccaacgtactactctaaaaaccaaataataatgtgcgtgtaacatcagagagagctagttacatgtgtagtgtttctttaattatgttgcatcattaggtcacagtacgtccttcaaaaacacatatttagaccgcggaacaagcgggttggtagtgccgccacgactcgtgcaagcaacgatgaaacagcgggccggagatatggaagcagccatgcatgcataagcatcagcatggaccagaccgatgcaaactgggaaagcggctggtggtgtggggtgagagttctggtgcatgactctacctagaatttaaatcatgttgagtaattatgaataattatgcatattacagtttaataaaattttggtgagatcatcgcatgcatgtctttaagtgtatatatattaggagagacactacccttaaaaaaagtcttagttaagagcatcgcaaacaatatggctatctcattcccaagctaaaatttaacaattatgaaaaaaaaaatgaactctaacagccttgtcaaccgaatggcttggccaaacttacaccacttctctcctccagccgagctaaaggcccagctaggcacacgtcccaaccgagccgagccggcctagccaacccatggccaagccgcctcattcctccttcttgtgggcggctagccaaaactgatttaccaatcgtggaccccatgcccgccaattttgtttcaattccctccttctctctttgtccccacacactctccgtcactgcacccagattgagtacatgttgcgatcatcattgtcgtcgttagggtcaccattcgctctggccacaccatcgtcgccttcatcgtctagagttccgccattcactgcggacgtctccgttgtcgtctcgagtccctccgctgtgaccgccatccattgttgcacgccatcgccgttgtctggagggtcgtctcctgttctcgacgccgatttccaccaccagtgctacccaaaaagggggagagaaagaggagatgcatgatctcgtcagtggcactgtaggggagcacacaacgttggggttgatgggaggagtcagggaagtttgggaggcggagcgtggttgcccacattgaggtgtgtcaccagccctttccaccggccactagcagtagtgcacttggcccgatctattgtctgcttgcccgccccttattgattcccgccacccacaacaccacggcgcttcatctcgcctcggccacctcgttgccgtcggccacgccgcatgctgttatgtcgaggggagtggaaagatgagggagaaagaagtaaacagagagtgacatgtaggacccaatatcatattggagagtgtaataggcatattgttggagtgaaagatagatttggctctctaattttttgacaagctggccaaatagtgtaatctttaatgtggatagaagactagctattgcctctgatgcagatcaagcaagaaatatcggtgataaaggggtaaatatgtggtggaaactcaatttaggtgaaaatttgtgtaaacactaataaaaaagtagtctaaatccattcaaaataatcacataaatggatgagatgatgtaacacaattatgtaaaattcgtgtccgaacttaactttgtgtctgagatatattactacttttatatctcacaaatgaagtcaagtttggacaaaattatttacgtcattgtaacatcaccttattatctatatgtgtgatttttctaaaaaaaattaaacgtcctttcacttggggttacataagtttttatctaggttgtgatttgcaccatatatttaaagacagttgttatgtaaaagaggcgggttaagacctattatattgtattcctccttatatttgtggatgtgcagtgtgctccaccccaccacttaccacgcatcgcacgagtgtttcagtacgtgcaagcagcctgcctcctccataccgctaccaccacaccacaccacactactctcctgatgactcctcgtgacctcctcggccctgaatgcgatggtcgtctcgcttgtacttactccgtcccaaaataaatacagccatagatattcatgtttagcgttttgaccatccgtctcattcaaaaaaaattttaaaaaataatcacacataaaatactattcatgttttatcatataataataataaaaatattaatcatattatttttttaaataagataaacggttaaacattagatgtgaacagtgctaaaactgcacttattttaggacggagagagtagctagctctgcgcgcgcgtccggtgctccttgattcgcacaacgccatgaggacccaacccgatcggatttgccgttcttgacattgtggcgtaatattgtgcttcgttttgctgtaaaagctagctgtcgggagattgggtcgaatgacgtccgtgcaggcggcgagccggttaatgccagggcgccgttaaatcctcgtggccccgtgcgtgcagtgtgaccgtgccagtacatgcagccgttgcaccaacttccactgttactactagctaaggagtagtagagagtactgtagtaaaggttttctgcgagaattcgttgacaaattaaattccatcatcaacttctacatgaagcacgcactgtacatagcggtggaactagtggagtgcatgtacgagagacatcatgggcaactaatctcgcgcgctaaaacattttgtatagatcggttggttgttaatgcgagtgacacatgtgattgctcaaccagacatgcaaattaaatccactgttccaatcacaaatcatcaatacagaacacagtgaaatccgccgacacgctccgctcgatccgagctcgatatggtcgatcaacaacacatctgcgttgcattcatccatgtttgcatcgtcttcttcttttttgttttttgaaagattattcatgcatccatgcttgctcgttcccggaatcatggcatcgtcgtgcatgtgagccagttaatcaacctgctggtgtgacgaagctcgaatccacatttgctcctgaagggcaaagtatagtgatagacgtacgtgaggcttgcttgctcgtatatgctataataaatttattattaatggtcagcgtggtacctgtaattattgtcagctgcacgatactcctacccccaacgccaacgacctctctatgcatgtgcaaggggaatttgcgagtgagtttactaatccaaagtcaaaattcctcatgtctccaaatcatcattccttaattaacaacgcaatccgatcatttcgtgtataatgagacgaaaaaaaaaattcccgtattagattaaggccttatctagttggggaaaaattttagatttggttgtcacatcggatatacggacacacatttaaagtattaaacgtaatctaataacaaaacaaattacagattccgccagaaaaccgcgagacgaatttattaagcctaattaatccatcattagcaaatgtttactgtagcaccacattgtcaaatcatggcacaattatgtttaaaagattcattttgcaatttatacacaaactatttagttgatttttttccacatttaatactccatgcgtgtgtcaaacattcgatgtgatgggtaaaaagtttatgttatgggaactaaacaagacctaaattcccccgaaattcttgtgttacgaaaggaggctctgaactccgattcatgcaccatccaaagctgtggctaatcaaccgttcaacaaattaaatccaacagttcttaaaaaaaatccgacatgagacattttaagtggagtgtagttttggagtttttttttctcccattggatacaccataaagtgtagtggatcaaggggccgacatggttgatgcgtgtctgatgaagttcataaattctcggagatgagatattgaaggcgcgtacagcatgcgtacaggaagcccattacgctggccacggtacctttgctctctctgacaacgatccacgccgttttatctagttggtaagaatacccaatgcatggattaaaatgaaagcaactttcaatgatctgtataaatttccatggacactatggccttggcatgcatgcgtgtagaaacagaggtacatacacgtacatgtatatatgtaccaatgatttttaatgtgtgtccatgtattcatgtctagctgaattgaatgggctctcaacgaattctctgtcggtgcggttactgtacagttcgatcattcgatatgttttcagaaagctctgcagtaaattaaatcaacctcgtgatttttttttttgttgatgtgacgctcatgttagcttgagcttcatccggaagaactatgaggctggctctcttttagagttgaaagctactacttgagcaagccccacagattgttcgaccaacaaacattctagatatatacaggcaacaaagcgtcaaagcaaacggcttttgatctatgtactcgggcctcgtttcagaaatgcaggaagccatagctagctgaaaccatttctttctctcttctgttttttatccttgttctcgttgtgacagatggtaacctgacggctacattgcacggtgacacccgccagcgccaatatttagttttgtcgttcgtgcagcacgtaggctgataaacctgtaaccgggattactctgggctaaaatatatagtgatatgatcaaaggacatgaagtagagcattagctgatcttttggagtaccactttaatctgaagtaaatttgtgcccatttcacggtagtacatcatctttctcaaagttacttgtactacaatgatgtgctttgtctacgaggcaaaaataagataaactaccaacgattaaaatgtaatgaagggaacaatatggtgccgtttgagtttgatgaagataaagattaagtaaaaatatgctaaacaaaaaaatcatcagcacctaattaataaagttttatttattataaacaataaaaatatatttaaattaatattttagaacggccattatataaaatatttttgaaaagagtatcgtttagcagttaaaaaaagtgttaataaaaattgagatgtactccaatttgtatgttattaatcagagaagaacgagacggatacaactcatgtcctacacctccaaaaaccacatctcgacacagagaaatgacactgagaacaatcaaggtcagaaaaagcaaccaaagtcagagacacaaatcacagatgaacaaggaaagtagagagaaaaaactggacatgttcactcaccggaaagtaatctccgacctggtctctagtgatgtgtgtgcttgtgtgtgctctacttctactcgtctcacggctaatcacctggtatttgcgctccgatttcgctcgctctccgtgccaacgccgcgcaccccaaaacccataaataaaggcgcgagaccacacgcagggccgagccttaaacacaccgtctccttcccccccatggcctccctgccgccgcccgcgccgccggccatcggcggcgacccgctcgccgccaccattccgccctcattgccgtcgccggcgccgtcgtcgtcttcgctcaacctctccccgtcgcttctcatcatcaccgcgctcctcgccttcgtcttcttcgcctccgtgtcgatccacttcctcctccgctgcctcgcgcggccgtcgcacccggctccgagcccgctgcccagggcgtcggcggcggcccaacgcgcgacgacggcgtccgccgtcgaggctggggaggctaccgccgcgtcggcggtggggaggagccatgagggggaggcggcggcggggggtggggaggaggtcgacgacgagaaggagcggctgatcgcgtcgctgccgctgttcaccatggcgtcggcgctggcggcgctgcccaagagctcccccgactgcgccgtctgcctctcgccgttcgcgcccgaggccgagctgcggctgctcccggcgtgccgccacgcgttccacgcctcctgcgtcgacgcctggctccgcaccaccccgtcctgcccgctctgccgcgccaccgtctcgctcccgcacccgccactccccaccgccgccgccgccgccgcctccaacgcggcgcaacaggatcccctcgactcgcggagcagcaacaactcgaggagcttccgcgtcgagatcggcagcatcagcaaccgccgctcctccgccgcggccgacgaccggcgcacctactcgctcggctccttcgactaccgcgtggacgaggaggtggaggccgtcgtgtcccgcatcgcgcgccccgcggcggccaagtcaacgaccggttccgtgacgccggcccccggcgaggcgctggcggaggcggcggggtcgcggggatggctgcgcgagtacgtggaccgcctcgcctcctccgcctcgtccctctccggccggtggagcgggcggtggagcgcgcggtggagccagagccaccacagcaaccggcaggaggactcgtggcggtgggacccggaggcggcggtgatgtcggcgccgcgcggggtggacgacgacgagccgggcttcgtcacgctgtaccgttggatcgtaggcgtatagaactagccccctgtaattacaggacctcacgaggttttttttgtcaatttccttccacattttttttactaggactattttgtaaagagaaaaaaaattccagccccagatgagcttaacgtctctgaactctgaaccttccatcgatttggacaacatcgtcgccattctctcttcccattctcctcctgtcctcgcatcaatcctcgcaaattttggcggtattcaagctcagattgtaaccactggagactggtcattcgttcgttttctggagaggcaattttctggagggggaaaccgggcgaatcgcacacggcaggatgccacgccgtgctgtttgctcctttttccttgtggtttatagctgatctggtcgcggctactctgaagcctggtggtgcgcctgcagcctgtgcagatgtgtggattctgaatcacttgtgttgggtggaatggatccatggccgtggcttagtgccctagtgcgtcgtaggcttgcagtcaaaaacgtgtccaatcccctgcgaactgaggacacaccacttcaggtttgttcgttgtggtgatcctttcttgtgcccagttgaagagtgtaacaaaaaaaaagtttaggacattactgagagaatggattagtgatcctagttggatctagtatgtagacagttttagtttttttttccctttgtttgttgctaccgtagcatgctcctggcttgtctctgtcatggagtcgaggatcttgctaagttgggtagcctgcccggtggtccttgttatcattggatatggttggtgggctggaggcttggtgcaatggtgccaaattgccaatccctcctagtagcatatactgaattcagatttttttctttcccggggaatatgaattcaggttttatcatgtatactccctcacttcctaaatacaactattttttggtacgcggatttcagtgcacgggaatcaaaacattttcaaccaaacaagtgacgagaatcaagcgatttaaaattcgaaattcgatcaacaaaatgactgaaaagaaatcttccctcctatctttaatctctgctatacagtgtaaaaagtgcttatacttaggaattaagggagtatgtgagtctctgagatctccgatctcgttagcgttggtggctcctcggatgtggacctggtgaccaatcatcggattaagtacttgcatcgcgatacctgaacaaatgccaaaaccaattcgatcgtctcgccatgctctcggcttcttctcgcacagccagactgatcgtgttagctcgtcgccaccagcccactaccatcattttctagcctgctactactaacgctaaatctgctactaccactgctaatctgctgctactgctgctgctaccaccaaacacaaccgactggtggtgactgccacccaaggaagaggcaccgtcgcgtagcattgaattggattgacgggtttgagcagtgatcgcagcgttgctgtgccgtcgtcggttttaaccacgcaggcaggggcggcgaccagctgcacccaaccgcgcacttcaccttgaatgctctcatttactccgccttcctaccgaaatcgtccgctcgccgctcgtctcgtgcccttcggttcgtagggaagagtcgcctcccctcgcgtggtgccgtgccgtgcagtgaaaaaaaaaactctctcatcttttcgcttatacttatatctattatattattaaaggaatagaaaaaggagcctccacgttcgctctcatggcctagaaattctcacattaatcggagaaaaagaaaaggcagagtccatatagaaatacaatttagaaatagctaaaattcgaaattaaaaaataaggaatattagaagaggagagtagagtccatatagaaatacaatttagaaatagttgaaattcggaattaaaaaataaggtatattagaagaggagattagagtccatatagaaatacaattaggaaataattaaaattaggaattaaatgtaaggaatattagaagtagagtataaagtctatatagaaatacaattaagaaataactgaaattcggaattaaaaataaggaatattagaagtagagtatagagtccatatagaaatacaattaggaaataactgaaattcggaattaaaaataaggaatattagaagtagagtatagagtccatatagaaatacaattaagaataaaatagaaattcggaattaaaaaataaggaatattagaagtagagtgtagagtccatataggaatttaaaactaactaaaatttggaataaacataataaaattaaaagtagagtttagagtccgtataaaaatacaatttacaaataacaaaaattcgaaattaagaaaaacatgggaagaagagtttaaagtcaatataggaatacaatttagaagtaactgaaattcaaaattaaaaattaaagaatattgaaagatgagtttagagtacacatagaaatacaattagaaataataaaaaattataaataaaaagtaaataatattataagaagagcatagagtctatatagatatacaatttacagaaaattcggaattaaaaaaaataaatattaaaagacgagtctagagtccatataggaatatatatgatttacaaataactaaaatttgatattaaaaataattaataactaacacgtatataaaatacaatatgaatattacatattagtagttttgtaaagttgttgcaaaatttaaaactatgttgtcattttaatatatttgaataacataatgagagaacatatatgttattatatgagagaaaatataatgatgctagccgcgcaatctgcgcgggccaccgtgctagtttatatttatatcaactaaaatttaaatttttgatcttaaatttaaagttaattttaaaatttttttcatcatagtttatttttcaacttacttttacaaatgtataaaagttttagtcatgaattattttttatttatagatatatcgtttctttttttttctcaaatcagccaaaacgatgggcctggcggatcgatcggcagatggtgcgtgccgcgtgcgtaccaatgtgtcgtctctcgttgccatgtcgagttgtggtagcgcctgcgtatcggtggcgccgagtatttatggcacgttgaagtgagccggtttgaccgtacgcccatcaccggtgtgtgtacgcttgcacgctggacacttttgcattgcacgggaagcagggctttctctccacgtccacggaccgcctgcctccctgcagccactgagacacgtagttgcagcaacagcagcgaggtcggactcggacgctacggctgagcgggaccaagcgtgcagaggcattgaatcatccatgaccagcttggaaggaaaaccaaggccccgttcgatccaaatttgtgaaagcttcaccctgtccctgtgcatcagctgtagcgattatgaggaaacgcgtggggttgtaggggaatctgattggcgctgcttctcgttttggggggggggggggggggg

SEQ ID NO: 7950 - DNA, 40774 bp, Oryza sativa
agcaatatctcctgcacttacgttaactgcaggaacagtatcaataagaacaataagtagctgcataacaaacattaagtaatcacaagatgaaagcatcagactatcattagtaaatgaagaatcactaattttgattcaagtataacgtttcaattttacaccttataagttgctagaatcacagtcatctttaaaaaaaaatcattccgaaatgatgtattaatctgaaaataagttgtttcatagcaattccgtgcatctctattatgaaagactagattggctctacaataaagaatgacaattcaatgagtcaatgaaatatttgaagctttgataatataattctgcaagaagctctgtatgctactccattggtaaaaacaagtagataactagtgtcaacaaactaagaacaactaggtcagtatccaataaagcatattctgcaaggagggacacaaaactgtaggtcctcaactatagtgctcacctgaattactcactgcctctgtgagctcaagtgacttcaagtttctgttgcgtgctatttggagtctacgaccagttgctcggataagcatggcagctataaaatctacggccacaaaaatcaaactgtcttgcattcatgagtgtaatataaattacaagatctccaacatagttcaaaaagataatggagtacattggaggcttcattttttttatttggtctgaatcattacatggtaacataaaaataataagaacataatttaaaaaatcatcatagaaaatccttttcatccatggaaatcaagtggctaatactgttagagaatagagacacagatcctaggtgtaatggaaaaaattacataacaacttatttacctgcaatatatatgatcatgatgtccaacagacctgtaataccatgaaatacaaggatgtgagtatttcaaacattgatctgatattgtgataaaataaaccaatcctgtcaaagcatatagctgcagtagtgcaaccaattgcgatcagagaagcatcatagacaaggaattgatcaccttttgttagtcaatggaccaagaaccaatagaagcaaaggggaaccatgatacattgaacctgaaagacaaaacattcaccgtgctgaataatcacttccagttcatgctacaagaaaaacacattgcaaagagaccctactaaaacatcatggataaacctataacaatgacaaatacctgcacaattatttgctaagtaaaaggtatggcaattttgcgcttattttttttaacacaccccattagtgcgggcttgcagcagttcatgcttaatggagcttactagaagaagtagcacccaatcaatttactttacttttaaaagtgctctcatgtagctagtaattccatccctatactgagctcaacaattcacgacttcagttgtcccccccaaaaaaaagtaatcaagcaagattaagatgtgtggaacgaaccggagtagggcgacatggaagcctgcttcagccagtacccttccgccactgcaaaacacacaggaaaacaagctattagtccaattacggcgacaacacagcacagctcaagtctgggacgaggaggcaggggagcaagggagcgcttacggcggcggatggaggtgaggggggtggagacctcggggcgggaggcgaggtggaggtccccgccgaagagcacgagaacgagccggaacccgacggccgccgcggccatcgaccagaagttccggatcgccatcgccgccgccgctgccgcaactccgatctgcgcacagccaccgcttcgtcgtcacggctgtaaccggagccgcggcctggcgattgggccttctacgccaagtcgtcatggatgtcgcctttgcgtaattgagttgggcttcagcagccagcaccggttggatggcccaaatcatctgcaattcgggagtacctatacatctttcgaaagatttttataatcgtatcatacagatttttaatctttgtattaaaatctgatagatataataaaaagcaaaaaacaattaagaaacaccataatgaacattaaattaccatatcctcaagaaaaagaccaaatcaaatataaaatttaaaatttacatgtgaagattcaaaaattacagtgtaacttacaaaagttacagtgtaagtttcataaattacactgtaacttacaagaaaatgcactgtaaatttgagtgagaaaatcgagtgagagataagaaaaaatctttcgagtgagatatagcaaaatcgattctttagtgttaaggcccacattagaaaactttggaagcccgacctggaaaaataccagcacaatgttttagagtggttttcaccaacaggcacaaaggttgaaacgggaaaatatgtggtgcaaaccatatatagtggaaacttagaaactaccgttggatcgagaaacgacgtcagagtttcgtccacgtcaccatgagttaaaatttaactcgcagattcactcatgagttaaaatttcactgggagttaaaatttaactcatggtgacgtggacgaatctcgaacatccatttctcgatccaacgatagttttcaagtttccactatatatatggtttgcactacatattttcccaggttgaaactgtgatcccaagttccaacttccaagcaaagtacacgtgtagttccatattgtattactacattctcataaaatatatactagtaatctaaaatcggattagatataacataatactataatctgaacatgtagaatatggataggaagcacatatcctaattggctagtagtatggatttagacagacaacacatattatatattatagtagactagtattacgggtctagacataagtttattatctatatccatagtacgtttaatccggtttgctaaaatcttctacttcaataataacccatatatgtaaacagatactttttttttaagataacatttgtgtcccaaaaaaaggaagcacagatcataaaaaggtagacaagatcgaatcaaacttctcaaaataccataatgtcttgacgatgacaagtagggtctggtacaacattattttattttagcaaacttataaattattaagacaactattatggtattatcaaatcttgcccgcgtattaaaatgcccaggtctcgcacgctagcttctgatcgaaaccgtctacacgcagtcgacgtctacgcgacaagccgcgagaacgtacgccgccgccacaacacaatcccaagctcccaacctacgcaagctcaccatcgccggccgtcgacccaatcccagcgaccatgaggcgtctgctcgtcccggtgctcctcctcatgctcggattgtctacctgcgagtcctccgtgttgcaggacacatgcaagtccgtcgccgccggccacaagtacgtcacctacaacgactgcatcaaggccttccaggccgacagcgccagcgccaccgcggccgacgcgcgcggcctcgccgccatcgcggccaggatcgcggagaaggccgccaacgccacgtccgcgcgcatcgccgcgctgagagccgcggagaaggacgcgaggaggaaggaccgcctcggcgtgtgcgcggaggtgtactcggacgccgtggaccagctcggggagaccgccgaggacatcgccaggggcggggacgaggccacccaggacgcggtgacgcagctcagcgcggcgctggacgcgccagggacgtgcgaggacgcgttcggcgaggccgacgacgcgtcgccgctggccccggaggacgccgagttcgcgaagctggcgaccatcgccctcgccgtcgctgcgtccctctcgccgccgccatcgacaccggcaaccatggattgatactgtctattaatcatcgtgattcgcgcataattagaaatttagcatcgtggactacattcagctataataaaagatttttcgatgatatgttaaattttttatgctttacttggaaggattttgtccagtgccttgcatgttacgcatgcaacgtggtttagtgggcgagtagccagcttggaatctcatctcgcgctttttttatactccgtacgtggtatgtctttgaacgtgggtgctagctgttttctggaagtgggagcgttgagtggaagcaaggcgtgctgccttctgaacagcacttttgcctttcgccttcgctcccttcttttctatgtggcttgttggcatatattgctacaaaattgtactggtaaatatacagatatatattgatctgctgcgaaattatgatttgtgtatcgttctggattatttggagttttaagtagtaccacgtaaaggccattcggtaattgagcagagcagcgctagatgttgatctcaagaaagatatatgcatcagaagccaatgagagtaatagtgccattgatcatggattcatgtcttgacgttcaccggtagccagaaactgaaagatctaagccagctttcttaccgcatcttgcacgattcatgctcttgatggcatcgtctatcgtcttattgtttgggtgcgtcgaacgtaactgaggtggcagcactatataatacccagattagagcctagctcattggttagatttggggcagggggagataatcagagaaaaaccctcacgcgtcgctctcccaggggcggctcaggaggcaacgacccggccgcccctctcccccacccccacccccttctccgcctcgccgtcgcccgagcggccgccggcgaagccgcgcagccacaaggacggcggcggcggggcgctcctcgtctcctcgcgctcgggcggcctggggagccgcccggagtggcgacggcggtgtccgccagatccgcgccgttccggccggatctgacgggatgggctggcggcggggacgggcgacggtggcggtcgaggtgagttgcgcggggtggtgttgtgggtgatggcggcggggatggtgacggcgttggggtggcaatggtggaggccgcggatccggcggtggcgcacccggatccggcggcggccggtggtggccagagcacgcaggcaccccgcggctgccactggcgtcctccggcgcccctctaggcgtcggccggcgttggtggagaggaagacagccggatctggctccttgcccagatccggcgcgtcctcgggtgggaacggggtggttggagtccggtcgtcgtgcaggtggtgtgaatatcgcaggtatcctcggtgtgcaggtgacatttggtggctcctgtcgtggatgctatggttgatgggtgctccaaggcgaaagtcttgctccgctctcggtgctagcaacggcgacacccttggacgccgttcaccttcttgaaggcgttgctactggagccctcgttcaactccacttcaagagttttctccgggtgaaaacctagattcgttaggatcggacgatgtcgtcgttgtcggcgtaaccttcttaaaggcttcgttttaggagtttatctcttgttggacggctgtacttaggttcggtttgtcaatgtcggggtttttgctggttttcctttaattaaccgtgttgttgtaaggtttttgggtccggtttcccttataaactggatcaactctcttcttctatagtgaattgcaggagctccctgtctgtcccctcgaaaaaaaaagatttgggacaggggaccataagcttagagggggctcagagaaggtgagggatcgacaggcttgcagcattgcagagtgcaaagagagcccgtaattagcagttttatgaaaacgcaaacccccaaatgaaaggcaattccaactaatctgaaaattctgatgaacctgaggatactcgtctcagtgtgtctgtgtgcgctctaatcttttctcctttttattttcaaaaaaaatcttttcctacatctgggccggcccgtcctcaggacgtacacgttctgccgtttgcgatcggtgtctgccgtttgcacgaatgaagcaggcctaacattcttcttccgagagacgtggaattatgaaggaataagttcatctgaagtctcttaacttgtcaacgaatccgattttcgtcctccaaccgaaaaatcagatacaacaagtccctcaactgtcaaaaccagtgcagataaggttcctcagcggttttagctgacgtgacgcctacgtggctaatctgactcggtctccatttgatgtgacactgacgtggcgtttacgtggcaatttgatctaagaaaaacaataaacctcgtgggacccacatgtcagtttcacacataaattaataaaaatggtggggcccatgtgggccccaggtgtcattctcacccatcctcttcttcctcctctttccctatctcccctctcttcctgtctctcctctctctctctcaggcgtgacggagagggagcggcgcgcgccggcgccgacgggagaggatgccgtcgccgcccatggcgaggatgccgtcgaggtcggagggcggcgtggaggacggtggaaacgggggcgggggccgcgatggtgagggcacgacggattcgggccaccacgcctgtcccctccggccaccacggcggcggcacgcccttctcaagcagaaagcggcgctgcggcgggtcgcagtgctgcatgagcgccgagagcaacgaacccagcgtggtgtcctgcagctcgtgcaggaagtgcggccctgccggcgcggcgccgccgacgttgccgtcgcaccccggcacggcattgtcgccaacaaattgtcagcctggtacttgacgatggcggccgggccgttgcggtcgaagcggaccttctccttccaccaggagcggaggttgtcggaggcgctgctcaccggcttgcccttctccgggatgatgccgtacacgaacccctgcgcgttgcacacctccatcatcttgagcatgtacttgaggatcccgtcttgctcctacgactgctgctgctgctcatgcaagctccgccggcgggaggtgaagagaggggagatggggagaggagaggggagagagatgaagagaggggagaggggaggaggaagaagaggagggatgagcaccacggcgatgttgagcaccacgagtccacgacgaggacccccatgaagaagccgaagctgagcacggcggacctcgacacgcggagtatctgcttgactgcttgccggaggcatctagtagccctgcaaattaattaatcagcagacgaagataattaatactcctagctaggtacgtacgttgtcgacgaagaccgttccgaagttgccgacgatgttgatgatgccgaagacgagtccccccgagctgagcatggcgaggtaggagcccttgaagttgccggcgacggggccacacgcctggccgttgcgcgagaggtcggcggagcagtcgcgagcggcgctagctggcgacggccatgaggcggtcatacaccacacgcgggctggcgagtgtgtagacgacgacgccgagcgggatgaggaagctggcggcttagatgtctactccggtgaggccgttgacgacggcggagccgccgaggaggagcatggcggcgtggcgcagaggagagggggagagaggaggggtaagaatgacatcccgcgtgggccccacatttattaaactaatgtgtgttaaactgacaggtgggtcccacgaggtttattgccccgtaagcgccacgtcaatgccacatcagatggagaccgagtcaaattagccacgtaggcaccacgtcagccaaaaccgccatccaaaccgtcgagggatctcatctgcactggtttttgatagttgagggatggattgtatgttgttttacggttgaaggacgaaaatcagattcattgacaagttaagggatctcagatgaacttattctaattatgaacacaagtccaaatgggcttatattactggattgttttgttcagggagagaaaagcccaaatcgagagtgcgtagcgcagcgaggaacgtgttacgtggtcgggacaccggagaacccaatgcagccagccaggcagatcgacgaaaatctcgaccatggacgggcgtcgtttccggcggatcggtgtccggttctcagcatcccattccattcgatgtgtgtcctaactcgatcgtgatctctttgctacagcaacacaatccaaaaaaggccctaggatgacgctgatgcttcgtacgcgatggaactacactagagtagtccactcgtgtcggagcacttcccgggtggatagcatacgatcgatgttccattacgtactattgtgcggcacagctaatgattgtacatgtatgaagtactttcttagcaaaatttgttcatagatactttcaaaaattttggtgttggctaggggacaccgttaaagcaaaaaaaaacttggctctttctttttactatataattcctccgtctttaaatataagggattttttcttccagattcgttatattatgatatgtcacatccaaccaaaagtccaaaatcccttatatttagagacgaagggagtagttcaaaacttatccatgttcgctacgtctatcacttcatctaagccacatagttcaacacgtcatctgtcaccccatgtgaacaaatcatcgagcagctgccgtcctcgcaccacggctcgactaactgccaccgccaccgcccaaggcagaatcttgcaagctcgacaacgccatcgcccatgtcttctcccactccactcggtgccactgctgcttcacttgggccgcactgcctttgctccgctcagtgtctcaacttcatccgccagtggggaaaggtagagagaagagagaggggagatgaaaagtgagaggagaactacactgtggagcatgtatcctttcaggggcttaggactaaccaacaaccaatactcggcaagtgcggtatctacactgctatcatcctaacagggtaaattcgaggtggcgaccggtgagcctcaccaataaaagcttatgcgtgggcagcccgagtatttttgtcatgcattaccattagcacgtgtcaatgggagcaaattaaattgggagtaaggtgagaaaattattagaaagatgtgagaagtaaaaaggatcatacattctaagggttttcacaaatagcttaagttgatttttttttcaaactattttcaaatcgtcaagccaagctttagcttacaattagcattgctatgataccaactgctgtgggcaccacacgtaatatattgtccagtgcttatcgtgactaacacatgtatttggatctacgtgtgttggtcatgttggacacactggacgatatattacttgggatgcccacattacgtctttgctgcgatcccctcttaaggttgtgttctttagggcctgtttggtacaactccaactcctaaatttaactctaggagttaggtctggagtggagttgtggagctgtctaaacccagctctacaactttcattttgtgagagagctccacccagctccactcctagttttgatggagctgaaactgtttggctgagctctagctccagaaggggtggagctggagctatgacaaacaggcccttagttacccctgctgcagcgccggtgcaagctattggattcatccgctatgctgactcaagcgggctagcatccccttgcagcccgtgctgcccagcgttgttttgtatcccatcatcatcgtaagctcagtcagggactcaggccctgtttctttcagcttaagattattataatctatattattgagtcatattactataagctagattgttataatctgtagtagaataagcggttagttgtttcttttctaaattattagagcctagattattgggtttgcaagtctaaaaagggagtggggtggcatggtgggtaatttttcacccaataatctggaaaaagctcacctaaatgagcttatcggattataataagctggactccagattataataagctacttcaataagttgtttgtttctttcagcttactcctaataatctggattataataattctaagctgaaagaaacagggcctcagggtcatgacgccatccatactctgagctatagatgaaccgagtggtactgaggtcatttgataatgtttctgtgtccaaaatagcaggaaataatataacaacgtgtgccataatcgatggcaaataatcagaattttggagcgtttacgaacaaaataagttttgcgaaattctcaaatatcgtttagcttttttttccctttttttgcgtgctttctgtggtcaaatttggagtgccaactatacatcagttgggctgatcctcactctacctgaaaatcattggtccacccagaacgaatcttggctgcaaagttggaaaaaagacgtttgaggctcgttagctactcgagcttggtcgttacatgctttgattcgctcgagcctgctctgaagcttgcgagctctgaccagccaagctcgagctgttcgccaatagcccctctcatctaggctcttttattgtccgttggctttgattcttcatgttaggtttagtcccatatcaataattgataatgataaaatataacttaaaagatgaaaataattgtcacctatcaaattagtattttagcctgtctaaagttatgaatccggttaattctacaataaaaaatatccaatatgttctgagtggtccatggtacactccactttcctcatgttcacatgttgttggatggtctgatagctaggactagctcctccaacccactcggtgcaccatttcttgttatttttgtaaaaagaaaaaaaaacactagttacactagttgttaacaaaatagaccttcggtagcatatttatggcttattcgtatggccacttcatccggctcaaagcggttcgaataaatgtatggtctttgaagaaaatcgattagggtatattttaaaatttcattctacttttgagctttggtgcttcacgcttcacggtgctgatcgattagggtaaatccaattcatgcccgaaaaggaaaagaaatgtctaggctcggctcgatgctgtgtcaagctcgagctcaggcatgtggtcttagggctggacaaaaaactcgttactcgttacctcgctcgctcggtttggctcgactatgctcgttgtattttttaaaagagccaagccacgtataacgagctagctcgatcgagcttgcgagctgctcatgagcttaatgagctagataggagagacattaacaaaacatggcccataagtataactcaacttgctggcccagaaagagaaaaatcagtccatcccgtgctaggcccaaagaaaatgtgcaataggaatgtccaaaaccctagtagacttggtcaatcagtccccttcccctcattctcgatagatccagattcggcatcggcaacagccgcccgtgcgccgcctgagccgtctgcgccgcctccgcacatcccacgccgctccctccatcctgagccgcctgcgcactccctccatcctgcttcgccgtcgcccgtccagcgtccagtggccgacgctcgctgcttgccggttcatgcccaggaaccagatggccggtccccaactgcggagctacccacgccgtgatgctcactggtcgctgtcggcctctcgatgagcaacccatgccgagtgtccctgtgcatcacggaggaggaagacgaggtgcagccgtgtaggtgtaacgtactaacatcctcctgtgatttgttcaactgatgattcatttgttgaacacttgactctgtgattcgttgcctcattactttgatacttagatacagttgcatacttggatttgaacgctggtttgataatctgaatttttattgcaaactttttggttttgttgtattggctcgcgagctgaacgagctagctcaagctagccgagctgatccagtcttctagctcgttagaataacgagctggcttggcttgttatcctagcaagccagaccgagccgagccggctcgatatccacccctatgtgggcttggtcgagatcggctcgttttagcccctgacgatagtaaaacaagggatcggtcggcggctcgcgaagcgaaagaaggaggaggcagttttcaattttcacacgactgcagcgccccaccctttcctactctttttatttccccacttgtcttcccccgtgcggcgccacacctcttctcatcttctcctcctatcaactccctctctctccaccgctccgcttgcctcggatcgcgctcgcgctcgcgcggagcagcgcccccaacgacgggcatggccggtgacagcggcaacagcgacggcggtagcaaccgggatgaggaggtccagatacagatcgcaggtcaatcaaatctttcccccccttcctctgtcgaaagcctcactgtttagctatgtccgattttcttcgttgagggagtgggggtgaggaggttagagtcgtcttgcgatgggcggcggtaaacgcagatgaaatgaactcgttcgttctctcgggcttatttggtgttcgatggtgtggggaagtaagcccgcgaggtgttcgatgaattgccttctcgtgcgtggcgtgttggatatggccatatgcccatatgggatttgttttttgtttatagaccatattaacttttcagactatcgtgacatcatcgagtggcagagtaggcatgtgagtttaattggcaaacccctgttgttcgcgtacatgagctggataagtggttgatgatagcaccagctatagtaatgcactgcatttaacaaaagtaaaatctttatattagtttttttatattagtgcaggatttccctgagattccaagtaactcgctttcatttgatagtttcaccaatggacaatactgtaaggatggagctatagtcttgtgttgctcgactttctctcaataaatttagagcttttggggtttatatggccaattgttggggggaaaaaaaggagaggagggtttcacttcactatgggaactttggtagtctattttgaataggaaaagaaagtttcagttggccgtgctatgcttaacacatgaagtttgggctaacctgttgatactgcctaccttctgtaacttgcagattcatccaaagctgcaacttcgtcaactcatgaagtacctatacagaactctcctgtcaagagttggcaatggtggctgatggtgggagttaacatgttcttcctcattgccggtcagaccgcatctacacttcttgggaggttctactacaatcaaggcggcaatagcaagtggatgtccacattcgtccaaactgctggctttccgattttgttcattgccctatttcttttccattcaaagacatcttctacacaaacagtcactagtagtcctgcccctacaatttctatccccaaaattactctgatatatgttgtcctgggcctcatcattgctgcagacgacttgatgtattcctatggcctactatatcttccggtctcaacatattcgctcatctgtgctagtcagcttgccttcaatgctgtcttctcatatttcctcaatgctcaaaaattcacccctctgattttcaattccgtagtcctccttacgttttctgcttcactccttggagttgatgaagattctcagggaactactagtatatcacatgggaagtacattttgggtttcctgttgacactaggggcatcagctacatactcgctcattctctccctgatgcaagtcacatttgagaaggttattaagagggagaccttctcagttgtgttgaacatgcagatatatacagctctcgtggcaacattggcttctcttgttgggttatttgcaagtggtgaatggatgactttacaaggagagatgcatgcattccagtctgggaagctgtcatatgtaatgacactgctgtggacggctatatcttggcaggtagcatcagttggagtggtgggattgatctttgtggtgtcatcgctgttttcaaatgtgataagcaccctagctctacccatcattcctgtttttgctgtgattttctttcatgacaagatggatggagtaaagattatagctatgctgatggccatttggggatttatgtcatatggccaccaattatatgttgatggcaagaaaggtagaaagactacagtcagtgtagaggaaacttcctaatcatcacaatgttgcctagaatgccgctcttaccaatttaagttgttggttctgagtaaggtactgtagttattaggaacctcatcaaagaaattccatttttgcaccatttggtatataactatacatattgtcttgattactctgatgtaaggatgtatcaagcaagagaataaattttatgtcacccccaattttccttgtcctgtggagtagtcaagtcgatattgtggttgtgatttttggcacgcttggcaagttgatactgtgccattattgggtttgattcaagtgtatacagtcgaatgcaggttcaaatatatgttatcagtgtctatgtgtatgtcaaacatccagattggatggttatcacaatgacttacttggtgatgaaatccaatcataagagggcgacgacgctcgatctgctgatagctctggccggctcataaaaatattaggagaattgaaattgagcaggcgaaagcaatgggacaagaatcagccaaagacgccgccatactgtaacgccaccaggagttagctcgccaaccaacagcttcaccgcatctccttgattttttttctcgcgtctaatttgtgaacaaaactcggaacgggacggccacgacggtgacggacgcccaaacgggcaacctatgatgaccaattttgctatatatttgtcgacaaattttctcttaaaaatttaacactataacttatatgtaattacactataactataatataacttataatataacttgtatgtaactttcaaaaatctctccataacatattattttggtaaaataaaggttgtgggaacaattttttttcagatatgtgtgtactgtgatttttttttcttcctcaccaaaacaaatctttataatagatctaataatttaaaattacgtgaaacttacatgcaagttacagtgtaattacatacaaattacagtgtaattacactacgattgtactgtaattacatctgtcaaatttttagaagaaaatttgtcgacaaatgtataggtggtcccatgatgactgctgaggtagagtgggccatatacgggtcgaatcttcttcgttgcttttgcacgagcgatcacattcggcccattgagccagtcagccagaggaataagttcaccggagatccctcaacttaacaacgagattttttgagatcccttaaccacaaaaccagaaatctctacccctaaactatacaaaaccgttcactcaaggtccctaggcagtatatatgggtggtttcactgacgtggcatactagtcagaaaaaaaaaattatacgtgagggccacatgtcagctgcacattccttcccttctcttatccttctcctcttttctctcttctctcttctcttcttcttcagtgagggatctaggccggcggccggtgggcggagcggcagcgggccggcggtggacgagcgcgccggggcggcgaggagaatggcggagaaggcgagtgaggcgggcggcgaccttgctcccgttcgcgtgcgtggagttcttccgaccttgctctcgtccggcggtgcgtccagggcgcgcccggcgccgtggagttcctcttgtccgtcgtcaaggggcagcacgccaccaccgtggacaagacgacgtccacaccgctggttcgttctttctaggaagagacgacgtgcggcgtgcaggattcggcgaaggtgagctcgccggaggaggcggctttgagcatcctgcatgcttcagctctcctccttcgcctgcttccgcgccgaccccactgacgacgacttcatcacgccattcccatacgcgtcccacccgccgccctcgtctcctcagccattgccgccgctggagcttgagctggtcgtagtagagcgcggtcagcacctcctaaccacaaaaccgttagtggtgtgcatgcatagcttagttagctgattagttagagttagtcaatacatgcatgtgttgcatgagttgtgtggcagttagcttcgtgtatgcggctagctagtggctgccaaattaagtggatcgcgtgctgcgtgcgcgtacgatgtggccgaagtttgtgttcttagctataaaagtcatgtaatctcggcttccggcttccggctccggccgttcacgccgcccgaagatgatgcggcgcacgttgtcgacgttctggacgcgctcaccggcgccgtcgagcgcgatggtcagcaggtcacccgcggtggcctgctcgagcaccgccgccacgcgcgcggggctccaggtcgcggcacgtattgggagccagcaagagatgacgccggcgaaaccacccaccgctccacccgccacccgctgaccgctccccgccgccggcctccctcaccgaagaagagaagagagaagagagaaaagagaagagaagaggaataacagagaagaaaaaaatatgtacggctgacatgtggaccccacgtattcttttaattgtttttgctgactatgatgccacgtcaacaaaatcacccatatatactgcctagggaccttgagtgaacttattcctcagccagactgctcccaaaaaccagaattcccacgcggccactctgaaagaggactcgcaggaaaattgggaaaaagtatattgaatgtccctcatcttgtcatcagattacaaaattgtccattaaccgcaaaaccgggtcactcggggtgtttaggcagttttgacaccggtttcatctgacgtggcaattaagccagcgtagcacctacgtgggccccatatgtcaatgaaacatcccttctttttctttccccctctcccgtctcttccccatcctcgcgtccgcactccagagtggcgcaacgggcagcggcgagcggccgctaacccacggaccccgacgacggcgtggacgatgggcggcggcgacaagctccattcctcgctcccctcctctagctccctcttcctcggcgtccccggccccttcccttctctccaaacgatcttgaggaggagcagcggcggcaacctccccgctgccatggaccctgacgatggggcgagcggcggctgacgagctccatgtgcacccctcctccacctcctcccatagtgcccccgccccttctctcccgtcgatcttgaggaggagcgcgtggtgacggacctgggactctctgcgtttgtccacagttacgccgcctaccttgacgaccggctcgagatccgcctcctcctcccaccaccgcgctcgactctggccccgcgccgcgccgttcctcgtcatcgacagcctctcccgcatccacggcatcggggagacgctgctcatcgtcaaccacgacagcgccgccgcggtttgtccgggacaggcgcgccgcgacggtggcgttggagtagacgggcagctggccctccctatgctcccccttcgccttcccccatgctcccgccgtcgccaccgccggctgtcgcgcctcctctcctgcctcgccccgccggcctcctccccaccaggcgcccccctgcccaaacgagaagaatagtgagagagaggaggaggtgagaaaagaggggaaagagagaggtgatgacgtggatagtctaacaggatgggttcatgtggtcccacgctgattcagatactacgtcggacgaaaccggggtcaaaaccgcttaaggattcagagttagccggttttgtaagataaggtatgttatatatctgttgtttttgcggttaagggatgattttgttatccgatgactaagttgagggaccttcggtgtactttttcctaggaaaagccactcttgagctttactgtgcggctgaacggcccatttggcagaaggcccaagtggctcgtgtgttctacgcaatagttaggcccttgtacaaaactagagaaaattctgaatttctgacgaatatatgtgcgtgtagagcagttaaccatgaagttggtattccctgatgagtttgcacgacccgtcaagaacagatatcgatcacaactcacaagcttttccggcccgtccaagaaatattgcagtctttccgttaagaataagaagaagaagaagaagaagaagaagaagaagaagaaatgttgcagtactgcagaaatcaccaagcacagcgtaaggattctgtctcaccgaactgtccgtccattttgcagtacaagactacatagtttgcagaaacggagaaaccaactggaccgctgccaccgaaaatggagaatctatgacataaatactctcaacagccagtttcgtagatcgtgcttgggtcatcgccatgcgctggcgcgtcagcaagaaggttaagtgcaactccatttgtggtacttatcatggatggtcctaatacagttctccatttaagggcttgttttgttgtgaacgcatcaattagcgacgcatgtgcttgaaatactttgctcatctattgcgttcatacgtacatcatcaacttaacaactgtaaccagacgcatttatcctcgaggttggtggaatggcgaccatcaccgtacctgtccctggagatgaagtactccgtacatcaaacgccagaagattcttctactccacggaagcttcaatcggcctcacacagtgctggatcagtagccttgccgtgcatgcaaccaggctagctttcacggttccatgagcaattgagcacgcaaaattagcccacgatgctgccatgcttaggatctcaattaccaggtcgcaagaaaaaaatcattctgagtaggcggtttcatgttgtcctggaagtacaaaaacaaaaacagaagagcaaaacgtgtttttcattctccaggagagcaacgatcgatcgagccacggtgtagacaatgtcccaaattaaaagagagttgcgtgacgtcctacgatttttccctggctcccaacaaacgcttgatccgtcattcaatcaattgcgtaatcacgctcgctcgggacctgaagtttgttgcgcgttggcgacgaggcacttgaccagcagcaggccacagcccacaggggcaagtccatgtccatccttcgccgcaaagcagagcaaaaggggagcagcagcagcagccagacagccagccagccaacagacaccgggaccggagagatcgaccgatcgatcgaccaggtcaggcgtggtgtgccccggccgacaagaggctctggctcggttcaccgctcggcaaacgcaagcccgggggcacgggccgccaccggcgcagtcagccaaaacgcacgcagaaacgcgatccaaccaccgcccgatcgaggcgcgcagaaaaggcggagcggatggcgaaacgagagggttacgcactagtacgcgcggctgcgtcctggagcgcgggtcaaccgtacgtgacgccgcactagctagcgagtgctcggctcatcatcacacgcgcccccaccagccaccacccaccacaccgccggtgaatgcgtgtgccacccatcgatcgggcgcgccgtctgccgttcacatccaccgcaccgcgagggccgcggctgacctgagcttaacgcctctcggggtgaggattatgcgcattaggcaagcttgttcccgaagcgacaggcaggtagcggacggcagcgtcctgggcgggccagtggtgccgaaatgcaagccatgattgcacacttcttgcgggtttctattgctttctggtgtgtgctggaaatgtatgcatgctgatttttatttttcgttgccaatgctaggctgcctcctttttatcgataaaggaagagagtttatttctagaaaaaaaaggggacttaagcatattccctcggcaataggtgatctataagcttccatgttctggacttctgaccaggcaccaaaatctgtgatcttcgttttatctttgctactatcacaataggatttataagttaaaagagtcgggcatttcgcacttttcaaatttactagctcaccatttggatcaacgagtgaagcgggctctttgaagctcaagtgtctgtgcaagggacactctcctcttatccaccatgctcattactctctgtgttttatattacaagacgtttaacttttttctagttaattttttctttaaatttaatcaagtttatagaaatgtatagtaatattttcaaaacaaagcaaaaatattatcaaaatatatttaatgctagatttaatgaagctaatttgatattttaaattttattgattttttctactaacttagttaaacttaataaaatttgaatatgaaaaaaattcaaacgacatataatattatgacagagggagtatgtcccgttgatctattcttaggtttactagcgcccacatcgctatcatcctccaaattctctgggagaaccgagtctcttccattctcatcctccaaaacagttgggagaagaagaagaaaagccttgattgtttgatcgtggttttatgagctgtgaaaaagctaacctacgcaataatgataatttatatacaaaattatattttaagcaaagaaagccaatgcagaaaaaataaatgaaagaaatcaacttaaatttaagttatacggggtaaaagtctaacttttgctgcaactgataatacgacaagcagatttccatgggaggcgtcattaaaaggacttactgctagcattttacataatcaaattgcgctccctccttccaaataaattactatgagaataggcttatttcatattttggttttttcaaataagttggccatatttgtagtttccatgtacttaagatttaaatgaaaagataaattaaatgtttaatcaaaacatgagaaatcatcttaatattcattggttgcatgcgtatatatgctatttaatttttgttatatgaaagatagattatttttttccttaatcctcagtataaaaataatatgtctaacccttttgatggggggagtactttgcaagtacggttgtggagagaacatatgcaggttgactttttacatattgcttgcacgaagagggttgacttggcaactgcccagtggcatggctcttttgctcttttgacatcatgattattagtactagtagtattcatagaacatactccttccgttctaaaaaagataaatctttggtttccgtgtccaacgtttaactgtcagtcttatatgaaatttttttataattagtattttcattgttgttagatgataaaacataattaatactttatgcgtgacttatctttttaattttttttataattttttttaaataagacatacggttaaacgttgtatacgaaaacccaggttttgattaatactttatacgtgacttatctttttatttttttatttttttttgatggagggagtagagtccgatagaaaaggcgaaatacgttgaaaacaaggagccgaaggcgaatcaaaactctgcctgcactgccgctacaattccagtgatgatgcaaagctcacgttagattagcaggagtaacattcaaaaaattatatatttttctaccggctccactggataatactactatatgatccagggctaattcaaacagagagaaaaatattagcacagcaattgaaaagtccaaccttctattttaattaacagaaagtgtaacgggtgatcttaacaagagtgagccacatctcccaaataatatatttgcttagtgaagtaggagtactagctactggtttgatgttgtttattagcagcaactcctgtactttggtatgttgatggtaccatgagcaaaaacaaaaggatgaatcctaccaaagagctggaagattggagtatataaagttaaacaaacaaataacttgttgcaccaggagaaagtaagaaaataatgcatgcaactaaagagctggagagagtgggacagcatgtaaagcacaaaatgtagcatcggagtgaatttctattcacaactttgcagttgcatgttataatttgtaccgaaaccttaagaggaatctatcaaaacacaaaatgttgcagtattaagctagctaggagaatccaaacactaaacagtgcatgttaacagttaacacgtcataatcagccaccagtcacaacactgcccacacgaatacaacatcatcatcatcacatatgcacatcgtgggcagcccacaagtcgccagcaagacctgaaatgacctgaaatgaatacaaagaatcataccaaatcatctaaatcgatatcaactttcgtataatcgaaggaaattatgctcgctaataacaggacgtactcataacgaatactatgtttgtttgtgtacatcttccaccgtgccatcaagaaaacgaatactacaatctcatgatgtttgtctattgtcacggtagtcaaggcctcaaatcagaatgtagttatcgcaatgattccactctctaacactgattaattgatttgaaagggatgaattaaagtggttgcatcgtgtcatgctagtagaggaatgcatgttctttcccccccccatcaagtttttctaagatttagcagcgtatttttggcctgtgcgcaccgtgttgcacagagcgcttcaaatatgttgttttttccccatctgtacgtggtaactgtgcaaaaaatggaatgagcagatactattaacttcggtatgcacaaagaggttgagaccatttaattagtatggtttggtgcaccagaaaagggagtaatggaggcagaggcagccatcgcccataaatacgctgcctgcctccatgtgaaagctctgaccaaatgaattgaattgatgctatttcatggagtattcatagaccattggatcagattcagaattcatttcagacacaaaacaatcaagaaccttcttttaatccctgtgcacaaagccacatacactcctatccccctctactcagatccctctcactcataaatccagcatttaatcctgtgtacaaacgacctgtaccgtgcagtccatgcacatcaacaagtccactcattcttaaacccaagcatcaaagaaaaaaaaaagaaactaaggttaattaacaattttgcaaatcaagattagacaactagctgtacaaacaaacaagcagctcttacagtaatggtcggctgacgagcagtagtaacctatatgtcaacgaagtggtttggagttgggagtataaaatcttatagagacttttcatggatggacaaaatgcgagtaagaaaggagaagaaaaatctaaaaaggatggtaattgggattaggtggtgataagcggtgaagagaagatgaaaaaggtgaaaaagaaaacgtgaaaagatcaccggaagcgtccgccgtcggcgagcttcctggagcggcaccgagtaatggaggcggcggaggagaggttgtggagcggcgatggccgtagctcgcaggagaaggtgcctgggtcgggcggatgggcgtggcggtggcggcgcccggggctgggccgcacgagagggctgaggcagacggcgaagcccgatggcatggtgctggtttggcgccgccggcatggggtcctccgcatcggtgaaggagatggctgccatgggggatcagtcggcgagctgctctcctcgtcgctgccgtcgcagtcccgctccggcgagagcccacggttgctgaccacgcggcaggagcgcctaggcgggggcgacgaggcggctgcggctgcggctggcgctggcggctgcttcttgcggcggcgcggcatgaacccggcgagccaagaacggtttctgctctccctgttgtcgcctcccttgtccttctcctccgatctgtgatggtggtggtggtggccgaagagcgtggcgatgacggagaacttccccgcgcgccgcttctcgtacccgatgtccccctcctcgagcccgccgctgctgccgtaggcggggccgacctgcggcgtccggaagaagaggaggctgggatgatgcttaagcgcgccgccgcccgaggaatccgacttcctgcgggacacgtacggcgacaccgacctcgggaacgccggcgccgccgcggccggtggcgcagccggaggaggaggcgacgacgacgccccgttctgcgcggcggcgagcgcgagcaggcggtcgttgaggcacgtggcgcagacgccgccgcccgcctggtacgggtgcttcttgcacctcatccccatctcatcgactcatctcgccgccgtcgccgccgccgccgccgcgcgctccggccacgaggaaggagcaatctacaacggcgcacgcgcacctgccttccttcttccccttcccttcccttgaaatttgggcgagttttttaaaacggagattggtgcgcgttttggcgaggggatttttttttcctcttttttttcggtccgcgacgctgcgtccgcgggcttaaataagcttcggcgaaacgaagggcttaccaagtgcaggggggacggagtaaatggtggccttgactacgcttttgggcgaattttggtttgattgcggttgcttttctattcgtgtttgtgagacttgcgagtagagtagaatagtagtagatgcagatgtatagtagtagtactagttgagatagatttggcacgggaccatgcttggatttggttgcggtggtgcggcggctgagcacacatgcacaccgttgagagcgagacatacatgttcgtttttatcggctaatctttgaaaagtgtattttgggtttggcctatctacacgagtcatcttaaagggattccttatcttaattaatccagggagatgctctactgttattgaacaaatgctgccactccactagctagcatcccacaaattgttgcttggccattcggcctacttttcaggttcttcctctctgaagcctataaacccaagccgtggacttcccagacctctcgattctcagccttgcttacggcccttttttccttgtcatgatctggtgtaggtgatttggtttatggttcaaccaaaagcgaagaattgtctcgttaaaccatacgctccagtgtgtcgctgaggtctagacacgtcggtatttatacaccatataatttacagttaattgcacagtgggccacttatgtttaccaaggttgcaacttggactagggagaagaaaatattttcactttgatttagataagtttgcaaaatgattcactttgtaccacttccctctccagctctctcatcactttcttctctacaatctaggaaacttggtgagctcgtgaaggcagcagcacgcggctcaaattcttaatgcatcagatcagcatgagcatgattcaactactaccaatacaggatctgctagctaggtgctcgcttcttgcgttgattatgggaactgggagcctgggagatccttgagcttcacgtcaggtagagggcacggcccggaggagatgctccttggcgatgagcagtaggcgctcgtcgtagcctccgcaaattggggacattccccggtgcagttcaccaaagcatcaactatgcttgctccaatgcttcacgatacgcagtgcatggcagaatgtgtaggtcgagcagagcgcgtacggcaccagcagaaatcgagctcgagcagcaatatatggacggcaacgtactagtggaggcatgcgttcttgaacattttgtgtgtgtatatccttctcatctccttcctccgttgagcctgctctcatctctgcttcctcgtcgaccacaagtagctggccgtgattagggaggagaggagaggaagaacactatttgatattgatgtgtgggccactggttaaaaatgcaaagttcagtaataaaacccggtcaaaagtgaaaagatctgctgatagctggtccaatttacaacttgggtaataaaacctgccctaaagtgcaattcactctataatttatcctcaagtgattacgttgctgactgtgatctctcaggtaaaaaaaaaaaggcccgaccaaaatccattcggagggcgtgaaatcgatagcaaattagcaagtactcgtactatacgtacttaataacgccttgcacgaaccgcatgcaccacacgtataaaccagctcgtcactttctcgggtaatatataatcgcgttccagaagacgtttgcgctcatcctgagccgtactatccattcatccactctcagctttggcacggatgcagtgcaccaaaagttatggaaaagagcaactttcaccgcacttaattagcacagtagaagcttcccgtttacactgatgcttagtcattagtcactcgagaaaggacccggtaaaacagaaagatctcaagacgtacgagcgcgactttgccggtgtcgatcggttttaatttggtcgctgatcgatcacgccgagatggcctctcgccgcgccatgacggagtgggacggagatggactgttcgttcgtctagagaaagagcacagggcgtagctactggtcggttgattgatcgcgcgatcgatggagaccgactcgagagaccgggccggcgcgcgagcgaggaggcaagcgaagcgcgcgcggatgcagccatcgatcggcgaccgcgcgcgcgcgcgtacgcgtcacgtcgcgctcgtggagaagctggcgctgctggcgatggcgctgtccgggtttcttgtgctcgcgccgcgcgggttcgtggaatcacggtgggattgcggcgtcacgagggaaaatatagtgaaaaacgcgcggttgattttgtcgcgggggggaactgtgcaagtgggtagaaagatcagaacggcgacaattctatcgtcttctggagggagaagtgtaaggatacgtccgtttctaacctgttcatggaagtggtcattgtcgagatggattgggattagtccatcctgcttaataataatgtaaaagaagctaacctacttgccattcagcaagcaaccaagtatcacacgcctcggatatattgctagtggtttcattagggtctatatgtttgattttattttttctgatctaaagcatttggctgcgtttgtccaactcacgtcgcaaaggaagctgacgagatagtggaagcgtcatcatcattgcacttaaactactcgtgtctggtttacttgtacactcacgatgaaaattaaggaaagataccgtcaggttcatcgttttcatctcatcgatatatatatatatatatgagatttcggcaatgctgtcgtacgtgtcgtgccgacgccacgcgtcgcagtcgcatctaattcacacagggctgattaacgattgaccaggtagcttcttgctgatcaaataccagaagcgacaggaagggcaacattatcttcttctgcttaatactcttagcttaaacgtcacgactcagcccgatcatctgtagcactatttctgctagtaattaacttttgctttctagtactattaaccatcatgatccgcgcccctttcgcggggtcaagcctgaaagctccacgtacgcgccgccaccgtgtgctagcttttttctctcccactcttccatatgcacctatatatccatttcccccttcacaagggcgccgtgaaaccgatgaatatacgaggacttgtcgtgccatcctgccaaatcgacgtccgccgcgggctcgcgccgcgcgcgggacggacgggacatcgcctcgcgcccgttcgccgcgttgcgcttgcgctttgctcgtgaaacggccgtgcggcagggtgggggcgcgcaggtgcaaagcggcccgtgggcggtgggctctctcgcatcggcaaaaaacgggtggcggctacgtcccttgtcccaggtggcccaactgaacggggagctagttttggacgagaaattgttcgagaggcttgggctcgcgataagatgggccgagacaccagtgctgcaagccggccacagccaggggccaatagcccactactgcggggaccgctaatgcgcgggtccacacccctctcccctatacgtctctctcctcccccttcctcctccccttatccaaattcatttgcacttaataaataccagcttctgccatagtggaacggaggcgcgtcgccatatatatacctcttgtaagccgccgtgcggcgttgtaacctcaccccagatatagtgaagatattttgctggctagcgtccgtggtttttctctcctactttgggagggttttccacgttaaaatctcgtgtcttctgtgattaatctattattctttatcttttgtttgcctatcatttcctaacaccttcttctcttccctactatagtacaccacaaaattattttgaaaaaacaaaagttagaaaaatttatgtaaagaaatattatatataaatatttgaatttaaatttaaatttgaatcaggtatgtaaacttttgacttataaactttggatctataaactttaggtgtataaactttagatgtatagaaatactatatattagaaaacatttgaattcaaattcaaaattaaatcagatataattcaaatttaaatttgaaacgggtatataaactttaggtttataaactttagatgtatagaaatactatatataaaaaatatttgaattcaaattcaaatttgaatcggatatataaacttttgacttataaatttttgctctctacactttagatgtgtaaacttgaggtgtataaactttatatgcataaatttactaaaatagaaaagtaatgtggtgaaaaaaaaagaaaccaggtgaagaaagatggaactgatcgcaaccagttggtcctgtcgatcgatcgcgaatcagcctttccgcactactactagcaatttgcagtttgatggcgctcggcaggcacacgcacaacaggaggactgaacaagtggtggctctctctacttctctagatgaaacgaaaagtttccagctcagtttgtagtgcccatcgtgtcgattggagttcctgccactgtgaagctttttattcgatcgcaactaggacgagtgtcaagctctgattgattgcagcaactaggagtataggacgagtgtcgatatttgattcgattgcaactaggaagtgccagtaacgtgccagcctctgaaccacacgaagctcagttgaatcagtcccaactccagtttcccatgacttggctctagatggttaccgaaaggtcgccagacaaaacttgattattacacactgatgctgtaagtacgtaccttgagagcaaaaaaaagttgcaactactcctgattcctgaaggatacgtaagtggtgacaacttgtgctcaaaccatgggtcaaatggatccaaaactgcttcgttaatagcacttggttgaagaaacatgcttatatactccatggtccccttcaataatggtaaaatgaggtccccacatcctcggatatgtatcaccatcgtcgataaagaattgaggctcaagatcatatgcctatgataatggcacattccatcaatcccgaaagcaaggagggcccctgttcattagtatgctacaaactgactgactagccaaataaatacaaattatcttttcagtcttaaaaatgtgcaatgggcaatgggacattgtagttgatctaagaacattttgataagagttatggatgtatgtactagtcattggttattggttagttcttacacaagtgatatggtataccctctaatattcaggaattcaagatttcaagtcccagtgccgacgtatactttcaacatcatcttctaaggaagaaaaaaagtatgacgagtactaatttaagtcaataatagcttccttagtcaatagagtagttgttaagtccgatgaagttatattgctggataatcaggtgacagtactagcagatcatgcaataatataatccaaagtgaaaaccattcgtatgtaccacctcatctcggttcttttaataacaacttccacatttagaacgtatataagggcataagaactgatcagcagcaaacagaacccaccatatcacaaccacgacttccctttcgagtaagcatactacctgcttatcatttatatgtcaggctcatttgaaaacatttcatttccttgatatagtttgttttaaattttgatgcatttcagttaatcttggaaagtatgcttttcttctatgttatgaaacacacaccgtcttgtggagtttgtgtgactacttgttttctgaaagaatatgctcagactggcatctagcagcatacatgtgttttctgactattttatgttcaaccatatgatacaaatgggaaaaggttcaaggctcaaatgataaaagctttaattactccatcctttgtattgtgagcatctctttaaatacgtagtgcattggatgcatagaatatactctacagataactctcaggaactagttattcttactgtctactctctccgtcctataatataagggattttaagattttgcttgcaacgtttgaccactcgtcttattcaaatttttttaaaattattatttattttatctgtgacttactttattatctacagtactttaagtgtgactttttgttttttatatttgcaaaaaaaatttaaataagacgagtggtcaaacgttgcaaataaaaactcaaaatcccttatattatgggacggagggagtaattatttgaatttgtgccgctcacagatttgaaccctcaaaagataattcaagccgtcagcaaatggggcaaacggtaaaatttggaagagttcctttcaaggttggcttctcacattcacagtcccgcccaaaggtgagcctttttgttcttttcaatgtcacgataaactcattcaaacagaaatacaattacagagacatcataatcaaaattcctggaatagttactgcttttaattagttcattggtcgatgataagagagatttaaagaaatataagcacgtaaggtagataatttactaatttaatgtaaatgattgatcatgcttcacagcaggaccgatggcaaggaaaatcgagcgagcaaagaagcatcgaatcatacaacaaaattccagaatttccaaattgtcacaagctagaggaaccagaggacaatcaacaaacagcactgcttctatctggatcccagaacctgtcttcccccgatatttttcagctgctatctgtggatgtatgtataccaacacaacttaattactctactatgcatttaacttttcaagaatcatttaacttaaagtacaggccatagtcatcctaactatttgtttgggatcattcatgctgatttagaccgattcagaaactgaataaatttttgacatatatttcatccattagatataatatacactccataataccagtgtactttaattaacagaacattatgcactaaagtactaatgatgtgcattatactgtacacatttcagtttgtatcatacctttaaaaatacatattgctgaaacatgtgcgtttcatttatttcaaaagtaactagctgggtggcctgcgcaattgcgcggctagcacccaaacaaaatcatatatttttcagtatgattttacttaagatttattaaatagctatacttgtatttctaattatatagtttttaaaagtcacaccagctgctaccctttacttctgtcatatccttcttttgtttcctcggtctaccactatttctattcattctccttgaaacctctaaaaattggatcttatagttttttgagtttattatctcgttgggtttcgtttttataatttctagaagtcccgtcaaacgctgccattatactcatctacgacccgtccattgtcttttctctttattgtcattgggattttacaaatcgaacataataatcgttcgggttcatttttttactttctataagtcccgccaaaccgtcagtggctttgccattgtactcctttatggttcgcccgctgcctcccttctttattgtcattgagattttaaaatgtatcatgattatcattgttttatttttactttttagaagttccgaaactttaaaaattggaccttgtagtttttagagtttattgtcttgttgggtttcattttttataatttttagaagtcccgtcaaacgatgccactatacacctctacagcccatcccccgcctattctttattttcattgggattctaaaatcgaatataactatcgttggaatttattttttattttctaaaagtcccgccaaccgtcggcggctctgcaactatactcctatacaccccgcgcacgctgcttctcctttttattctcattgagattttaaaaatcgaatgtgtttatcaatgttttttttttactttctagaagtcccggcaaccgtcttgcccgtccctccttttaatcatcattaggattctatttgatgttttactaacagtttttatatatcgtatcaactgccaccactattcctaattaaaatctttttttctttttctaatttatttttttaattaataccgtatagtgtttttttaatatttttattttttatcttttgaatttcagttgaactctcttttattttttattctgaattttaattaatctcatattggtttcttatatggattcttctttcactattgcttatttttaattccgaatttcagttgattttaagttgtattcctactttaacttttcttttctttttgctaatttcaatttttttatttttattccgaatattaactaatctcatattgggttcttatatgtactcttctctcaatattctttatttttaattccgaatttcagctatttttaaattgtattcttacttggactctccttttattttataatttcggattttattttatttttattttgaatttgtattaatctcgtattgggttgttatatggaaacttctttcaatatagcttatttttaattccgaatttcagctatttttagattgtatttctacttaaactctccttttctttttttctttttctccgattaatgtgggaatttctagccccccacagcgaacgtggtgtctccttttaaagctgttttaataataaaatagatatatcaaaatagcactattaatgcactatcacactaataataaaaagaaggaccgaacagagtctgactggaatagaattaattcattagatgtgatgtacatccttcatccatacgatctgtccatgggaaaagttgcacaaagtgagctatccatgtgggtttctgtagagtacaactgcatgcttcgggaatggtgcattcgatcagggcaaggatgcccaagggaaacatgaggagaacagcgtacacaatgtcaatcaagagatcaaacaaaccatggatggaatcagggtaaaacaaatacagtgcttacatgtagattatatgaatacagaattgatctaactggaaattctttccctactgcatgattttaatttcaagactctgctctccagtgaaaaggttcctcacacaacatatcagaaaatcaagactaggcacaaaacctgcgtaagaaaatggaatactctacaacattaaaccaagtttttcatgtgtagatgactgtggggggcgtggcagaattcttgaaaagtaaattagcaaacatggtacagaggggatgtggaaggaagagagaggacataagactccaaacagctcagatgcatgcagctctctcagttgcaagactagctacagcagttgcacgaatggttggtaattgccaatctgagtctaccaatgcaaacaacactatcatgactgccatagggaaagatgaacatagaaaaatgcatgttgcaattgcatctgccgcagcactggtggcagcctcatgctctgaggctgcaaagttaactggagctagcagagaacagatttcgacagtcattcacatgggcatggaaactaggtcgctaggggatttgctcatgctgactaccagcgcggcgacctgtaagaccaagaatagaaccagctcatatttctctatatattgtatactaagttacttgcatgaaacttggttcttttgctgcaggcttaaaaggagctaatgcctttaagatgcggaacagggcaataagcaattatgcctttgagaatctcatgagtaaccagaaagatgtccgacttcctattcgaacacctgatggtataatgcccaattaactcatcaatgacatgccacattcaattagattacttcattttccagggatacaagatgaatgcgaaaaaaaaaacactttcatttgtgtattcatgcagggaagatccatatcaggatggtttctgtgcactgcaagcatgacaagataatattgaacttaggaaaggagcatagtttgagaaccagtaaagaatgtgagcctcattttactatcctctttcttaagtgcaggaccattcaccataggcagtgcaaatctgaggtcttacctttgcttttaatatgtagctgtgctaaattgatttatccaattgtttaatcacccactttcttccagacataatttttgatgaacatggtgggacaacagacttcagctacccaacagatgaacatagctaccatgcaataaacctcgcaacatctggtggaaacatacagttattatttgaagaacatgaacaatacagcgcttggaagtcattcatcagatacctgataatcaacaagagatcaaggctatcctactgatacatgatgtacgaaaattcgacaatcagtagggactcatgctctacattccttacaaacccacacatttcttacgtgaacaataccaatgatcaacatcatgttatgggaagcaccatttgtgtggtggtggaacacatgactccatccacaaatatgattgtgtgtatccttagttggtgcagatcccggaagttatacttcctttgtccaaataaataaataataataatgtaatagaacttagtaatagttattccaccaaaatgcagtttattactaagatgtttggttgaatgatgagatccatcccctgaattatcatctcaacgtatttatgtatattttaagatcacagctagctggcaaaattcaactcagtaaacctgaactgagatgatcagacgggttccaaggccctacccctgccattctcacatattccattagcattaacatcacagcagtctttttacacatttgacaggacaattttggtgtgtttccaacttcagaactaaaaaaggcatgaattatttttgaaaggaagagtttctgtatttatttgaaacataagtatatttttgaaataagtatgtctgatttctatactttttagtggaagcaatagataaaacaattgcattcgctgtaaaccaccaacccatgagcaaaatcgtaagaaaaacaagcaattctacaagcagaataacatcacaagaccgacattaagaaggcaatagcacaaaaaaaaatcctacttacattttaatcaacgttgtaagctgaacttgcctaaacaaatataatgccgtgctccttaatggtgtcgatgacgatgccaagcttcccctcgatcctctcgttcttcttgggctcgtaggacatggcgaagacgtcggcgtccatggacctctcggcgatgaggcggccgatggtcctgcaggcgttgtcgtcgacgagggagggcagcgtggtcctgaggtccttggcgttggtgctggcgacggagatgaccttgctggtgcccctgtgcacgaccttggcgtggacgaagcgcttggagaagaagacgttgagcaggaacggccgcatgtacatgtccgtgcgctgcttccacgacttgcggttgggcctctcctccgcctccttccgcgaccgccgcgtccacgccgcgcgcaccaccagggacgcgcggttgctgggcacgggcggcggcgagagcgcgaggtgggcgatggaggcggaccacgagagcggcggcgacggccggagagagggcggaggtgcgcggcgcggggggagagtggcggcggtggggtacgcggcggcggcggccatgggagcgtgggggtttagacgaggtcgccttatcctgtacttacaccaattcttttaagagtaaatggcatatagggccacttctttttaccaatgtggtaagagtaaaagactaggaagtaggaacagccgagcagcccaacactttaaatttgaacccaaaaagattacatataagttttactttgggcaatttgcttcttccctatctttccctctcttccttgctctctgtcttcttgagcttgttgggttggtgtgaaagctcaaacagacagtaacatagagcctatggagtaccgccctccgtcgcactgctcgcatctcgtcaatttgctcctacaccacatagtccccaagctagagcagctctgcgcttgcgtcgattggaggcggccatctctacggtttatggtcgacgatgagcaggcctaggtccatccttcgttcattataggttaatagcattaggagggacatagcttgctcacgagctcattagtggtgatgagtgtggaagcgtaagcgtggatctggaagaagtgagtttcagtacgtttgaggacatggagaggagctcatcaagtggctaatgtatcaattagttccaatttgcaataaattgtaagtccatccggttcaaagtgaaaatatgagatgagatgagatctagttcattatacaactttggtaaagaaatcatgtccaaattacaattaactctttttttaattgcagaaaaagcatcataactatggcgaagcgatggcagttgagatattcaaatttgtcaagagtgtcagagtgacaacatgcagttttacaaattttcattaaaaaaatatagatcaaaggtacatgttatgaaatgcttttaccaaatttatcattatcctgccgcggattataatagcgtacattgtaaatgcagagtcatatgtgtagcgttatcccttatattaactgacgtaatgggtgcttttatcgtggagtattttacatccttataacaagtttaatagtatagcgaactattagctctaaatcatttatagtcaatctaatagcaggtacaatagcaagctataagccagctataaacatttttaaagagataaagaaagagagaaaagagcagcggactacagatctgtagccagctgcagcacagactccaagacgtaatatgtgtatgacagatgggaccaggtattaatagtatagtaagcaactattgtatgaattggctattacattgactatagatgatttggagctagtactgggctatactattaaacttgctctactatcattcatacaatagttacctataagcatataatacaccaatatatggtctcacccctcatacacataatgtattgaagtctgtgctgcagctgactataaatctgtagctcgctttccttctctctataagcatataatacaccaatatatggtctcacccctcatacacacacaatgtattgaagtctgtgctgcagttgactataaatctgtagctcgctttccttctctttctcttctctcctccagctagacacacaacatattgaagtctgtgctgcagctggctcttctcttctctcctccagctagagacacacaacgtattgaagtccgtgctgcagctggctataaatttgtagcccgctttccttctctctcttttcttctctcctcccgcttttcttctctccactctcttttcttctctcatccccgctttccttctctctcttttcttctctcctcccgctgttcttctctcctccatctagctataaatctttcttctctcctcccactattcttctatcctccactctccactctcttttcttctctcctccccgctttccttctctctcttttcttctctcctcccgctgttcttctctcctccatctggctataaatctttcttctctcctcccactattcttctctcctccagctggctataaatctaaatctttcttctctcctcccactattcttctctcctccagctggctataaatctgctgttcttctctcctccaattggctataaatctatagctctgtagcccgctcttcttcgcttttcttctctcttttcttctctcttctagaaatctgtagctcgctttacttcttctctctcttttctccacatgtgcttacaggtgacttgtagcctgttattgtactcgttcttactccacatgtgcgtgcttacagctaacttgtagcccgttattgtactcgctcttactgatacactccagttcaccccacccagttgcccacaatacaaaagaacaccgatgcacaaaatccataacacgactcaccaaaacattttatacagcgcgtagcatgcatgtacagatgtacctatatgtggtcttacctctcttggataccatggagtcaagacttcaggattacacaaacaaaataatttttcctccagtgaaattagaatatcgaatttcacgagggatttaaccgcgaatgtcatttctaaactcctgattttgatgaccaagtggggacaaccaccacgaaggtaaacatctgaaaaaaattcagtgccaaacaggcaactggtagccaaaaaggctggattgaacgggccaatgagcaacacacgagaaataatgatttgggtggtgccgagggccttcctcttttcccttctctgttggcatctgctaaacaaaatttccaagttacaaagtcttccctcaacataaatgagggaatacaattctacatctaaagagcctacgctaccaatatacatacatgtatagaaagtacccaatgcctccattagtgctaaccaaaccctccaagcttgtaaggtcattgtgaccacatcaagcaaatagcttcgctcccaccaatcgccatcaagcttgcatcaattctgtgtggcgagcgactcaatctgtgtatccttgggctcctaccgttgacaatctaatgtcctctttaaaagaaagggcatgacatccagagcaatatgttcatttgttctcatccgatgtctgtgaaatctgtaagaggatccaactcctcaatgccagaaaggacatcagagtcatactggtacggaacaaactctgtttcagcctcttgaggaagattatcaaagtaggtgaattcagaatcactgatgccaaggtcagatagggactgggtaatgtggaactctgctgagttatgcagaagttgccccggaatcctatgaaaattatttgtaaccggcacttcctgtggttcagtggtcctttgaattttggatttgggaggccttccagattctgatgatgctttgtgctttcctatggacttaggaccagatttatgccgaccggcatcgtatgtgtggaaagcagatgaggcccagtgagaaccttccccttcaaaacaagtttctgataccatcctgtgtaaatgaatgcaatgacacgttaggaagatcagaagcaaaaataaataaataaaaaatgcaaagcagaactgtatcatcatgaagaggatttttccggtgctaataaccactagctccaataaatacacaaaatatctgtgtcaacaattacctgaatctgttctcagcatgtctataagaaagtgtggacagtagtgagtgctccactggctccacagcatgttttaatggttccggttctagtatggacacgttaacaacagatggaaagtccgcctcataatcatctcgatctgtcaagaaatccaattccaattccaaaaagttacggcgggactcatgattgcttgttggaactaccattcttggacattgaacctgagcatctgcgagggctgtccttactagattaaagtttggtctgaagtttgtcatggaccagttctcgctgagtctgccaggtttctggagtgtgttagagtaactcataacacagtgggactcacaggcagacttcgatctccaaacagatgaaagaacagccatgaaatgtttctggagaagcaattcattgttaggaagctcgctgattacattgagcaacatctgagtttgatcctggaaaataagtcataaaaaatcaagttgtgcacacaataagttgaatataaatagtagatttgtttaaagcccacatatccaaaaaaaa

SEQ ID NO: 7951 - DNA, 41320 bp, Oryza sativa
atcggcgcagcagagcacccgcgcctccgccgcatcggccgtcggccgccacgcgctcgcccgcctgctccagccgctctccgctgccgccaccccgctccactccgcctccgtcgccgctctgctccgcttcgccagatgcgttccgctttgccggccgcgcgctcaccgcctcgctgcttcggacgcgcgcttgcccgacgccgttgccacccgctccactccggtggtcgccgcgcgctcgcccacctgctccggccgctctcggtttccgctacccgctccacaccgccgccgctgtcgccgctccgccaaccgcgctctctcgccgctgccgttccactttgccggccatgctctcgccgccgcgctgctccggacgcacactcccccgccatcgccgccacccggctccactctagcggtcgccgcgcgctcgcccgcctgttccagccgctcatggccgcccgctgtcgctccccctctatggcaaagataagaacgaaaagaggagagaggaaagaaaagagaaaagaggagaagatttagaaaaagaagatatgcgggtcccatatttttttttccttttcacttacatgtgggctccataacttttttattttttattttgttgactagaatgccacgtcagcgaaaccaaccatatatactgccatgggacaaactttgaatggtttgagtaagtttaggggtatacctttctggttttgtagttaaaggactaaaaaaatctcgtggttaagttgggggacctctggtgaacttattcccaaaaattaagcccagtcaatagtccaaagttccagtcagttaggttgggccgtctgcgcaattgctagcagaaactgagtaaactgggccgtgtaatctgtatgtccattcaaaatcaggcccactatatgttctataccgcagcaagacaatggtaagcgagtagcgacaggaaacgaccactcacgaaccaaaatctcctccactactggacattatccagccgaacattatccctggctactggctagattcttcattcttgatttgtgaataacacatcatcatcctgaacctgcagcatccgtgtctcggtgatagaatggctgcctggatggatggctagctcttcccccaacatgtcacacagccgatcagttcctgcatcgatcccgaatatgatgccaaaagcaaaaaccgtccttcagcattagcatcccccctgcaacatgctcgtgagcacggcatgtgttttgatgtcaacttaccacggcatccgtccgctagcgctagtatttatacgcctagttagtctccgcgatcttctccgatatatcgtgcacatccatatccacgcgcacacgcagccggctggaaggaagaaaaaatgctgcggttctggaggacgcagaggagcgtcacgtcgtcagacgccttgtctgtgagtaaaacatgtaaatgcaccgtcagaaggagatggagtactatacattttccatatgcatttctgagtgctgtttgtgtatgtgtgcctaagatcgtggagatgaacgtccacatggactgcgagggctgcgagaagcgcgtgaggaaggccatgtcccggctcgaaggtgccagtactgtttcgtgtgtgtaaagtatactccagtacgtgtgtgtttcgtgtgtaaaatgcgtgcgtgcgtgcaggcgtgagcacggtggagatcgacatggacacgcagaaggtgacggtgacggggtacgtggaccggcgggaggtgctccgggcggcgcggcggacggggagggcggcggagttctggccgtggccgtacgacggcgagtactacccgttcgcgatccagtacctggaggacgacacctacatggcgacgcacaagtactacgtccacggctacaacgccccggtgatcggctcctaccccaaccacgccttcacccacatcgtcgacgaccacgccctcgccttcttccacgacgacaacgtccacgcctgctccatcatgtgacctaaaatataatcttatttaaaatcctacatgccagcgacagatacatatctgaccaaatcgaacaagctaagtgacctaattagtggtgcaaaataagagatgaaaaaccaaatctaacttcgtcgatcatctagtaatggtcaagtagttgctcagcaatccaacgtgcaaagagtgtggtgatatgatagacaaattaacgaataggaattaaggtcgaactaagcttatcaatcgacaagttgttcttaattaattgcactatgcgaccctttttcttatgaacatgaattaaaaggaagggagcagtagaactggattgctaattaacccgctatccttttgaattgactattcgacgggcatctgcatggtatcgatgcttgctgttgacagcacaaggggaagaaaagggtggccctgaaaattttcaactgttgatgctagctagcggctgatctcgctgaggtatctgtgccagtaatttttgtctgcggataggacaacatggagaggatgactaggaaaaggagcactgttcaaactatccaaatgtctccaaccaaaagtgatgacccatccttgcatatgtgcgcatcagtgcatatgttcttatgctggtgtggggtgaagattctggtgtgaggggcaaacggtgacaacggaaaagaaggttcgaatataccctgttccctgattacaaatacagttatgagttctgaccattggattgtatacatatgacaaaaagagagtaaacttcagttcacacatcagaccaaattgagtacaggtgctaccagtatttggctttcgaagatattttacattgggacagcgagaggagtaagttcagttcacacatcagaccaagtttgatgcagctgctcaatgctctgtttgttcgttttgtcagggaatatgggctaacagtgacccaatctggattggattcctatcaataaataaacaaataaatctggattggattgtggaaatgataagaacacgcgtgcaatttgatccactttttatgcgatcaatttgggaggaaatgctctttcgtttcgctctcacaaacctgtgaacaatttccaccctctgaactttcagcattgttcttgtattccccacttcctgaagttcttaattctgtcaccaaacgacttggcatgcagaacaattcagtccctcacgagatacagaacaagaagatatattatcttataccccatgggccaggtaggtacaccagcaacaatgcaaatgccgtcgcatcgcatctcagatacttatgcccactaagcttgaccattatgttaacttggattaggggtaggctagagattgattggggcttatatgataacactacatatacacataaaccacaaaatcaagctatcaacattcctcatctcgttgatgccgacttatatctgccctgatagcgcctaattaacccgtgaacaacgtgtcttttcatcgtccaagtgcccaaccaacacatgacaaaagcaaaacgagtaaataaatttatttagctgccaataaacaaaggaaactggacctgcccgtgtcgaatcaaatgctaataactcgaatctggaacaaaattaacgccaaaaacaacacaaaaaacgactctttttttttctccaaactcgactcggctttgagagttctaatcttagccaggctccaccccaacctgtgctgccctgttcgagcgaagaacgaaagcgacacgagccgtccatataaatccacgccgtcgccgccgaatctcgcgaaaaagctcgcaaatttctactcggggaagaagaagagccctctccaaaggatctcctcgcccggccggcggcgatggcggccgcggcgccgatgccggttgccggagcggggtggtgggatctcgtgaacggctcgacggcgtggcaggacgggatcttcctctccctcgccgctctctacggcctcgtcgccgcatcctccttcgtaagcatctcgccgcagtgctcatctcctcctcctcctcctcctgagtcctcctgactgatactatactctagttatgcttatgcgaaagcactgggggaaagattctttcagaattttgtgtcaagatggattaaggggtaaaaggaataacaatacacgtactccaactgggttggtgacttgagttcatggcaggagaataaagacttgatttttggtgcttgtttgatgggaataccgcagatttgcgatatcaccatcagcgagtttaattgggaataaagacggttttgtattagctttgtgctttgagcataccagtgttttgcatctgaaacttgtaaaagctgataatgaggacgaatattttacagaactttagatcaatcaatatgaaaaacctgcgatttgaaatagagatagctggacaaggacttgtgattatctgccatgcttatctttctgatatccggaaatcctgctggatgcctggatagacagtacaaaggacaataatgtgtatttatgccttggtatctgaataatgagtagttactacattagtgtgggaagtatgaactgcagatccagttcctatgcttacagatatggtgcacatgtgaatgctcgctgttaaatgattaaatttacttgaggaagacaaggcatacttaattacttatcatgtgatatgcagatccaagttgttaggatacagtacagagttcctgaatatggatggacaacacaaaaggtctttcaattacttaatttcattgtgaatggaggtatttgttcaatttcacttgtagtacaagttacatgctcaactccctttgtgcttttgagtttaatgtgatttcaatctgcagcgaggtgttctatctttgcagtccgccgccaagtccaacaagtgaaccctgaggtctggacatctttgctattttctgtcttgtaattgttatgtttcacccaattggccagagttatattcttcattcatttttattccagatctttcagcatgttattcttgatcttccggggcttgcattcttcacaacgtatgcaatgttggcacttttctgggctgagatatcttatcaagcacgtggtctagagactgaagggcttagatcaggtttctacactattaatggtgtaatatatgtgatacaggtaaagcaagttatctctaaaagtctgtattgattagtgattgctatttatcagattttgtataattccgttagcattgcaataatcaatagtacaccctattgcacaagttgcggtgatcagatattttctttggaactgtgaatttcaagaaatttgttatagaccatgaaaagctgtgatgcgcttatccatttttccctgaaaagaaaagatatactgttgctagtatgcactgatgtgaaacaatgagatactggatgaaagtagaagggaataactttagctgttattgtgccacttatcttgtgatggttcagtgcttgcttagtataaaacttccgctaggctgcgtatctcaaaatactcactcaagtttatttcttcaggttctgctgtgggcgttgttgtggcacaatccaaacccatctatgatagtcctttcgaagttgttcattgcaggcctatccttttctgcagccttgggttttctgctatatggagggaggtaggactaagagtattactgaatgactcttaaccaagtttcatcaatcatagacagccaaattggctggctagactagctgcaaactatgtaaccttgaaccatttagtctactaataacttatacgtagaacagtatttcaagaaaatgtccacttattcagtgcttcatctagcatttgacattaacattcatttgccctgttttgattggcaggcttttcttcatgctgaagcgttttcctattgagtcaaaagggaggcagaaaaaactgagggaagttgggagagttgccactatatgcttcctttgtttcttggcacgatgcattatggtaaggttttcagttctctgatccttggatgagtttttgagtttcagtgttccatttcttacttgagcggttttgacactgcccaatttgttttgcagatgtgctttgatgcatttgacaaaaaagctgaccttgatgtgcttgaccatccaattcttaatttcatctattacctggtacgcatgaatcctgcgaccatattgtttacctcagtgaaatcaactttttttccccgttatcagttctagctagaaattgatttccattatcaataccagctaaatatattctgtacttgttcttatcccctgtttggctgtacttgcagatcgttgaaattcttccttcatctcttgtcctgtttattctgaggagaatcccttcgaagctacggctcgcccagtatcatcccctcaacagtggctaggggatgaaaacggatgaaaacatgaaagctaaaaatatggagaggcctgcaaagtgacacggctgcaagcccaggacatgaaaaaaaaggatgacccatggtctaaaatctctaacccttgttcaaaatgtgtatagatagggatctgaaatctgaagttttcccacaaccttcacctcctgtagctaaccttggtggttcaaggtgctgatgatttcgtgtaaccaattgttcctttgtaacaatggaagcaagtgtcctcgctcttttgagcgagcaagccaatgtttgtcttgaaaaattcttgggtaatccattggtaattgcttactactgataatatccgctttgctaattgctagcacaactcgaatgtgctggatcaaatggtaatccagacatccagtatcaacgaaatttttgaagttttgcagagtagcagcgtgatgcagaggtttctaccaactccgcttcgtcagaagcgaacgccgccacctaccaaacgcatgaatcatacgaaatttcaaaattgaagtcttgaccctaccaaactccgccattcttctgttctggtctgcaaatatttttttctctttttttttttcgataactactcgaggcttggaaatctccgagccgcgagcaaaccctagccgccgccatggccttcctcgccgctgcctcgacccgcgcgccgttcgccgtcgcggcgtcctcctcccggcgccgcaccgtcctcgccgcggccgtcaaggccaccggcggctccaacccggccgccccgcaccccgtcctctcctccctccgcctcgccgcctccgccgccgtcatcctcgccgccacctccccggcggccatcgcgtgcaccccggcaccgccccctcctcccccggaggtaaccgtcgcggcctcgcccgacgatcccgtcaccgacgacccccaccccttcgagaagctaatcgtcgagaccgccgcgctcgccagcttcggcggcgcggaggccgcgcgggcccgcctctccgccgccgccgccgccgccgccggagtcgtcggcggccgcgagcaatacgcccgcctcctcgccgcgcaggagctcttcgtggacggcaaggtggacgacgcgatcgccgccttcgaggagctcgcccgggaggaccccggcgactaccgccccgtgttctgccaatgcgtgctctactccgttctgggcagggccgccgagtcggaatcgatgctccggcgctgccgcgagctcgccggcgaagaatccgtcgccgatttcgtaatgccggtctcgccgttgccggtcgattcgtcggaggcggaagcggagccggattcgccggaggcagagacggagaagctgtgaccggaatggccggtgtcacggttggaataaaggtattcacttgactcgcgatacaaatgtagggagatattaaatggcgatgatttgataatttttcatgcaattttagatttcaaatactacatgattttacatgtcctccaaataaaatgaagcgatcatgagaatttgatcgtattgataaaacagtttccacgatgatcgcattgcttagaattgagtcatttgcaggaatatcttatttattcctcaatcctgatggtggttaatccaccgtcgcagtgaaatttgttggaatcgaccgatcaactaagctcatcttcactctttgctcgtctctggactctggtagctgatctaagaacgtatacaatcaacatgtatcgcagcgacaaatgatcatcgtttcagcactagcaggttaggcagagcagccacaaatttcaagacaacgttgttttacgctgtaggactccatgctaatgccagtgctcaatgctgatacccggtcacattatttgtccccattctgagcgaacacggtgaaatcatgtattgctgctgtctgtgttgatgttgagggaagttatctgtggatcacgtaatgcggctgctagtaacagaaatatctcctagatagcattgttggcctgctggggtaatgacttccaactgatgaatgtacaaatggcatgtaaaatgacggcaaactagccctcgtgctctctaccaggaaaagagagttgtctcttcctacttcccatgggattgtcttgtgctgcatagctatccaggcggtctcaactcttctgcttgctataggaccagatgagttctttctttttgccaaccaaattcaggacgagttgggctgttggagtttggccggagcaaaacacgttacgagattgttgccatgaggtgcaaggtggtctaacgtgcaagcatgtttgcagtcagcaacgtacaatttttcatttttttttcttcagcttttgatgtgtgcttaatctccttctattaatataacgccaagcaacctgtttggccctttgaaaaaaaaaaaaacacactgacgagacaacgactcaataaccatccctggtagttagaaactcgacttgctttgctggtaaaaggagcattcaacataaaaaagacaaccatttattatgccattcaaatacttcttatcttgattttgaaacatcagttgcatcaccaaacataaataaaaacacaatatttggttttcccgggcttcaccgtggtcaaagaaataacttggcccatgttagcaatcccgagcaacgttttggccgatcgagcaagttgccatggcaacgaagccatgcatgcaacacaagatgcagagaaagaaaaccagacgaaaataaagttgctaatgcatctgcataagcatgacacacttgaggacttgaacaattgacccacgacctcgatcaatcaatactggcggtggcggatcagcgacatccgggagcctcgcagcttctcctccacgacgtcgtcgagcctccgcgccatctccggcgacatgtgctccttccagtctccgacctcacccttcctgaagaaggccgagttcttgaacgacgaccaggtagccccgtgctcgccgtctcgatttgcctccacgtttctcatcctttccatactgcagagctccacgatagtttcggggacgccaccggcaagctcctcgccggtgaacgggcagccgaggaagccggcgagccgcctcacgctccccacgccgtcctccttgaggctctcgtaccggaggaacacgacctcctccggccgcgccaggctctccttccagtactcggcggcgtggtcccacataggcccgtacggcgagacgccgtcgcagagcagctcgaaggcctcgtcgaacggcgtcatggtggatccctctggtttgatctcgtcgaggtaatgccggagcgagacgaacgcgtccttggggtcgcggcacaggtagacgacgcggcacccggacgccttgaccgacgcgggcaggctcgagagcggttcgtgcactgccaggatgcgcggcgacggcatggcatcgaggcgatggcctggcgcgacgcggcagctgcggctgatctcgtagatggagtgcaggaatggcacgaggtcgtgcgggctggagtggaggagcgggtgctgcccggcggccggcgcgtggcggccgcggtgcacgacgcagaaggcgagcgccttgagccacgtcgagccggacttgggcatggtggcgaggatgacgtcgctggggcgggccacgaacgtgtcccgcgcggccagcgtcgccggcatcaggtgcgccgggtaccagaatccgccgtacctgcggtacggggcgctcccgagaccatggcaagacggtagggaggacgcgagcgcctcgtacttggcgagggcgttgcaccagccttccccgtcgccggcgctcatgtcgtcgcctgcgcctgcgcgcggcgagagcaggtgctcggtcactccggcggtggccatggcattcctgggtcttggaggaccaacgcctctatctatagatggccatgcatgccaatctgtatttactactccctccatcctaaaatatttgacgccgttgaccttttttaaaaatatttgaccgttcgtcttattaaaaaaatttaagtaattattaattcttttcctatcatttgatttattgttaaatatacttttatatatacatatagttttacatatttcacaaaagtttttgaataagacgaacggtcaaatatgtttaaaaaagtcaatggtgtcaaacatttagggaagtaggaagtacaaaatagtactccatccattccaaattgatctacatatttcataggtacatcaagactaagaaaaactaataattctctcatactatatttactctagcaacaaacttaatacatgcatcatccccactatttcctagccaatagcaaatcaatatattgcatgtgggttataaatacatgtgtgcatggatgcatgcatcaatgtctatttactccaatgcagaaataacgaatagacctaataaatgaacacaaatatgcagatcaatttgaaacggatggagtaattaactgggggtgcagaacttgtgcgtgttaaaaaattattgcaagatacacatcaaaaggtacgattatcaatctttttgcactaatgcgccatcgcctatttgactcttccagtctaccgacacttgttaataactagtgccaaatctctacttgcctctccaaatctgcatacaaaataaaacaggtgccaagcctaatatactactctttgtacgactgattgaatcatttccaatgccacggccacgccagcatgaggtttttttttagccatagtgtagtattttactagactagaaccaatctgatgagggtacaagatgtttgctgatcgacttgcacaaaagttggtgcctcttgtccgcctaaaccaagttgcaaattctgaccatacttttcaaattatttctatccagctagcagagtttctacttcgaaattctaacgcatggagagagtaagatacttcgcaaatcatggatagaatcatagagagccatgcctttcatcatatcaatatctcatcagaacttcagtacatatggttgagaactatattggatacatgcatatagctactagtatatatatgctttagttgaaagattccacatccgggagcagttcgatgacacaccggcgagtagaggatggattctaatctctcgggtggacgtccacccgtttcttacatgtcacctaaatgattatgaaaaaaatcaaaaaaaaattacaaggtaggttaatatataatatatcacttcacaaacatgtaagttcaaatttgacttttacgagtctatttcgccttcagtagtctatttcgccttggatttctggaaagagtaacggcggttagttactgtaaggaacggttactgctcaagcctcaaggccttagccaaacacagaattcagaaaggcgttaagctagctttctttcgcattaactaattaatttcactgcccaaatatgctgcatgatatgaaagagcacggaagaggacacgatcaaatggtaaagaaaataaatgtttaaaatgtcaggtttaaacgtaccccaaatcgcgagccgctaagacgcagggagtccatctcgagcaggtcgtcgacttcgtccagctcgatgacggccctaattatcgcattgttgagttctttatcctcgctcgcgttaaagaggcagcctctgttctttgcatcagccactatctcacgccaaatggtctttgctactcgctagagtatttgcattgccaagaatccaaagacagtgcctgcaaaaacaaaaacaacaatggatcaaacaacaaaatcggagtgaaatcaactctctgtgcgactgacgtaattggccgggaggatcgaggcaacctacttggcccgggtcagcgcgacgttggtgcggttgacgttggagaggaacccgaccgatccggtggtgttgctgcgcacggcggagaagatgatgatgtcctcctcggcgccctggaacccgtccacggatcgcaccttcacggtgaagcccccgtgcgtctcgtacgccttcccgagcctctcctggatggcgcggacctgccccttgtacggcgacaccacgcccacgcacagcttcctcccggtgtcaaccgactctgcacaaaccaagctatctgagctcagcgatgccatgccagaatgcaagggcatgatgcaatgtgtacctttgaacaatctctgaacgatccgggtcacggcggcgacctcgatggggttcatgaggctcttgtcgtgcttgcccttgctctccttgccggcatcgacgttgatgaaggagtaggagccgtacattggcccggcaaggggcttcctctcgtagtccctgtgtaatacgttctcgccgtcagatatcttgttctcgtagaagcttgagaccgggaacttgctgatccctgggtgcatcctgtactgcacatccaggaggtgcttcgggtgtcccagcgaactcagcctctcaaacaggctccttccaaactcagcatcttcacaaacctgtgaagaaacaaacagacaattgttacatagcatagtaatagagattgtgaatgttctactaatagagatggtgagagcttaccctgcttttgacaagtgccggcagctgaaattcatagccgatgagaacggcgtgacgaacgccagggagctggagaggtatcagtgactcgcactccttcagctgtgctgcctcgtcgacgacaaggagatcaaacgggcttgcttctggcaggtagtgcagacgggatgagctagaagctgtgcagagtatgcttttggcgttccggactaggaaatcttctatcgaacgcttgtcgaaaacgttcggaagttcaaagtgatcagataggtgttttagcttctgaagacactgagctctagcatccttcagctctgtactcacactatcttgcacatatgtcacgaagttctgaaacagtgagctgatgctgccatcggggctgagtttgaacagggttttcaggctctgttctgatttgggctccacaagtttaccaaaaaattttagcatgtgcagggcctgggtcatgtaactgaaattctctgcagttgtagctgacctggggagataatcacagaaagtcttgacacaaacattaagatcattctcaagccgtttgtaattacttatgaagtattccttgaactaggaagatagcccgcgcattcgcgcgggcatgtattgtgggctgcatgtttcaaaaacttataagaacataatattaaccgaatagcactgtcacacttcgaagtatgttttctccacaaatattattcgttggtatttgttattttccacaaacgtgttatctaacaacttaaaagtgtttcacattgttgtaatgtaagcaacatgttgttaatcatatggtttaaaaatctttgtggcttttcctaaatatttatggctgaccaatagctagtctccaaaatatgctctaaagtaatttatttcttttacttgttaaatatagttaatttggatttcgactcatgaaagtttactgcaaataatctaatgaggtgcactaataaaaaaatagtttagatggtatagttgtttaaaaatttctatcacgaaatatgttttctatctaactaataagcatgaaaatagggcaatgggagagaaggaaaagaggaggcgaggttgtgctcgtgcatgaggggggagggcgcagacatgcacatgtacggacataacataataggacagctagacaggagggatgggattgggccttttctctttttgtctatctattaagataaatctaatggtaaaaaaataatgagaccatggtaaaaggcatatttcatataaattatgagtatatgtgattttttttaattatttcatattttattaagtcaatttagatgacatgtaaaaaaagtagggatgttgtctcttgacaaaacactatttaatagtcgagtttctaatttttgtttgacattgtagttttaatttacatatgaatgtttctagaataatgtggatgagaggaatggggaggaaggggaaaagatgtttttttatttaaaagtttaatagagatagatttaatgttaaaaataataggtttatcgatttaaatagaaatcattgattaaatgtttcttccgcagtatttgtagtactttttataatttattagatgtgccatgtgatgagctagaaacactataaaggatgtataatggaccattattatataatggatagatctgtatgatattttatggggatctgcttaatgaatctttataatataataagcattatatagtaattatttatatactaagctgctagctagaaaatatggataataaagtgagtaaggagagagggtagatcatttacaatggcatgatatgtattagtatttagttatcatataaaggatatgagtttatatccaaatggtctatttcttatatgtatatacacaccaacacatggcataattgaaatcaaatatattataagaaattataattatttaatattaatattttaatataaaaaatttgctacctataaataaatggagaaaaaagagagaaggtgggggacgtacgtacgtggtttttttttacaagcgtacgtacatagtttggtgtatgtacgtgatggagcggatacgaatgggttttgagattttttttccttgatataagatggatctaatggtgtgaaacgatgggtccaccatgttaagttgtagcgcccgtttcgtcgtggcgcctagtgggaaaactatctcttaaaaatcctaaatgcgaaaattttctccttgtttgttgtccagtgtccgtgccattccagatctcaattccccaatccattgtcgaaatccaaaccctaatctcaaatccgtcccaaatcaaatcctctcgaaaagtctattttgcctccctcgagttcgtgggccaatctcttctccccggcccatttcctcctcagcccaactctcctctcccctccatccttgcccgcacatgtgaggcacgtgcgccgctcgggcgctgagcgagagagagactctctctctctctttcacttctccctccctctctgctctcgttgccacttcccgccgatgccgctcaaatcgccgcgccacccgttgcttcccgcgcgcgcgcgccaaggtggccgaccggcaagtcgccgccgccatcagcgcctgctgcgcctgagcccgcgtctgccgccctgtagccgcgcccttccaaaccgccccaccgtcatcgccgtcgtcatcgacccggccccgctactccgcgcgctagcttccaagggatggaggcagagctcctcctcctgcctcgtcgccctctctccctccttcttttcccaaagaagcaaggggcaagccccctttcttccttcctttttcccttttctcttccaccaccggcgtcatcctccctgtcgctgttttggccgctagccgggacgccagctcgctggcttgaccgcccaaggtcggttttcgaaccgacataaccgcccaataaacccgagcccctcccctaaacccatctccctcgctttcgccttccgccattgtcgcctcgccccgtgccctgttcgtcgtcgcccttcgctgtcgcgtgcgccggaggagccggtgcgcgctaggatcggaaggggactccgggcactcgtcttcttcctcttccccggcccgaggccggagagatcactcccgtgccgtcggcctctcgtcacagcgccccgtctcgtctcggtagaacacctccctgttctccctcctcgctcttcctcctccccttagactcgagcagtagcttgtgtagcctccccgtagctagcctgcgtcgccccgaccgctgccgccgctcgcagtaggctcaccgccgtcaccgccgtgctcggtagtagccgcctgtcgccggccttcctcggcgatgttccgtccaatccgacgctagaaacggattcccggagtcgcgtagatgctctagctcgcccgaatcgatctcccgtcacgccatcgctgatttccccctttctcgccgccggttgctgccgccgcaatccgccgccgtcgagccccctccggcgaatccgagccgttggctcgctccctctcttttccccttgtcattctagtgtacacctcgtcgccctcgtcgtcgcacagcgtcccggagaaaccgtcgcctcccgccgtccattcgcggccggcgccttcgtctttctcccgccggcccgcgtggcagccacgaaggcgccacatcggcgctagctcggccggaacgggtcaagccgaccccggtcagccgctccctccgtccccgctcgcgtgcgcgcggcccacggagagctgagaggctgcgcgtgggccacttgcgcgccgcgtccaccgcaagccacacgcgtgcaccgcacccaccccaaccctagcgccgcgccacatgcacctcactcacggtgagccgagccgccgacaagcgagtcccactcgggaccacgcgaggtggacccggcccaccggttcccctccctctctccccgtgcgtgcctttgggccgccttctcgagcccgccggcccattagctcggccgagccgcgccccttctctcgggccgcaccctagccgcccgagggaagtctgttcctcctccctctttcttttctttttcaaagggtttaattaaatccgtattcctttagaccaaaaatccaataatcttagaaattcaatatcttctcaaccgtacatccgtttgactccgctcaacttccaaaaatcctcaaatctcgagatctacccaatggcacgcttagaggtcaataatagggctttaatttcgctgtttgttgagtcgtctcgttcgcgtgtagcttccgagctcgaagacccagagtgcgcggatttcgaggatcaagcttaagatctcgagcaaggcaagtcacctttgatcatcttgcacctataatttaaatctaagtatttcttttccgcaaataatacatggataggattaacacaagaaatttggccgcggcttgcgagatagcctaccggcccccatcctaattgctgcaattagcctccttgaattattgaacacttaaacctcctttgtcgactgttgtacttcgatgtacgggccttcgggcacgcacgtcggagtcctcccctcaaatttaaaatatccaacgatgggtaaaacttgggttttacaaaagacttggaaaaacccgacgcctgggtcgatgcttgcgaactaaatgaatttccaaaaatcgcagaccgggggacgtgccgggagcacggtttcctgctcttgcacttaaggaccgattcctttggaatttcatctgaacatataacaagtacgaccacatgggtggaatgggacacccctggctgagtaattagctaatcaggggagccttgatgccgggagacaagtggattcgccagggtggtgtcggggaggacccctgggcttcctggcatagtatggtctaggacctaacctgttgttggtctgggacccctctcgtcggcatatggtaaacctgtgtcggctctcgaaatgccttgtcatgaaagccttaaggtcaccagacgtggctgttctccatgggctgggtgatccgggttagtaatgtcgtgtgggtaaagtgtgccccctctgcagaggttattaaactgttcgaacagccgtgcccacggtcatgggccgatgtaaggtgattccttagtgtagttttgttcgactagtgcttggtgaaattgctgttgggaatttgggttcgatgtttggaacatctgtagctgacgggatcagctaggcccgggtggccatttgaaagttgtggccgggtgccaatcttgaatcaatcaaagactgatacattgcacatactctgaccggacgagatgtactgtctcatccgtgtcgtttgagaagcactcacttagttgttttaaaaatgagtttaactaaaaatcaattgtaaaaacaacagcctttcctttgaagccttcattaaacacataattcccatgacttgctaagtactcctgtattcacccttgctctatataaataatccccccagtggctgaagaagatgagatggaccccgctgacgaggagttcttcaggagcaagtcggctatgatgagttttggggtttcgatctggttcccaagtcgcgcctgtgatgttaggttcaagtcttggcttctgctttcctcttttgtaatgcagttgtgagctcggggtctgtccgcagcccaacatgactgtactcctactctataataaagagacctctgttgctgtgatattctgtcttcctgtgataccagctctatttcctgggattggtatcggttaacaggttaatttggagcgtcacaggctggttccgttcggggctagttcggggcgtgacataagtgaaaactgatggttggatttttattttttcctcataatttctataatttgttagagtgccacatgacgatataggagtgttcgtaggagccacatggcggtttaggagcgtttgtaggaagtttaatggacttttagtatataatagatagatggcattattggtatgaccttaggaacatcctcctttacctgctttttatcattctccttgttcttgtttttgttccttttcttctcagcaagatcctcttctatctccctttcaatttgctccacatatgaatcatactgaaccagaggttgctcaagaatccgtatcatggagctcagactgtgcacccaccctgaacctggactcaggcacttctgcagtcggcgagcgcgcttctccaagaagatctttgtcaggtttccgtccacgttcatccgatcctcatttccgaacagcacaacatcactcaaaaaacaggcttttccactgccagcagaaggatcctcgaggagattgaggacccgagatgcgacctcgacgacggcggtgttcgtcggagcgcaggtcagtgtcctgtggttcttgaccagcattgcccacaggagcgtgctgatggtcttcgtcttccctgtcccgggaggaccccagatcaggcgcacggaagagctccgctgctgcatcgctgacacacagtctagtactgccaccttttgcgacttgttgagcttgaaatcttcaaggccaccaagtgctctgtccggtagatgtaaaggcagttctgaagaatatgaacattcttggccgacctgccgtaagaattaaagaacatgcataagcaccaaattgcatgcaatggagcagatatattacatggtaatgcatacctttggattgcaatttactatcatccgaatgatgtcagtgttcctgacactagcaaccaccgcatccagttcactccatatgcgattgtacgtcgtcatgttgatcaggaacaccgcgaagagagacgattccaatccaaactgctgctcaacatgcttacttgacagcctgacgacggtgttgccttcagcatcctcggctttgagcaccgaggcaatcaccaagggcttctcaccgcgtcccaggtcagagatgtgcctcggtttccgatccgtcagcaacagtgtatccgcctcctttggggcgtaaacttcctgaaaaatgtccttgggatcagctttattggcgaaaaaactgtatatgagctgctcgtctgagcaaagcttaatcctggtcacttcagctgctggcgcatgcttgatgccttccagtgcagagcagagatcagcacgagtctcttcgatcagcggcacggtgaatgatcccatgtactctttcagcgaggagaaaattgtgggtattttcttaacctgcatcaaggcaagatcatccgcgagataatactcagattacagcgagagaacaagctggataatgcgatgtacgctaccattacagtggaagagattgtgtgcaaactgcagttcatgggataaatagttattccctccatttcatattacaggtcatgcaatctttttaagttgagtaaattttacaaaactacacgttttgtagtccaagttgcagaaaaccacaaacattttgacacttggcacttaagtacatatattttgatagtgtagtttcacaaaaccacactatcaatgaatagattcacccgtgagatgacgtgactgtttcatataggacgaggacatgtcatcctattaacagccatcgcacgaaattaataggatgccacgtcttcatcctaaatggaacgaccatttcatctcacgggtgaatccattcatcgatagtgtggttttgtgaaactaaactaccaaaatatatgtacttaaatgccaagtgtcaaaatgtttgtggttttctgcaacttgaaccataaaacatgtagttttgtgaaatttattcttttaagtttgatcaaacttatactacctccaacacaaaacatatatactaataaaatatatttaatgttgtatttaatgaaactaatttgatgtaaaagatgttaaatttttatataaatttgatcaaacctaaaaaggtttacttataataagaaacggaggaagtaacaatctactgcttggttacctttttcttgagtaagtctttgttgagcacatctttgagggaccaagagaacatctgcttctccaactcgctctgcgaccacgaactgtacctgccatcttttgcccttgcggatctcgtccccgccccctgctgcaccagcacgacgtcgtcgtcgtcgctgtcgtagtagtagctcatcgctaccagcacgacgtcgtcgtccgtccggcgagcgaaaacgtttctggctccggttggaagctttgcaagtgtaggtgatgatctgattctactttctaggctgcagcaatgcgtcgaggatttgtagaggcacaagaccggtgggattccgtctgcgaattaatgtttgagttggggtgtgtagggtcgatccacccttccgtctctcagtgtgagtgtgtgacccatcgttctgagaagagaagcgcatgcggttgcattcgctagtgaaaaggtgagagggtgtttggtttactaggagcccaacaagtgaaatgcaatttactgattgttcaactgatcgtctgagggttgtttttctttatctattataaaagtttaagatgtttttactagaattttggtacgtcatctgtgtttaaaacggttttagttttatgtttcggtttaatctatatctctacgacaagaaatttccgacttctgtaaaaaagaaagaaaaagaagtccgactcaaaaaaaggtaaataaagaaagaaaagaaagtccaacttaacgagcgattttaaaaagaagcttacatcgtcacttaactagcgattaaaaaaaaagcttccgtcgtcgtcagtaaaaaaaaacatctcttgactatgtagaaaaaggaaaaaaaatctcccagtaaaaaacaaaaatgttcgtttggtttttttggcaccgatatttttttccttttttctttgcacgcaaaagagttttttatatgcacacattaaggtttttggtttttttttcctttttttaatccgatctattcaccgcgcgcctctcgggtactcttagtttttttggtcaatcttttttatcgccggtttttttctcccatgcgctagctttttgtttttctcatccggttttataatctcatctgttcaccgcacgccttccgaggtgaaccctagcgctacgccaccgccatatcgattgtatgttttctcctccaatttgattgaaaaatcgattcctcactcctctcatcattttctccatgattttccctttgattcggctttaattgtcggatttaatcactgttctacaggtgccgatgatgacggcgatcttccttggtcatttttatccgagttttacgctttgatttttgggtaaaaagagtagatcgagtggattaaaaaccctcgaccaattttggtttaccaagaaagattcggctggatttgattgggagatttgctctagcaaacgtgtgtgcacaggattatcttcgagaggttgaagatggtaatcacatttgaaagttgaagatggtagggtcggaaaccggtagcaaatacagaaacattaaattataaaaacatatatttaactttacataagtatgttatatgtatacataaattcaaacttatactatataaattataaattaactccattttagtcatgcacaaaagttagagatttgattgaagagtcaatcaatatgtaagctatgggtcaagtagagacatgccctataaatatcgacatatttagaatacggtaattaccatattacaagaaacgataatttccacaagaatacggtaaatacggaaatgatcagtataacagcaaaaccatttctgttttcatttccatattttttaccatttccatttttgtttcggtcgattaccatttccatatggctcggccggtagaaagtcgaaaacgaacgccggtcggccgggaattaccgttaccgttttcacccctaatgtaaggtcatgtaaaggctgtgttcgattgtggggttcccaacccctctcccgcagcacacaaaacgaagcggaagtttagcgtataattaattaaatattagctaatgatctataaaataaattaatatttctatagaatattttataaaaaaaatacatcgtgtagcagtttgaaaaatgtacgcgtgaaaaacaagtaactaaagttggaattcaccaaagaacacagagctagagactaaccaagcactatcatattcccaaattttaatagcatagtaggtggatctaggaaggataaatttgtcttttcctaactcagagcttcagatctatttttgaatttggaactctacgatacaggccctaattcactcatatgtcttgcacttcacattgactttttcacaaagagttaggacctcatcttttcacttatgcttatacttatgagccaaaacttgaattttccaactttaaaattgaagctgatttaaggttttttcatcgaagtttatttttcagcttttacttttagatcactaagaacacatatataaaaattttattcacaaactacttttcatttgcaaatatgccgtttctcttaaaatctacgaataagcgaaatgatgggaccgttaattttctcgttctgtgtgtgtttggtgtcctcaatgtcagcctctcacctttactattctctccgtttcaggttataagacgttttgactttaatcaaagtcaaactgttttaagtttgaccaagtttgtagaaaaaagtagtaacattttcaacccaagataaatttattatgaaaatatattcaattattgatttgatgaaactaatttagtgttatatattactatatttatctataaacttggtttaacttgaaattgactttaaccaaattcaaaacgtcttataatggggtatattatatggcaatgctatagggtggctaaaagctaaaagtttcaaattttatttttctacacacatggcttatgataaattaatggctgttgtttaaacttaattgctcatttggaacgtaggatttgaaaattgtagcaataagaaaattataggattagaataccacgtatggacaaatcctgcaggaattgaaaatataggaatctagcacatatcacgtttggacggttcacaagaatataacgctaggtatctaatggaattaagagagaaaaatagataaagagagaagaacaagcattggacttcttaaaggaaaaaaaaggtttgagctcttggtaaaatttcctatagaattagtgcataggatggtaatccatatgaaactgatatactaaaaaattctgtttcaaacaaaacatatagaaaaaagttcctaagatttaaaatcatttgaatttccttcaatccaaagttgactaaaaacttttaaagaccaaagtatgtcttaaaaatatcaattgcggatgtcagtgtaggatctgccatggagatcgtaaggttccaagcactagtaccgatattgcaaccatatgagcaatcattgagtctccattaattttttctgtcatatactatctctattataaaatatagcaacctctaaaaatacgaatctggacatgaagatttgtagtctaggataggtcttatcccatcgtttaagttgctacattctagaacgaagggaatatctattagaagggggctatagttttgtatagtttgtcggtccgtcttatcctatatacctatacaagtcatccccactaagtgcaattaaaactaattttttgttctgagagtaagccacgtcaccttgattcattccagccatcggattgcacataaacgtttggatagcaatcaatcaatcaactggggatagcaatcaaaataaacatttagcaacaactaattaaagaggcccacctagccatctcttaatttcgaaacatacagttggaataccaacagcaacacatgtagtagcccagcagttataagctctttaatcttccattgaagttattttatctcctgtaaccggtgaatcagatgaacagtcggtcttcatgcctttatatactctctataattcactgggactttgttctcgattgatcatctgtgcttggcagtctttccatgcatctagttgatttatttgcccactcctctgctcatgctgatgcttcaacagatcaacatgcacaatccgctttggtcatctctctcttgcttgcttgctcatggatttatttttctttttcttactaatatcatttgttgtttagttgtagaatctgaagagaagaaaagaagtagtagtttcaaatatttcttaactttctgttctttgtgaaggttgcagatcttatagagagaattgaagggttggtgcattactatattcacataccggttgaaataataagaacaatttttttttcagttggttaaaataaataagaatacctttttgtttcagtaggttattgacatcttcgactgaacttttgaaagtttctacttcattaaaactatagtttggaataagcaattacatagcatctttgtgtaatcacgatgacgtatattgtctaccatttttctgtcttgctacatagcatagaacaatctatgttagttttttttttgtaataatagaacaatctatgttagtaccattcaatttattgcatctgtgttcaattggccttagttctagtaaaaggaattggcctttcactagacaatcagcgtattctgttatgattcaaatttcagttgcttattattataacattggtgaagtgttcagtgtataacaatacaatcattcatacctaattttttatctttatattactcttgtatttccgcagcaacgcgcggggtgtcatctagttagatattcttggatccgctcgtaactgcgtttgaattgatgatggaagtttcaaagtactagtgttatggatcagatcattaacatgtattaacccatattggtacactcgtgcacacacgatgggccctgtcttaaactatgcgaccaggatgtatcaagacaagcagttagcttaaccactaagcttagctttgaactcatcgatggcgatgagaacttcaagtcttcggtcgtcaagtcacactcaagagtctcacgttatacgacagaaaacacgctttcaaacatggaaaacctccatctcccctcgggcactcgaaacacaccaaaaactcccaaattccccctacttcaaacgcgtcgatacccaaagagagaaaaataaagaggggaaattcaaaacctcccccaaaaccctcgccccaccgccgccgcccccgccgccatggacagggcaccgccgcgcggcgccccgcgcgacgccgtcggccagcggtggctcgccgtcttcgtcttccaggccgcgctctcagccgcggcctccgcgctctacctcgccgcgtccccgcgccgccgccacgcccgcctcggcgtgccccggggcctcctcctcgcgctccacccgttcctctccctggccgccacggggctcctcgcgctcgccttcctcgtctccgcgtcgccccacccgcgcgctccccccgtgccgcgccgcgccctcgcggcgtccctcctcgccgccgccggggcgctctgcgtgggcgccgccgcgtcgctggtacccgaggactccgggtgggcggctgttgctgggatggagttccgcggcgctgtgttgggagccgtgttcgccgcgcactatttcgggcgtcggaggtggttgctccagttccccgttgtgcaggtcagtgaagtggggaaaagtagggttctcatctagaatggcgttccgaatcttatcaaattgccaaatggctgtagctcctaatagaggtattgcgactatagagatcggaattttaggtttaaagttagcttgttacgattttagattacctacttaggtatgattgatggtgctggtgattttttgttattgaatctaagcatggatgtttttgataactgtggcttgtattattggtatgttgggtctaagattctttgtgatttgttccgagtttaactggttcccacttcccactagagagcttcatgaattgatcaaatgattagggaatagctgctagcacctctgtaatattcaggttgatatacattggacatacatgtgctattctcagatgagaaatttgattatcatgtttgataagacactatagcgctgttttataattctccagaatatacgatattcagaatccacatgcatgagctgtagtttgctttgatagttattgatagagaagtttttatccatctagatcttttttggggagacatggtttatattgatctaaattatatgtgcaattctctgatatctatagctctgtttggttaatttttttgcccttgcgattttttaggcttgcatgttgtttacttgcaatccttcagcacttcccaccaattttgccaattgtcttacttgctttcttaatttgttttttgtccagcgacctccgttctatggtttgaaaatggggcttctgccatctggaaaaagggctctgaaggtgtcacttcaggccttcttcctttcctttatcttgattttcgttcttcctcagcaattcagaatcagaggatccattggaagccaaattatcgcccaaatcggtatttttataatgagcactgccgttgccttctgttgggaaataagtcatcattttgtccaggtttgttcttcacaatccaacttcaaaggaaaaaagatgttatatgatgtacttgttgtattgcctggaatgcggagattgacgtcatttcctgaaactttatagttcataaccataattcaactgctttcaacaaatttcaggttgtgcatacaagaaggtgcagtttcgctccaccacagagcactgctgctgcagagactaatcctactgagtatatcctagaaacattggaactgagtgatccaagatcactaatgcagtatcttgcataccaagatttgtgtgctgtatctgaatgtaacttagaaccatggcgtcgagcggccttctttgaggaatctggtgagacttacaaaagaattgtgacagcttgtttgaagccgcttgaggagttcacgtcaaaaattgctgaagctcttgaagggttttctagtgagaaaccagaattgttgtcacaacagttcaaacttgctgctgcatttaatgattcacaggtaagttactcatcagtttcttctatctgttttacctcttatgttgtgttcggctgttttcctgtttttttttccaaattgttaatcatgtttgcatttgtgttgatatagaacatgaaatggttcctttgtttaggagttaagaccaaaaacagttggatcttactgtagaatcagttcggtgtttactgtttgttttttgctttgtcactcatgacagattatctagagttgaattaaatgtacgtactataatcttaactgcaccacattggttagtgatacacatacataatgactagatctgcatccaggaagatctgcttgtaaaggttagtatcatagtttgaagtgttcagacttcagacatcttaggagttcattttgagattgatagcttgtgagtgctgatgtctactttatttataaccagtctaatttgtggcaacacatttagttctagtggatgataattggatatttagtgagtgttaactatcatcatgtgagattgtggtctctaaaaaaaattgcccagcactgcaacagacaatagcatatgcactctcctgcagcaattttggacatttgggcgtgtgggatgtcttggtattactgtcatacattggtctcacgtggatgtcctgtattctatttcattggtatagtggaagtgaataatccatttatgcttcttattttagctttacaattgagcaagtttaagtttggtggttttggtctttagcaggtgaccattaacttaggaagcatgttttgcttcagaaaacaggctagtaattgtggtaggaagacattgttttatttgacaaaatcataacagtacctttgcaactacttctgtagttggaatattttttggtatttacaacataattgaacattttgtccgttatggctagaacacgtagcaccctgactatggctgaaatggaggctgccagcaggtatgttgggttgctatctggaaccatgcaaaatagcattccatttgttagctgctccagctttttctgtatgttgggtcaattaggtcatgctttacccatatttttagtttagcatcagatggccgttcatacagattataaactccctcctgtcaagaaactagaccgtttggagattatcgttttgttcacaaaagcaagacatctggaaagatttggggtcatttggccacctatgccccttattaaatgactttatgcatgctaagttgaaatttctagaggaagttaattgcgacagtattatgacaagtcactgattaatcattccttggtagatgcaaacaagccccaaacattttcctttgctgactgaagggagtattgtttccacaaatttgtgattttggtagcattccgaatggttgaattgtcaacagtgttgaccacgtccagactagttcctcaaatgtttctatgtttgataattcctgatgaaaagttaatgtgtggcttgttacatgtagatatgcacatggtgcgctcggacattgtcatctttaactgcacggtcacgccaagaagatcggtatggagttgctcaactcacaggctgcaatgctgctgtgatgtctactttgctgtctgcgctagttgccgttgaggcctgtttggggaagaaaactaacccacaacctgcgcactcactgggtccagcaagcattaagtgggctaacttttccaccgggagaaaaggcaatgtaactgccattgcaagcacgcaaagaggtggtcttcacactaaagctttttccatggccgatgttattcgaacttcgatctatcagatggtttcagcctttgagcatgacatgcgggcaaatgctaaagcatcaagtttggagaagaactggatcagtgaaggaagaaaacctgtatttggttcacaggctgtgttggttcagaagctgagcctgtttattgagtaccgtgctgtctgaacttggcatcctgtaccaaatccttaccggccatttaaattattcttggatgaaggttatttcgttttggatttggatgggagagtttgtttgactatgaatctttcgaacagattatgactctcattcaggttcagggggccaatattttatatcaagaacgacttggatagtggcattttctgctcataatcgtcaggatgtaagaaagacatgaattgttatacctatggagagcttttcaaaagataattacatttctccactgggaaaaagccacgctggttttgaaaaactatgccggtgaacctgctgtatactacttttcattttctcaccctggagttgtaatctgtatgttgtcatgggagaaggaaaccagagctgtgctgaactcaataggcttattggaattttcgttctcacaatgtaacttgtttgttagtcttacccacttaacagcttcacctgaagttctagtcaaattctaatgctttcattgatttacgtgatgttgtcgcctaatcttacattttcattttgggttacttgttacagctttgagccatttgaaatttgagttggcaaaactcccttgtgctttttctatgacagtttcatgatttcatcttggatcaaaactcagaaggcacatcctggaagaggcgtactttctaattgagcattctaactatccacctcatcaatcgtggatttatgttacaacaagctcacccaacaaattaccacggacagtggaaatggaccaccaaacagcgaaaatgccggtcattcagagtacttatgtacagacgggtaaacacgttgcttcgactgcaactatcaccaaactttctactacctagttaacgacgagaaacttagctgccaccccctccggcctcgccggcgcggccagcggcggccgcctcggcgaggcggcgagcatcgagagggcggccctcgcggtcgccttcttggcgccggcgacgacggccttggggcaatgccggcgcggcgacaggacgcgcccgcggtgcgcgtccaggcctcccccgcagctctgcgacggcttgaggcgcttcctcggcggcttcgccaggtcctccagcgaggcgaccgccgccagcgacgcgaacgactgcgactttccgtcgaagaacctcgacaaccccctcctgcaaacgaaaaaaatgaaaaaaaaaaacactccggtgtcagctcagctagctcaaggatcatcaaagatcaagaagaacgcgaccagctagagcaaacggcacgcacttgaacgggagctgcgtcatgaggtcggacatctcgaagcggcgctccgccgagctggaggaggaggaggagctcgcgtcgtcggcgagctccgaggacgaccccgacgaccgcgccgagctccccgccgacgtggacggcgacccgatatcctcctcctgctcctcgcaatccgccgcgccgccgcgccggcaccacgcgtacgcgtccatgtatatatccccaactcttgactctccccgaccaacgccgatctcagatcaaggcaagcgaacgcagctcagatcgatcaaagcaacaaccgagccgtgtcgtcgtcgactggtggaaagaaggcagctggtacaaattataaaggtgtggaggaggaggaggagaccgtggccgtggtggcgaggtgagtcactgctggcagaggaggataagaacgagcgagaactgaagtagtagcggagagcgtacgcgaggcgagcggatgagataaaagaagaaaaaaaacaccggtcgtttatttgtttatcgcgtgtgcggcgcggtagggaagggaaggagtaaaaactaaaaaatagattcggcgttatcgcttttcttttgggttttttatccgctgggttcggcgttcgaattcttgctctccgttttttttttctttttccggagaacggggggagggggagagagtggataaggcctccacatgcgtatacgtgtgttcccgcgcgcgcgggcgcatcggaggccacacgcgacgcgatgctgctgcgtgcggctgaggctataggctagcggagtggagtagtagtagcgagtgggcgttgcttgtgattgggggaaacggaggagggccacacgctttacagccacatctttttaacctaagctaatgcttagtactcctatcagttaaaatttttttttaaccaatttaaggttattttatcgaaatttactttctaaattttttgcttttagattcttaagaacaatacgtaaatgtttattcataaattatttttaattttcttttgtaaatactacctccgtcccaaaataagtgcagccgtgaatatccgtgcccaacatttgaccgtccgtcttatttaaaaaatttatgaaaaatttaaaaatatttagtcaaacataaaatactattcatattttatcatctaatagcaataaaaatactaatcataaaaaaaatttaaataagacaaacggtaaacgtgaatagtgtaaaaccgtatttattttggaacggagggagtatgttattttgtttattcatgtataaaccaaacaatggtgccattaattcccgcctgcgccacgcgggtttgtgcagtccacctgctacggattttacttggatagtgcgggctgtgcggctactactacaaatgtgtgtttcgatttaccttgcgcgcgtggcgttcccatcttgttcttccgctgttgctcgtatagtggagtggactgctcgtacttgtggagtactgctctcttatatttaaaggatatatcttaaaatgtgtatgagctttgccctaaagcccattacaaaaatttgattatcaaacaaactaaacgcacaacgagcaacggcatgtgttcattaatcattatgttagtactttttagctagaagcctagaaccgcatcaaagtggcaagatggctttagcctttagttgtccaacagcagtagtatcgatggtacgtaagcttaataggacaaagacagaccatatgtggcatccatttccttttgtctaaaatatgtccccttttgctaaagaacaaatgtacatttgcaacctttctcaaaacataattaaaaaaatgcatgctatttgtcattgtatgatggaatatgccagatccggtaatctgcgactattataagtgtggaacaaacaacttgctactcctttgcaccactgttaccctcctgacagtgaaagaaacacaaagaaagctgcagctagctgagatgagactgtctctaatttaagaagagattattgacatagtctccaaaaaaaagagttaaatgaggatgattctctgtgtacttatcgcgcttcattacgagatgccgattgtgcaaagctgactcagctgacctggtaattgcccccctgaccactaactcgtggtccaatcttcacttttggtcttcgttgtatatcctttcaacaatatggggtacttatcctttcctacgacttgaatttataagctatatggtgatggttacattgggtatgaaatggatatgataatgaaagttggctctataatgagtccatggttttgtttggaggtgaggtgtgaatacactaagttttttactttctccgcttcatattataagaatttataacattacccacattcatatatatattaataaatctagacatatatttgtgtctagatttattaacatctatatgaaggtggacaatgctagaaagtcttataaactaaaacggaggtagtagcttctaacttctaattcattttcttaattttataattacatctttactcctttaaatgtatcttatggttgtgctggtgagtctgtctcaccaccaccacccaatatttggccccacataaatagtattcttaaaatcttgaggatttatattaggagtcggaaattctaaaacaagtagagccgctatggcaagggggaaaaatgtactactggtagagtctacttgtgattaattaaagtaggaaagcaggattagtgcgctaatcgattaagtcttatccgccgctaagtcaacagagtactacactactaatgaacttgcctgtgataacaaaggtacgaatccattcgttcgttctcctagtcacacacaagaggtagtataagaaaggcgaaagcaagtcctttttttgcgacagggttgtaatcttcgggcccaaacccgggaatgccatcattctgatttctggggggcaacattgacgacaccatgacgggttaattaggtaataaaataaactcgaggagttcgcaagcgaaagcatcgatcagaagacgatgacaatttatttaccctttgcctgacggtaatcaacgccgatcaactgtagtatactgaaaaaaatagagagaacattttgacacccaacgcgcgggaacaaatcgaaatgaagtagtatgaaactgtgcagcactcacggaccaatcaccaatttgagtctccgcgagaaacaaacaatcaccaatttgaagatttgtgtattttggatggatttcgggcatggtgcagcgagccaagctgtttttagggtgggcgcttgggccgtactgcacatttcatacatacgggccaggctgaaaaggcaagcctagttctgggctgaaacaagcccaccattgcttgcaacaaattcagctcaacatctcagaacaaagaacgttcatatttcaaaatccgaatcactccagcaacgaaatgagaaatacaggagacaaatttaattttcgcaaggattagaatcacatcatttcatctacggaaatgagcaagactgacaagtgagtgagtgacaacatggagtaataaaccgagtttctaagcatcaaactgaagattgtgtgggcttgtggcaatttatttgccttcagctaacagtagcaacaccaaccaagcatggtaaatacgtacgttttgactgccatttcccacaaacaaatcagcacgaaatcacattagcattcaagaaccaatcgccaattcgaaactttgttgtgttttttttctgcagcatagttcgaacttcgtatacagagatactaccactattctgttgcttttagatgattctctcaactactgtacgtgcttcaacaacagcttaccccttgttgcaaattcagatcagcattcacatctcaaatcacagcagcaacgggatcagaaatgcaggaaacaaataattttgctacgattgaaatcgtaatgtcattacatctatggaaatgagcaaatcacaaccaggagttgggatactactaatcctactactaaaaacccacccgtggcacatccgggtctctctacaccagcaaagcaaaaggacacaacaagagctaaaacaccagcaacagccagtccaggaggcggcggcggcagaggcggccagcgcgagggcgagggaggaccggagggctcagccgccgaagccgtagagggtgcggccctggcgcttgagcgcgtagacgacgtccatggcggtgacggtcttgcggcgggcgtgctccgtgtaggtgacggcgtcgcggatgacgttctcgaggaagatcttgagcacgccgcgggtctcctcgtagatgagcccggagatgcgcttcacgccccccctcctcgccagcctccggatcgccggcttggtgatcccctggatgttgtcgcggagcaccttgcggtggcgcttcgccccgcccttgcccagccccttgcctcccttgccgcgcccagacatcgccggagaccgagacgagaccgagacgaatccgagatggaagaagagagaagtctactacttggggagatctgaaatcgctgtggctcttggtgagatggatttggatttgggggtggttttatagaattttggggggattttgagtttgtgtttgggcgggagaatttttggggatagatttgcgcttttggtgggtgggtttgggacgttggattggtggtggacgggcgcgatgggttggggtgtgtttccgtggattgatgacgtggtgggaggcgcggggatggatccgtgggtggggggaggattgccgttggattgaatcggatggtggggaagctcgtcgttgcgagtggagcggatcggtgacgtggcaatggttctgtggccaggcgaggaacgtgggctgggccgggccgccggttttagctcggtctcctgatcagtcacgaggcccgtagcgtcaagtcaccggcccaccaccaccgtccggcgaataaacccgccgcctctcgtttcgccgccgccgccgtcgtcgccgtcgccgtcgccatctccaggtgggtgctatagcgataggctatggctttcgcgccgtccgcgcggagggtctcggccgtgctgtaccactacccgtgcccggacggcgcgttcgcggcgctcgccgcgcacctctacttctccgccgccgcgctccccgtctgcttcttccccaacaccgtctacgaccccatcaggtaaatcttctgtaacttaagagatcgacctttgggccttcgaactactagtttctgcttccaatgttcttctcctccataggttcgtttgaagagatgtgaaatcggcaggaagctgcaagcgagtacaactcttcctttacaatgtctaactgtagtttcagttcgtttagaccgaccaacatctgtggagctgctcaatgttcactttggcattgctttgcgcttattaagctttccctttgtattttagtgggagaaaattgcatctagttggcattctgacaagtccctttttggaggggaaagattatgctttggggtttctattctgtagtgacgtttggtatagtcaggcctaggtgaaatatacatttttttcccggatttcaatatttcatgaattatgaaaatgatgaatgggaggtcaaaattgaacaaagctgtttgatgattttgtcatgatatgagcctctgcacagcagatacagtgatgctcaagtgtttctctttactatagcattattcttactgttaccctctctgtaggagtgatgctcttccatttgatgaaatcaaagatgtttatctcctagactttgtcgggcctcctggttttgtcactgatattgccccaaaagtcgagaggtttgtaagcatttatctactgctatttgctttaagttttgttctgtgtgtgttagtttcatgtgcattatgctgttaatcttggattcttagaaataagattcagcctatgttcattctgtcattcatttaatatacagattcgatttccgtacacttcatgagtagattcagtatattctgtaaaatattttggggaaacacattgtggccatcaactgttctgaatattgctgaactgtagattgtagaagttatgcatcaatatttctatacattctgaattgttttgtagaatattctatccctaatgctaggacaattctaatgtttttatcttgttcagtgtcacaatcttggatcatcataaaactgcctttgaaagtttatgcgggaaccccacactcggagaaaatgtcaataaggtgattgacatgcaacgcagtggagcaacaatcgcatttgatttctttagcaacaaactcttgacaataggtagtagtttatggaatcatagaagtggcaattcttttaatggggtgaaatatctacctgataacaagcttgaaaccgtacacaagcttttcaagtttatagaggatggggatctgtggagatggaccattccgaatagcaaggccttcagcagtggcctgaaagatttggacattgagtttgatgtcaatatcaacagaaagttgtttgatcaggcaagtaacttggtactagtgttctgctacagtagcatatcctcattaaaaattcatggtacaaatctagcaccaccacttttgcatcactaaacctatatattgctagcctaattgttggttaaaaacaaagtctagatcttaaaatacattagtgccttctatacttggacagaatgattattgatgttgtcctactatacgagagctgttacaaaacattgaaatcaccgagctagccatcataccaaaatgctttttcatccaaagcttgtattgttttggtccaataacttcctgtgaagtggtattgttgcagttactggaactggatcctgaggaagtcatttctcgtggacaagcaacattgtcacacaagcaaaaattaattgatgaatgtctggagaaatcctatgaaattgcattaggatgtggcaggttcggtaattgtctggtaaatacctgcaggttttccttttctcttgattattttgtatgttcattaatattctattcatgttttgtcaacattctattatgtgaaggtgaatcgtccctacattcgtctataaattctgttatactacttgtttgatggggctgttgttgcaatttatgatggtccatgagctatatgtttgatccaaattagcacatttccagtaaactggatcagtagctatatttcgtgaccagggattaaaatttgacatattacaagaaaaaatcctgtggtcttttttggtacacgtagctttccagttccaggttctggaaccatctggtgtgcaactccactatccttacataaccaggacgtatcttttttccattagttctgcatgttttttttatttgtgcaatcattcccacctgaatttcaagatagcttacttatggtagctttatggttcgccgccatcgaatttgaggttctcttattatagcttaatactttactgatgcagaggcatgcaaccattcctacagcctaatgtctcagtatccgtaatactttttactctctttgtttgcattttaccaacattacaggctctgctgaattatatttttattgacccttaggctgtcaacgctgatgcaatttcaaatttgagaagcgaacttggaaatcagctagctgacaagagtcgtaatttaaatctgaggcaagttttctgttcaacctctccatgttgatgaacaatccatattgtttcttcaaagcgctatgttgttctaacacgaaccaatggtaccttctccagaagtattggcgctgtagtgtacaaagtacctgagttgaataatgacaatatgctgaaaataagtcttagaagtttgaacgaggaagacactacttctatctctaaggtacttcatcctccgatcaaatctataaggctgtaaagtagcatctgaaaatgatctattttaaggctgttgatttgttggcgtttgactctttttgtaggaatacggtggtggggggcatcggaatgcaagctcatttttgttgagcgttactgagttcgacaggtggaaggttggagctgaaccttgcaacactaaaatgtaagaacttcatcaacaaattgaatggttcataaagaaggaaatgcaggatgttacacaaaagcacaaaatggaaaaaacatcaagtcctaggccctgttcttttgttttcttagctaggaccagccgtgtctagctatctaggcacatgcacatccggtcagtggcgtgcctgtggttcatgaacatgagcccccagtatcattgtaagaaaaaaaaaactgtcagggtcgttttgaacatttttgttggagaagccaattgttagggactgactaggcgttgatcggctgatcgctattaaaggtgttttgaacgattagttgtcacaagcaagtactccctctatcaaaaaaaaattaagctaggagatcctagtagaacgaatttgtattaggagaaatctcctaggttgagttttttttaagacggagggagtagaccggatgcgacggtatgattcatgacatgaactgagcatgaagggaacaggcttggggcatgatcggatggctcatagggcgttcaaagtgcaaggacgtggccttcagccccatagaaaaaaacgaatattcagcgccacatcagcggtacgcgaagccaaacgaggttctcgtagccaaacatggatgctcgttcttcgttcgtcgaacgacttgcggagggcgaagaaagggtgaactgccgcgttgtggagggcggagcctcgcgggcgtggcttcgcatcagcgagggaaataacccccctttcccgcgctcacctcaccagagagaggagcggcgccgccaacggggagagaggagagcgtcgcggggctcatcgcggcccccgcctttgcgacggcctccgctggctacccctcgatctgcgcccactggagtttgtcggccacgctgccccgaccgcgataacctgcgcttgctgccggccgcaccgcccctcgatctgcacccgccggagctcgccggccacgccgccccccgatccgcgacgacctccgcttgctgtcggtcgcgccgcccctcgatctgcacccgccgcagctcatcggccacaccgcccctcgatccgcgacgacctccgctcactgctggccgcgctaccccttgatccgcggtggtcgaaagaagaggggaggtgctcgagccaccccgctgcccagacgccgttgagctcccgtcgtcctctgctatcgcgccgccgagctcccgcagtcccccactactgcgccgccgaccttgccgttgttgcaccggcaagcgccaagccctgccgctgctctgcccggtgatgtcgctgcttgggccgcttgggccgctcgggccgtcgccatctccgcccggcatgctctctgctgtgggaattttttttatttataatttttcttattaaaagttttacaaaaataattttccattttgaaaattgacggaaatagtcgcctaccgcc

SEQ ID NO: 7952 - DNA, 77039 bp, Oryza sativa
cctctcgccttcttctccacagctgcgtgcacgggatcggggggctagaggcgagcactcttctcctcactctctctcctagcttcgggcacaatggaatcgaggacggcagtcagcggcttggacgacagagccaaggagaatggcgacggtgtggccgaagagaaggacatcacgtcactactagcctcgaggaggtcgacgctggcctcccgttttgtcatgtcatgcacatgtgtctttccctcgatcctgaaccctgactggacgtataggtatgtggtatgccaatgacagttattgaagctgccatcagttatgcatttatggattcgggtctagtgaatagggtatgcctaagcgcccacccgagattggactcgatggtgggtaagacccggagcgaggttgtccacgataggtcgcggcggtgacctcagtctcctcctcatggaggctcgcgacaacgggctctgatgctgcctgcttcttcccccctcttgtcatcgttgaacaccatagtccttaccatggatgaagacggtggcctcttcacccttgacccgctagtcggcgaggaagacccacccatccttgatctccttctcatcaaggctcgcggcggtgggctctaatgccgcccgcttcttcatccccaatctctttctccttccctcttctctccctcatccctcctctgtcaccccgtcgccccctacccgtcacatctcccacggcacgacgttcatcccctcatgcgcgcgacaccgcgcaacgaagattgtgtccgccttcacgatgcttctctccaccggtgcttacacagggacgtcggtgatggccactgcctcccaacccccttgagctactgcatcgtcgttgcgctgttgccgccagcctctgccctcccctttacctcccaccgccttgcctcccgtcgagagacatggggaccgcagctcccttgagctcctctgccatcgtcacactgttgccacccattgccttctcctcaacctcccatcgcctcgggcgccgcgttgcccactcctagagtcgcgccgaatccagaagataagggtagagaagagggggtggagaaggagagaagggatttggcatgtggggtccgcatagtaactcggcctgctagagtaggtcaacgagtcacgtcaacaaaaaaacaccctcaaaaccactaagggagtcatcttgcattggttttaatagttatgggtcaagatatctgatatagtagttaagagatacaaattagatcggaccttcaatcatcaaacccaactaatgaaggaaacggtccatttcgcatccctaatttgagtttgcatcactcaactataaaattaggtaagagtatcctctaacttttaaaatcactgcaaatcgagtccctcgactaatttgaaagtggtttttgacctatgtaacctctacttggcacgttggcatagtcttaatctaacatggcacttgtggtaatcacgaaactagaaaaaaatttaaaaaattttaaaaataaggagacccaatgtgagtcgtagttgtgccataatttttctaatgaaagatgtaggactcatatgtttcacatggaaaaaaaatataagagtaaatttcacaaagctataaatactttgattaaattatcataaaactacatatttaaagtgatgtatcacaaaactacagatctaacaataaatttatgacaaacctactggtttaaggctaagtataaaaaagatatagatttgctgatgaaattatcgtaaactacagattttggggtttaaatcctcagcactaatgctatgtttgagttatataagtccaacttctgttattaaattgatatcaaatctatagttttgtgatacttagtcttaaacatgtagttatgtgataaatttagtgctaaatctatagttttgtgatatatcatgttaaacctgcagtactgtgataatttactcaaaataaaaaaaacatctatacaattaccacttacatgtggatacgagtcctattatatattttttccttggctgtaattacatgtaagcattacgtcggataaggactaagttaatctgtcatgtagccgtaggatgaaagcgccgtgtaaactaccgagggacttgatttacattagttttgataatcggtaacgctctatagccggttttgcgctaatggacacgaatgaagctcaatgcatagccaagataattagggtgtgtttgcataggctggtttccaacccggaacagtaacacggaaaactgagcagtcaattagcacgtgattaattaagtatttgttttttttaaaaaatggattaatatgactttttaagcaacttttgtatagaaactttttgcaaaaaatacaccatttaatagtttgaaaagcgtgcgcgcagaaaacgagagagatgggttgggaaaaaggggtgctgaacacacccttaaagtgtactcttccacagaaataataaacttccaactcaaatttggcccagcaatccaaatatggtgagtgctaggcagccaaatagataactcgtctgctactgaaaaataacgatttcatggttttcggctacaagttggatgtgaatccacataccacatttacgcccccacaaacccaagtgggcgcacacaccttatttttctaccacttaactttatttcagctgttcaccgccttgctgctaacaaagggcctatttcgtacagttccaactcctaaatataactccaggagttgagtctagagtggagttgtgtagctgtctaaggccccgtttggtagggctccaaactccaactcctaactctaaactccaactccagtgagagctagctccggttgaagttgaaaactcgttaaaagtgtttggctatactttcagttctagatctgaaaaaaaaaatgaaaaaatgaaaaaaaacgaaaccaatcggccccagccgcgccgccggccgccggccacgcgcgccgcccgtcctcgtcccgcagcccccggccgccgcagcccttcgccgccgccggcctccgcccgcgcgtcgtcgtcacgccccgtcgccgtggccccctaccgccgacgctaccgtagcccgccgccgccggcctccacccgctcgtcatcgtcacgctgcgccgcctgtcgccgcctgtcgtcatcccgccgctgccgcagcccgccaccgccgccggcgcccgctcgggattgggaggggaggagagagaacgggaggaaaggaggattgtaggggtagttgagtggcattttcgtgtagatactctaaaaaattagagggtagtgggtcttttgggatagagtggagctgtggagcagcaaaaacccagctccaccccgtagttcattttttaggagtagctctgccaactccactccaaaaaaaggtggatctggatcgtttggcacaactccggctcctgataagttggagtgggagctagagctatgccaaacggggcctaaacccagctccacaactctagtacattttgtgagagagcttcacccaactccactctcaattttggtggagctgaaactgtttggctgaactccagctctaggaggggtggagttagagctggagctgtgccaaacaggcccaaagtaacagtgccaccgtgaaggaacagcagtgaattgtaaatagtagaaacaaaacagtactaggcagggaaaatgaagtattattagcactagtatgcgtatcaatcaacagtcggcaatgcacagaagcattgatcagtcactcttgcagaagaaaaaacatgagtggtcagtaacagtcgcgttctcttgttacattggccagaaaaatgtgaaacgatgaaacacaggcgtacatgatagaacaatactgcatctgtaggcgacctcttattctttagtatcgtgtcactatccccccgtgcatgtcctatcatcaacggagacttgtcgtgctaaaccaactcgtcccaatgcaactcatcccctcgaagagtctgcagtctccgtctcaagaaccacgacagcctgccatgcatctatcgagcgcgagcagacggccgattcatcctgacgcttacaccgttgccgccatctgcctgccggccacgccatcctcctcctccccgtcgctccggtcgacgtccaccgtgccactcctgtaccggctcgcgcacacgaggtacacggcgaagtccgcgacggccagcacggcgagcaggaagaagaacttgtcgaggtggccctcgttaaggtcggcggggatccagccggggcggccgcgcacggcggtggccttggtcaccgcgctcacgatgacgtcgctgaagtagttgccgagcgacatggacatcatgcagagcgcgctcccgaagctcttgagcgcgtcgggcatctccccgttgaagaactcgagctggccgacgtacatcatcacctccgacacgccgatcagcgcgtactgcggcacctgccacatgatgtgcaggtcgctgctcatcgccgtggtggcgccggccttcctgaagtgctcgaccgtgccggcggtggccatggccatcgcgccgagcaccaggccgaggcccatcctctgcagctcggttgggccggtgtggcggcccgtgagccgcgacacgagcgggcagacggcccggcggtacaggaagatggtggtggcgacggtgaggatgtcgaaggccgacatgctggagggcgggacggagaagcccgggaaccgggtggtgcggcgcatcgcggcgccctgcacgacgaacagcgacgccatctgcgtgaacacgaccgaatagaggatggtgcagagccagatggggaggagccgcaggatgctcttcacctcctccacctgcgtcaccgtgcacagcttccaggggtcacgcggttgggtgcacgtgccaagcttcgggttagcgcccaccaccgccgcacggtccaagaacctgcaatacatggcgagttcagtgcgtgcatgcgtgatcagttcacagctcacaaaaccacacaacactttacctgaaaccttccgtgtgcaggagcttcctcccaccggaatccgccttctcgtcgctctcgtagagtgtcacggcgcccggcgactcgccggccttccagttcctgcacgcggcgaacgcgacctggaagatcctgccaaccgggttgccgctggggcggatgtaccggtagcggagcgtgccgccgaggaacagcagcagcgcggtggccgcggcggcggtggagacccagaagccgagcgcccagttgccctcgtcctcgaggaagctgaggaaggtgttggagaagagcgagccgaggttgagcgccaggtagaagtagctgaagaaggagaccttggagtgcgactcggccgggtcctcgccgtcgaactggtcggcgccgaaggtggcgacgttgggctggtacccgccgttgccgaacgcgatcatgtacagcgcgatgtagaagatccccagctccgcgccggagtgcggctcgcagggcacgtgctccgtgccgcacccgaccggcctgatcaggtacagccgcgacgacagggacagcagcgcgaggccctgcaggcaaaacaccgtgacgcgaacgagtcagccgcgtgatccacatctcctgggcgtacgcgcaacgcgaccgcgatgtgccttgggccgatcgaccgaccggtcggcgccaccacgtactactctatgcctctactatatggaccatccactttcgacaccagcatacgtgcagatacaatccacccagtacagagtacaggccgaattaactccactctggacagattctcccgcaccaatcgctgttactttgtacgtacgttcctacgcatctatagaccatcatttcccgtgaaatgggcaatcagaacggaaaaaactggtcactgatgattgcccgaccaacagatcagaccgaagtagctagaaacatgagatcaatcgatcgcaccgagaaaggcgcgtggttttcagatagaactgcggagagagagggatgtgccgtgtggtggtgcttacaaggacaaagatggcctggaatatggcgcaggtcttgtagcggccccagtaggagtcgctgaggaaggcgccgatgagggagaacatgtaaaccgtgccggtccatttgctcacgttgttggcggcgtcgccgttgctctgctgcagcaccctcgtcaggaacaacaccaggttcacgtttaccccgaagaacgccagggttgccagaccctggttcactgcacaacacacacaaaataaaaaggtgtcaaggccttcaagaataattctaaacaaacataaaacgatgcacacatgcaaacagtgcgccgcttaactcccccatgaaagcagcaataaagccaaactgtggtagggcgatatcgtactccacataccctacagatcgatcgatcatttgatcgctatgcatggttgctacatcgtggataccatgtccgatgtctcctacggagatcctaatgtggcgctagtaatgcgtgcgcccgaatcccccgtggcgaggaaccctccagttgtgggcgttgcatggccgatgtcacctcgtcatgcagcattccgcgtaaagacccggcgcctaccgccactttaagcctcaacgtcgagtcacctcagaccgacttgcactgttgcgaaaacacttcactggaaagcccagtcatcgactttgtctccattttttgctggcccgtctcagccgggaaggagatggtgaaatcagcagagttcagcacaaagtacttacgaagaataaggccgccggcgagccatccgccggacttgcccttcaccgccggtgagcccttgatatccacggagccatcgagggtgtactcgcagcatacatccttcggggcgttactcgtctcatcgccttccacgacgatcaccctcatcttcatgtctccgtcgttgccagactgcaaccatcaagttacatgctgtcagttagtttccagtttcatgtgctgccatgtatacgcatggtgtttcatcactgaacatggagacaaaactgaatcttggctacagaccaacaagctacagaaacaagctgaaaccgtgtagctttgctaacatatatgccaagaacgatcaaatcatgagcacgtactaaccatttcttgctcctcctcgggctctcctcaccggtggcctccgtcggctaatgcaacgagaagctctgtgtgaggaagccgagcaggaggaagaagaggaggggatctatggaagtggttgtgtctgagcagagaggtctgggatttatagagctcagctgcagctggctagctggctctgcgactgtgagtaggatgtgcagatcacaaaagggaggtggaggagcgtgcgtgtcttgctcgcatgatgtcacaaacaggtattcttaggtatgtgcatcacaccgagacgtcgcgctcgacgatgactgtcgccgtttttccacctctctttttttttttttatcccgttctcatagcccggccatcgtagcacgcaagagcagccttttcccaagaaaaattcagatcgttcctggcaatctcaagtgtgccttttactcttatttgtggtcggttggtgtggctgctcgtgttctgtttcagtaacttatgtgactttacctggttagataattggcaaacgacgaaaaacttagtgccgagtccagcaatttgtctggttttaatcagggtttatctgcacaggaatactacatgacagcatatatagcccgccgcatctttttcactcgccagtctatttatgcagggtaattgcaagctgctagtcgaccctggaaatgggtgcacgccaaagatgcccctcacgctttctcttggaaatccagaaatggagtggcattctacattagactgctacgcttagtcgtggtcaaccaaccattccttcatataatcacatctgcttgagtaaatgaaggccgagactggaactctggattgtttgcccctgaatatgttgccacttgcctgtgtgaacacaaccgcacgatgattattctacgaggctgtacggaacacgagcctcgtctctactagtagctggctagtgcatcgtcacttcgtcaggtagaaatggcaaaaaagaccgaggccccaaaaaaaaactgaaccgaactaagatcagattattgtcatgttttttcactagccaaaattttaagttgaaggttgtaattgctataattaatgctatctcgatgaattgatacgttatatgatgtttgctactattatcttgtgatgtttaattgataagttaaacatgtcctcaaagaggggaaagtgatgccaaaaaaattgttctcatttccgctaattcttctgtctcttaaaaatagtcacatattctggtcataacctaaaatagtcacatgtaagaactggtattgatttaggttacatgcagcggcagcctactgaccttatgtattggatatccgtagattgaacgggaataaaaatataaactagatgacgtcattgatttgtggatatatatatatgtttaacgatttgtcttattaaaagatttacataatatatagtattatttattttgttgtaagttgttttaagcataatctgtatcttatctatttacacaaaattgtcaaataagataaatagttaaacatatatataaaatagttacagcgttacctacaacggagggagtacaatgcacgagcctagataggcttgcacaagtggcaggtgagtgttactactgtgttagtcccttagagatagggatagcatatttactgccatccatgagtttaagctgcgcggaatggatcgagctagctagcgcgagctatcgtcgctgcatgctccgccgctcggtgtcggaggttgcgtcgacaccagtggactggcgccagtggctgccaatgcgccaccagttgccacactcccttatctcgtgcatgcatttgtcattttcgcgggtttgcgcagcagcgatcgatcgatcgatcggaaagccgttgtttcgggctgccgcctgccgccggctggctctcgccggtttcagggaacagttaacagtgcgcggattgacgtccagggttcttcacagtggccgctgtgctttacagctcaacgtgggctctcttccactgatggcatgcagggtagtgtgacgatacatcatcggccggttgccatcgatcggatcatatatcacacgcacgcacgggcgtcatcacgccggttgaggggtgggcgtgtggtggcgcctagttcgctgtggtattactgtcgtcaagcgttgtcaaatctttgcttctgtttttctctagccactggtggttgcaacttgcaactagaggaggaggctaagagagatcccacatatctcggtcactgtatgtgtcgctatatatattgaactgaatcaatatgcatgccaaggtgtcattcctaaggtcatgtgcgatgtggtcgggacctatagagtttacggagagtgctacaaatcgaaagtctgatattttttaaaatatcggacggtgttgcagcgcatacggagaaatgtttcactgaccaataaaaattgtttcaagaggaatgtttcagtgccgcagagaaatgtgtcattgacaataaaaaattgttttaatataaatgtttcagttgtttgtattttggagagaaatgtttcatcagtcttgagaaaatattttatcaccgggttaaaaagttgtaactagatgcaacacttgaaaactactacctgcaacataaagacaacaatatgtgcaacatcgattaaaaacacaatgaaacatcattccacgacaagatgcaacaaaaagcaaataatgggacgactcgatcaggcggtgggtgaatgcaacagttgaaaactactgattgcaacaaaaagacaataatatatgcaacatccaataaaaatacaatgaaacatcatttcacgacaaaggtgcaacgaaaacaaataatgagacgactcgacgaggcggtgggcagcgatggagccgtcggcatggccggtgaagaggaagaagaggtgtggcgcggagagaggtacacaagcagggcagtgatcggcggctcgttgcacaccctaggctccagctcgagcagcgcgtccacggcgacagagaacacgaacacgcggccgcgggagtcgtcgacggcgaagtacttgatgagcccatccgcgtcctcgtagggcagcgtggtcgccgcggcggagtacacgccgtcccccgagccacgcggccgcgacgaacccctgcggtgccctccggtcaccgggatggcgagaagaaaatggggagaagaagataagacataagagataaggatggggaatggcgaatgggaaatggattggttgaatagttaaatgactgggtcccaccatacgcagccgtccggcattttgttttctatcgaacgtcaggaagcattttcgagagtctaccgtgtgccgaggtaaaatgcgaaagggctaatctgcaaattgccatagttttcttccttatttaaaatggttttacgtagaatgtttttatgggtgtgtttagatcggggtgtaaagttttggcgtgtcatatcggatatatggatacacatttaaaatatcaaacgtagactaataacgaaacaaattatatattctgtctgtaaactacgagacgaatttattaaacctaactaatctgtcattagcaaatgtttactgtagcaacatattatcaaatcatggcgtaattaggcttaaaaaattcatctcgcaaattagtcgcaaactgtgcaattatatattttttctatgtttaatactatttacatgtgtccaaacgttcgatgtgatatgttgtaaattttttccctgggaactaaacacaaccatatcaaaagtacctaggaaaatgtttcacagtggaccataaatatacacttggttcagtgtccagacacttcacacgaccgcgcacaagcatccggccattaggtctaccctgtaaattgtggtaaaacacgcaattgttacaaaacaacttctaaatctgatgcattgcaatcggtatagtcaaagtgagaaagaaaacactagtgaactatttcctccgtttcacaatgtaagtcattctagtattttccacattcattatggatgttaatgaatctagacatatatatctatctagattcattagcatcaatatgaatgtgaaaaatctatcttgatgctaatgaatctagatagatatatatgtctagatttattaacatctatatgaatgtggaaaatactagaatgacttacattgtgaaacggagtactaccccaggacgtttactcctacattgcatacggtcttacatcatgtaatattagaattgtttttctcatttcacatgaccaaaggccatcagcaatgtggatagacaataggacgtcagggcatataagagtttcatagatgctaattaaataagtatggtaaagaatggaaggctctgtttggtaaacctctaactctaaaatttagttttaggagttgtgttcagagtggagttctagagcagtcaaaacctagctccacatctctagttcattttgtgagagcactctacccagctccactcccattttaggtggagctgaaattgtttggctgagctccaggaaagatagagctggagctgtgtcaaacagggccgaaatggattataattctttgagaagatgttttctcctgtcgctcttatatgtcatctaaatagtaaaattatgatagattaatatgtgatatatcactttataaatatgtaagtttaaatttgatccccataagttgtaacaaaaataaccaatttaacttaaactagtacacacaagcatatctatttattttaacttatagaagtcaaatttaaacttgtatatttatggagtgatatattaatatatcttgccaaatataattatcttaattcttcaaaactatttatttgataagcacgatacgatggaacatccctctatgggttaaaagagtttcctgataaaacatgcaattgttggaacaaattggccgaacaatcatggcaagggctcccacccctcattggagagagcctaaggttggatataggagatagtcaaataggaggagaggagggatgagagttagagtaaccatatattcatgggatggattgggatcccccttgtctctggagggccctatctattcattgacaacggaaaattacattattgcccttgactcgttacatgagagtgacattgctctaggggtgttcaatcctctatctactaacttattaaataatagaaaaaaggctccacactttctctcacgataaagaaattctcatattaatcaagaataagaaaaaaagggagtccataataaagtacaatttaaaaatagctgaaatttgaaattaaaaataagtaatattggaagaggaaactagagtccacattggtattcaatttagaaccaagtgaaatttagaattaaaaataaaaaaagtaaaagtaaaggttagagtccatatagaaatacaatttagaaataacaaaatttcaaaatttttaaaaaatattggaaaacaagtctagatttcatatagaaatatagagtgtatttagttcacgtcaaaattggaagtttgattcaaattggaacaatgtgacggaaaagttggaagtgtgtgtgtgtaggaaagttttgatgtgatagaaaagttggaagtttgaagaaaaaagtttggaactaaactcggccataatttagaaataactaaaattaggaattaaaaaaataaggaatattgaaagatgaatttagagtccatataaaaaatacaatttagtaataacgaaaattcggaatttaaaaataaggaatattataagaagagtctaaagtctacataggaatttaaaataaatttggatctaaaataaaaatactaaaattgtagagtttaaagtccctatagaaatgtaatttagaaataactaaaatttaaaataaaaaaataaatattggaagaaggacctaaagtctatatatgaatataatttagaaataactaaaattcggaattaaaaataaaaaagtattaaaatatgagttcagggttcataaaaaatacaattagaaataataggaatttagaattaataaataaggaatattgaaagaggaatttagagtccatatataggagtactatttagaaataattgaaattcaaaatttaaaaataaaaaatattgaaacaagtgttaagtgtttagaatccatataaaaataaaatttataaataatgataatgcggaattaaaaaataaagaatagtggtgtcatggttatggatactacatacctaatagtagttgactaaatctcggcaggacccaccacataccatgtcctatacggaaaccgacttcagatatggagggagttccggataaggaaagacaaccagagttctacatggaaacgacaaggactactcggattgtatccatattggtttccctagttctacttggacaaggggacacctatgggtataaatacaagcccccctaggaggacagggggacagacactcaccatgagacgatcaacacgatcgacaaccaccatgagacgatcaacacgatcaccacgatagggacgaccacctcatcaacacccaacacaatcaacatacaagcctacatacgccaagacacgccgccggatatcgacttcagggataggcatggctattcccctacggtgtctccggataccgtcaggagatacgaaagcgctatctctgatctcgtcgggcacggattcgaggaggaagactaccttgttgtcgactacgagttagaccttcaaactgacatgtcaacaacagttagataggctacccacatattgtactggtgtgattatggtgaataagagcaataccggcttcggccaacaggatgtaaggttattacctaactactcaggggcccgaacctgtataaaaatccatgtctccatctctttacctcagtctcacatatatcctagcaccaacgatccccatactgtccaaataccgtagtcgtgacatcaaacgtcgacaagtggaagtagaggttagagtacatgtagtaatacaatttagaaataactaagatcaaaattgaaagtaattaataactatcacgtatgatcaatttagtaaataatttaaaactatgttgctattttaataataaaatgtgaaatatatatatatatatatatatatatatatatatatatatatatacacacacacacacacacacacacacacacacacacacacacactattatataagaaaaaaaagatacttttcgcgcaatttgcatgggccatcaatagtgtagttatgttattagttaacacgataagagcaggtacaatagtagactataagccaggtataaacatattttaatgagataaaggaagagagagaagagcagcgggctacagatttgtagccagctatagctaggtgtaggactaggtattaatagtatagtaagcaactattgtatgaattgcctattacattggttatagatgattcgtagctagaagttggctatcctattaaacttgctctaaccctaagagtggggtttatccctaacacagtggttaacactgaatgtggaacaatatatatacttaaaaaatcatgtcatcctcactagtcttgagccaacgcttggaaaacaatagtaatgattttcatttgtttcaaggtccaaacctggacctggtacagagtaaatttgacgcatgcaatgggtagactgtagtgtgagaaagaaaagaggtcttccgccctcgcattgcacatgacctaatcggttctactgtacactcgtaacagtagatgcaagatgtgctagctggtgctcgattcggactactggtaactaatgtcatgcgatcattgtccaaggccagtcctaacttaggtctgtgcctgagaagtaagaattgatcacatccacggttgcagggttcggtgagatgaccaatcgatcgatcattgtagatgggactaattatcgctgctgataatgactctcaggcagctgatgggcgccgttcgcgtggtgattaacctgacggcacgccgctgtgcggggtgaggcaatgaactcgtgtaccttcatgctgataataacattttcctgacagtcctgctctcaaaatatcattgcatgctgcttaattcagattgcccgtctttgaccgttaaactaaatgcaaaaaacatggagagatatcacattggacatgctgtcaatcagatgggcgccatacgtttggactctgtattttctagtgtcctggttcactggttctggaatgaatacaattacacaaaccgtcctttgtaatgatatttcgagaaaaataaacctccgctaattatttccccccagaaagctacatatatatgtcttcaggctgaatcaggcagacgcctctgacgaattccacgtacgtcctgatagatcgatactactaacatctgagctgagatagctatggtccaagctttgcagcgcattggcagtacggcagatcgattaaacccagcgaccgtttggaatcctaaagggcatgcatggtcgacggctcaagataaccaaaggttactagctgaacaatcctacccgtcactgcctttatcacgcttaaaaaaatataaaaaccaaaacgtgcctgttcttatagctatactatgaacgatcaaccaatgcaacgtaagtgcacgcacgctagcttactgctactaaccacatgcatgctgcatgcatgccagaatcactatattcactgccgtgccgatgataatacatcaactaacccttcgtgacatgtggttaggccaaaagagacaacccctgatccaatcgatcctccctctccgaaaccgtgcgcgaaacgacacgcgcgcatacatgcacagcaacgcgcggctcgcgagcactggcccgcgcgcggcccacgtacgtcgacagccgaatcccacgcgatctcccggccaggacggtcgcgcgcgcggggaggctaggcttcgggcttcctttttccggttttcccccgcttttctcgcggccgtataagcggaggagaatatcaacgcgcacgtaggtgtacgcccgtactactacgcctctctctctctctcctgtggttggcatatcgctcgcgcgcacgcgtgggctttggctgccatgcatccgccctgtcacgctccactcaacccccccgatcggctatcgcaagggctgggcctacccgatcgtgaccgttccgaggggcacatcgccgtcgaccatccaatgcccacgaccggggcggtcacgcatccatccatccacccccttgtgcagcagcacgacagctactactttggtaggggtcctagctatagctactgctccctgggacgtggtacgcgcttctgctcatggacggatccgcgacgactgtgatgctgccatgctcgcacgctgcgcgctaaagccgcgggccacgcgagaccgcgagagacacgaagaagttgggccaactgttttcaggtttcctggtcacgacccccatgtgtgaccagatcgcgcgcatgcagcatgcacacactccgccggctcggcgagcgtacagagctggctgttcccctgttcctgttggtgcaggcgaatcgattagttggttcgacttccgcgcatatgtgttcattgcacgcgcgggcaatgggcgatggagggactagggagccgcaattcgggagcagggtgtactgtactcgcggtgtacaatggtggcgagcagcgagatcgatctatcggcgcatcccctttctggtcctgcacgggtagacgctcgcatagttcaagcgatcctgacctaccgtttcctctgcacaggtcgtccctttaggctagctaccttttagcagagtttagtgtgtgacagtgtgttccctgtcatatggccgagcttttcttgtgtgtgtgtgtggggggggggggggggggtttacagttgaatgtacccaaatgttcttgtcggtaagccagatatgatgatcgggggaatataggccatccatacgacgacatattgtcaggtgtgtgtatattgtgagtcgttatcacttttgtctgcactgtactagtgatttactcctacgtgtctgcagcgctacatgagctgcattttgcatgactaccatgaaagtgtgtcgacaggtccatatactgtgtatccagattaaaacgtagtagtacgagtgactatgatatttgctaaagaaagcaattgcattgtgctttccaatgcatttgcgcacttttttccttttaagaaaaatgcagaaatgttatctctctctttttttttgtctttttaaaaagacatagatgcgtgcactaggagggctggacgtagaagccttaccaggcatacgtccaggactctaggcgtgcaaatttttcaggtaagctaatccaatcaatctttcctgtgcgttgcgaccagatgagtagcaagcagtgggtgaataaaattgctcgacagtgattacagatcggtttaactaatggggattaggactttccaatcattgctttccttccgatttccctttcgttgatgaactgcaatcactgcacgcctccatattttagcataaaggcatgcgtgacacgcagctacgtttttcaggtaaccaagctcacgctggttaagtgcattctagatggatcgcctgacagcggctgcagcctactttataattcgaaacgacgactgatttatttcaaatcgactttcgctttaccatactttcgtgattaatgaaataaacaacgctaaaaaaatcttctagacctactccagtctgtcactgaaactaaccatagaattcgccttcgatcttctaattatcatcagctacacggctagctcagctaggcatacctgattcttgatgtaaacggtatgacaccgacatacctaattcttctcatactcccgccactttacgtggttggctatattacagagtttacctctcggtctcattctcatatatgctctgaaaaaccaacgtgacgttcctatcattgcatttgcagagggcctcctttagcaggacgtcgcgctccgattgcgcccccactagcgcagctagctaccctctcgatccccgtcgcctttgtccaccacgcgttcgcgcggggatgacgacgaagagtcgacgacggcgaaacgactgcaggggactgtgtggcagctccccgagctgtcgctgcagcgagtccgacgaagaagagatgcgatgctacgaagccaccgaattttcagccagcacggccgtgaactgaccaccgctgctgtccggcgggcagcttgcttgctggctgagaaatgcacgtcttgaaggttgcagccggggctaaagtgccacactggcatgcataaacctctgaaattctgatggctacagccaactaacactgcctccccggcctatggccatgatctttggatgaagcctggctttagtggcttccatgcgatgcagagagagtgagataagccttctcgagataagtagggagttgagagtgactcatgtatatgtgctgtggtaggtctgcttgctactttatttttctccccctgatctaattaatggcttcctcctgtgcccggaaaatgacatggtcgtttgttgttatgtatactgagcatgagcagtgaacatctgaaggattttgacggttaaaaatgcgttcatgcgtcgtggagaaacaactgtagcagctcgttttttccccccaccacttgtctcgaattcactgtaccttgccaccaattcaactttgatttggggtcatgtagaattgaacaacttgagataagtcaacagtggtgactacctggaagcaaattccttggtctgaaatgtcccggggggagagaaacagaatccagtaatatcgtggccaaattttaaggttaggtgtgttccctgcctcttcctgatagcctttttcgattatcagaattcagaaaatgatcgaattggggtagataaacagagctacaattaaactggggcagtgaactgtccaagtttgttacctcgaatcaattttcaacgattaaataccatgattgcttttgacaaaacatgctactagaataaaaatggggcttttgatttgagtgtgtggggactatagaaaatagtgcatgatctgaagactttcagtatcgtgggtgcacaagctccacaaaaaaccttttggataggtcgtacagtgtatgacctaaaaattatctggttcactcctcaacaaaacgtggtctgaagcaacttgccaactcgccccttcagattagtcatgattgtgcagtgtcaactgttgatcacttgttctcgtgcccataaagaaaaaaaatgttgttcatggtcctatgctgtttagtggaccatatcccgaatgtttttcatttcacattttctatgcagagcatatactagtattagaataggctgaatagctatcgtaaggaaatagatgtgaaaatgatacagaaatatcatatggtgattctgtaaatggtattgtcctgtagacactccatgtctccatggcagcggagtacacaaacataaaagcaacggtagtacattacaagtaacaggtgaataaaatgagcatgtaaattagaaaaaaaaatccattttactcgcccaaactaattcaatagaccatttatcctctcaactattttttggctcattttatatatcccctaaactattaaaaatgattcattttactccttaataacatttttttactcattatacaagctgtattttaagctgatattgttagagccatagatgacaccattaccaaagtttaaaaatattttaaaatttttcatggtgtttgctcgaactttagaattttgatgtttaaatcagtttgaagtgctttcaacctatgtaaacagtgagggaaaaaaatcacaaaagaatgttgacgtaaaatatgacttatacagggagaactaaagaagagaggtagcgttggttgggggggatgtgaagtgaaccattttcaatagtgcggggtgtaaaatgagaaaaaaaagtttaaaggggctaagtgctccaatgaaatagttcagggagtaaaatgaactttttttgtaaattaataaggaagaaggaaaaaaagtccttacgaggctaacatagttgaagtaacaacgatttattgttacccaatcagattgtttgtaggtggtggagatgatgcaagatgggggtttttcggcaacaacggttgtggtaattttctatgaatgccagatttttgatgtatgattttgttaaagtctctgtcgagtgttgtaatagggaagccaattgtgtagcacatgttctaggtaatcatgcttttaagtttaagaattcttgtaattgggttgatgaggccccaattttcttgtggaacattccagtgaacgatgtaactatgtttgtagattaataaagcacgctaaatgactttcctaaaaaaacatagttgattgtaatatgttgtattacagtgcaacacactcaagtcatttgtgcgtcagagtgagccgtgtacgtagcgaaaagtgagattgactcgtggcgccgtcctggttgtggtcgtggccagcgcgttggcgcaggtgtgcaacaagtacacgcacatccggggctccgggccatgcgacgcgtaatgattgaagagggcgctgccaagacgccccctgcatctagcttcgccagcctcacccgcttccacttccacgactgttttgtccaggtgagctagctacactaagccatgcctccacacaacggcacggcacgccgagtaggatggtctgacgagcttgggaaagataagtgggggataagagaggaggaagaagaggaggagctgataagtgggtcccacagttttttttaaaaccttagtcatttacatgtggtcccacttcaatttataactaggttgtcacatcaacataggtagatcaagtcaacatgccacgttagcgaaaccaccctaaaaaatatcaagggaatcaaattgtactggttttattattttttttcgtgggggggtcaacatatgcaatattgcgtttgagggatataaatcagattggccctacaattgaggtagttaaattggacttatttcttaagtcatccctagtgatccttacagaaaaagtcttccctagtgactagttagccaattacggagaaattcaccctgtacactgaaatctgcagaaggaacttctatgacatttcaaagtttgagcccggaagcctgcaccagtgtctacagaatatcttggcccaatggaagtggcccatgtgaagagtttcgtttaaggccatgtttgttttagcttaagattattgtaatctaaattattaaatcagattactctaaactggattataataagctgacataaaataagctgtgagttgtttgtttctatagattattacatgcatgtaagggtaatgagtctttagtcacttaataatctggaaaaagctcctccaaaggagattattagattataataatctggcttatagattataataatctatcaaaataatttacttgtttgtttcaatctacttataataatccagattataataatgctaagctgaatcaatcagggcctaagttaaagccaacacataaattaaagagtggatatgccactaagtttgtcacatgtttatgatttatcatttagtcatattctacaatacgctatcggcttttgtttaacttcgacaattcaacatcatcgtctgatgagcctccattactaatgtacaattttatccaaattaccaaaacacccctaagacaaaaagttacaaaatttggatacaaattctgaaatatcaaattttaagtttttgaccaaattttggatgtttataatcttatgtttataatatgatatcttggaatttttgtccaaagtataaagtcaatagcaaatcgcatgtgtctataatgggttctctcttggaagcatttcttcctttttcttccccaaatgaccacatacgttcccccacggtttgtgccccttaattcgtagtaatttcaatagatttacattgaaagcacaccttttcaaatatttatattttgggttatcccttttatgaaaagaaataattaaattgtaagtgagatgtggaagagtcacatccgtaccttagagctaagccatgcctgtgttaaaccatttataaactaaagtttttttaataaaaagtgtgcatcaccataagcatgagcggaacatgagcctttcgtgaaagcaacaggcaacaggcaacagggcaacatggctaatgtcataatgtttgtctgaatcatctaccattttgacttggaaatggagttttggctggttgagcccagggtggatttagacagtgctttagcttggctatggtcgtgtagtaataaaatctatctttacagaaaaaaaaacacgatacaaaatgcttatgctcatatgtacaatttaaatgcacacttacacacatacacacacgacctatttctacgagtgccccctcccttgctctgctggaagccacctcccctacccatcggaggccaccggcggggtgtctagggtcggatctacccgtggggtaacggatccgcacgtaggggtgatagtttcgatcatgacgactggatctggcctgtacaattaccggtcacccaaccacctcgtgtcgtggccgttgaccgatcattgcaccgccatagcagcctcgctcactttgccttgctctacgccatccattgctcgcggcttgctgctatgccgaccgcatctcctatgcgagaaaacgacgctaccatcatggctcgccgtgcggttggtcggtggctcactctgacggcggtgaggtgaaggtggggggctgggggaggtactttggtggctagggtttccaccccgagccgcccgcctggcgggacgacgtgggggttagactcactctatatcatattatcatattataagctgttttaattttttttctcagtcaactttgtttttttaggtttgatcaaatttattaaaacttaataataattataacattaaatcagcttcattaaatctaacattaaatatctttatatattatgtttgttttgtattgaaaataatgtcattttttaaaatttaatcaaatttaaaagtttaaccaagaaaaaaaaaatcaaagtcacttataatatgagaaacggagagagtattccgtttatcctcgaataattgttatcatctcagtatcattacatatattatctactcctatcaatacctattggtaacacaccggccaaaaatcattcacctcgatggaaatctgagaggcccattggatacttaataagctaaactaaaaaccaaaatttgaattttcagacataattttaagttgatcttaaaatatattaacttggtttttttatattagcttttaaatcactaagaaaagatataaattaatttttattttataataaatcattttagttttattagaaaatatgggtaacgagggcctcaacaagaaacaatcaaacactcgtacataccatgtggacttgagaaaaatagtttagaaagtcattccgacaagctaccgttattatttcttcccgtcacaatccaagtagccttcctcctcttcttcctcctctcgcgacggcaacaaacgattcacttccccattatttttccttacgctctccgcctctccgccaaacacgcccaaaatcgtcctgctcctcctccgctccatctactggatccgcgcgaccggcgatctcccccgaacctcgactgatctactggtgacgaaccctaataactcgcttgaatatattgttcggagtttttcttttcctggtcttcttgagcagtagtataatcgatactctgtagcatccatcttcgtgcggatcttgtatgctaaagttctcgagtagtactagcagtttattcatcagaatcatcaggggttgaactgaatccccatgctgtaacgttaggtccgcctcttgtttggtgaatcaattcatacctcgattctttcagggtgtgaatctcatgtactagtattgactagctgtagaaggctattcatagtcatagctttactgttggtctaagtttggtcaacgggtactattcttaggctttcctaccgctgtttctgcgaatggttagcgttgaaacgcagaattgtacaatctttttttgcgaataggttatcaaaccaagttttgatcatttgctggcatctataaagctaaactgacttccttacattggaggttggtggaagagccagcccctaccttcgttagagttccttcaaggagctaactctaatgaggctagaggttgtttcttgtaaggtgataggttggtactagtaaaatatagaatcctttgttcattcttgtccttccatcacagtcgtttctacagtttggaccgctttccaggtaagttcttttactaatgtccagtgttaagaaggtggtttgtttgacggacctcaaatcctcaataaaggaacatttgattctgaatatatagcttagacagagatttgctcagtaaagctaatatcagttgtcaaggcgtattaatttaattttgtgcttactgctaaaataatcagcacaactaatgcatatttagatgttttcaccattctcgcttctacagtccttttcagtggtagaggtgaaatgaaatatagagctagaaagtttcatgtgttcattcttcaacagcagtttaaaaagctttgttgtgttgcctacgtattcttgcatcataatgcagagtttctgtatgttctccttaacacagtacaaaaacaaagcattttctccttggtacagtaatgtgcaaagcttttatgtgttttcaaaaagcggcgcaagaacgaaccatgcctgggcgatgcatgcatgactacagtttgggctattgtggcaggctcagttctctcaaaacttgatttctaaaggaatctttgttattcccgaaacctatatttacctcaattgaccatagatggcaacaaaagttggagcaactgggtcatatatgtatgaaataaaatcagaaggtcaaattctatcaagtcatatgcatgatctcactgagaatctgacaactacctgtgggtcttcttaagttctatttacgcgatcagtcactatgtatgaattccattatctaaaaaaagacacaatgtatgaatatgatgccttgggactgatctcttggttgttggtgctgtattaagtaaatgcgtactgataatttcatcaaagacttaaaatgtttgataaaggtgcactgtgcatcttcattctttgatctgccaaatcagcaattgatgtgttagcttggcactagagctctgggagaatcactagtcaaaacttgctcgtgtttcttggttatctcattcattactatgttcagtacatattatctatttccttactgttgatgtttcaagtcttgagagttaggatgaccccgagacaaagatcaagagttctgacatccttccttttttacatcaaatgtagcctttgaccgatggcatcgcctgcagcgccaacagcaacggagttcactcaggaagctgctcgtcagtctctcattgagatctctcagtccctcccggagaaaccttcagcccagaacctggaggtgaagtcaccgagcccacgtgcagcaaacgaagatcatgaagatggagcagagaaatacagatcaaagctgatctcaatctcctacctttctccggatgcccaaccgacgccgtgccctcccaagaatgtcctcacttaactgtgacgatgctcctactcgtgcgtgtgtggcacagtatatcagtgttatacctcacttttagctggaaagatggaaatggaatacttttgggtgcttatgtttctaaccctaagaaacattcagggggaaaaaaaagaacagatagttgtacagatgactttgtgacgaagaactatttaccaggaacaggcttgcttaatccttgcatgttattttgttgttgcataagcttagttgtttccttataatgtatggttattcgaagtgctacattttgccctctttcagagtgaaaataaaaatctcttgcggttatgaacgacctgctatgaaacgaacactggcacgcagtccaattgctaaccttgttggtctcttccatgcgccattcttggtcattggaagagtatcaagcacaacgactaacctcttgccttatccatctactagtattctttctgatttagttcaactttgttcagaaatacagaacgtctgaacaatttttgtttcgagatttgtaaacttttctgaagaaaagggaggcgaaggctcggttaattcaaaggcccaactcataagaagcccaaccagcccatcaaacggtggggaagtgaagtccaacctcctggcgatccaaggcccaaccgatcatgcattcacgccactcacggtgaaccggcggccggccgatcggcggaggatggcggccgcggcgggggactcgtcggagccgaaggcgagcatcggcgcgggcagctgctggtcgccaccatccacctcggtctcggaatcggtagcatctctccgcacctctcctttcgcgcatttttgcatttgaattcggttccatccgcattgttgggggggggggggggggggggcttcccgtcggtgatcgtgctgagggaactgtagcctgtaggtccgattggctccgggagtcgtcgtcttccttgaagggagattctaccgtgtggcttacttggagtagaagagtgtctccttgagtccttttgtaccgagaggattcgtagtctacaggggaattagggcgaagtgctgtcgcttatggctgctgaatgctgaggcagagttagcgcgtgagtgcgcaggtgtactgggacaactaccccagtttgcgcgattgctctgaaaaataacgatgtagctatgcgattggctgcatagtgcatagctcggtctaaaagtgtgaagtgtgaaagaaggggaaaacccccatgaacaatacacttgttaaatcaattttcttctttaggatttcgttcttctgtttttgctttatcctttgatttagaattttatgtttgggaggttactgaattgataaatcgtaggtttattatggagtttttcttcctcaaggaaaagaaaaactaaaagaggtttggttttcacgagctagagaaatgcccaggggtcttctggctagctccacaaggtggtgggctagacgacctgggtttgaagcctcatcccttctaattatttgatattaggtacttccctaatattcacgttttttttttcacaagccagagcttgtactcagtagtatatacgaagatatatgcttggactccgtgttgaattattccatatatctactttcacttctgaattcatatatgcatccaagcagatatagaatggagtgaattctatacacaccaaatatatttgaatttgtagtgagtgaattctattcataccaaatatatttaatgttaactgaaaatttaattgtgtttgatgtatgcagacatcactttagatgtagagttcttgtgcagagaaatgctacaatttgatttcacagaaaactctgtccccgcttttctattggttattgctataagattccatgttttgcattgtgcatgcagtttttccaatgtcctttttgtactttttgtttgtcaaacttctagtagctcttgccatttttaaatttgaaatgtggtttcattttctttggaaagtttgggcataaatttccaagaaaatatttatcctttcccatcctactctgatggttgttagatggtttcaggtgaatgatgcatataaatactaaacaaacatatgtcttctacggccaaatttctgcaaatgccttctctaattgatctcctggttaatctttagttactaaccatgaatattgcatacagcttccatattcttgtcctttaatttgcaactttcctgcatttgacatcatagtagcagaccaagttttgttctgattccattacttaaatcaaagacttggccacggccaaggtagtatttccaatttctaaaacctctttgttatgtttaatctcagttctacattcattattattgtgcatattttcagagtcatattttgtagccatctgcctgattattgcatgcaaaacacattagtatttgttggaagatattttgcaaccgtaattgacatactggaagaagtcataaccattattgtttccatcgctgtataggttttattttcgcccacccatttgccttccactgtttagggaaaagaagagccttgatctcgccatgttgcatttgctttccttcatccagtggttatctgcatgaagtaacttcgatgcttacaggtgattatgcgtgtgttcctttttcctctattagttgccttggtttttgatattatcagttctgtgatatcgttttcctgcaacttggggcttagggcaggtaggataagactcagaaagcaagtattggcagtgactgaaaggtgtcctttactcttccagagttacatttgttcttaagaaatgaactttctaattgcttgtgtcttatactaaaaagatacttgtctagtttgcatttaggtttttcgtggtacatcatgttgaattccaacaagtgcgtattatattatatgcagaacgagcacttcgtgattgttcgtatggaagctatgttaacacatcaacctgcaattgcgtgcaacagtggtggtcatggaagttgtaaatgcattaatggggtttctctatgaggcctcctggttaaatccttgaaagaatgtctggtaaatgatcataatataacaattttgatgggaggaaataagaacagagcattgtggtgcaggaacaattgctagctcctcagctgctttattcttaacctttaccatcagatggtttgatagcatataatttgacttatcacatacagtatgaaagaattttccaggctagacatcaatttcctgaagttctagacatagctagagagtcagcaacaacaacaatcattacaattcagtcagttcagctattgtgagtaaaccaaattgcatggtacttatgggtctgtccatctttcgtactactaggttgtgtctaatccaggattaggttgctatattttgggatagagggagttcgcattaaatctggacttctagattatgaagttccggacgtaacacttatcaactggaatgattaaaatacctagagaactcacttattaatctctatctatcttctgttattctgccatgctgttaggacttaggatggaccaatatcatctgctattcctgcacctgagctagaatgtcttagaaatgaatatgatactagcttgagttttttttaaaaaaactgtttggtttccttcgtgtcctatctttgttattatgggcatgaatccataacatttcttgagtggctatttctaagtggagttctcttgccgccaatctttttccaatggaaagttgactagctgacagtttattgttctatggtatactattttggtatttataccatgttattttatccaaatcttttcttggatgttccaatgccaaatacttcttatggttttctaattctatatctgggacatccagaatactcataccttgttgtacctgtacggtcttattatgggtagatccctgctatgctatttcacaattaatttgatgttttggcctatcacttcatattattgttcgagacaaaggacaatttgcaaagaaatagttggtgtactattgataaattaatgcaatttatgtttcctccatgtaggttgcataagagcacagttttctgataaaagattttacaaaactgcaaaagttgcaagtcagagactcggagtattactgaagtgagtccaactcttatagaacttttttgttggtggggttcatccttcgaactataccttttgccacctctgggaatcaattatttcccggaaatatggatttgatttcttggttcctgcagctttgctgatcgtaccacaatagatctgctggcttttgcccttcaagacccaagagggctagcttgatggtacatttctttaatctttgttctgaagcaataggtcaattgtgaatagtttcttttctatgctgcaaaaggtgtaccagacttctttaccttctttaacaatgttgtagttctccaaaaggcccatatttctaaacattttcaatcttttagtccatcggtaccccagtccagcgatagacctggcatacccttaccttattctatttacctgtgttggacttgaggaaatatattagtgttgcaatcttttagccctactcccatgttgttttattctactttaatctatggttatcttaatgcagggagactaatcaagtccaagattcctttttcacggatggatggtcccagttgagtggaccttttggtgggaagcggacaaactaaagcaggttcccacttgacaccttaattttcttcaaaacaactttcttcacaagatctcttgccaattaaattgagacccagaggtaaaattaccacataatcgtcactccgaaaaaaatgtcactaacatcgatagttagtcaaaaaaaaacatcgatagttcaatatggctgacatgctaattcacaatctttgtttgcaacccatcattttaattcaactatatatatatttctctttccgagggagtaatatgtgaaagtattccttttcttcgaggtaaaaaaaaaggtaccttatcgtaggcgcaatcaaggattgtttgtttagggcatgtttaattcgcgaaaagaaaatatttgggtgtcacatcagatgtttgaccggatgtcgaaaggggttttcggacatgaatgaaaaaactaatttcataactcgtctggaaaccgcgagacggatcttttgagcctaattaatccgtcattagcacatgtaggttactgtagcacttatggctaatcatggactaattaggctcaaaagattcatctcgcgatttccatgcaaaccgtgcaattagtttttattttatctatatttaatactccatgcatgtgtctaaaaatttgatgtgacgtttttgggaaaaaaattaggaactaaacaaggccttatatcgcttgcttgctgatggagtgatggttgattggtgattggaccaatctatcatttcttcatattggcaattgattcaagtcattcatcgtttttgttctaacaattaataatacatccaaccattcttggtaattttgatttggaaagaaaaatatctacctcactttattaaggattgcactccatctacttcagatactaaatcaggtattgaagaaccacccaaattacacatgaggcagtagaggtgtttttaggtaagacctttatacttatatccttagctctaaaagccaagtctggaaaataaaaaacaactaaacaagccccctaaattgattcaaattaagttttaaaatttgctgcagctcaaattaagttctaaaaaaagaagtttactatagattgtttgtacagctggttttaagtatttaaggacattaacttgaaagtagaagtgttcagtagaccttataaattagaaatagttgatgtcttgaaatttctaggctcatgtttcttgtggtctattagtggtgtaaaagcactcaatccatttcaaccctattgaccaagtgctgtcacgtgggtccaaatatcagttaaagttaaaacctactactacttgccttccacttccctatgtcaagcgaaacaaaattttaattgtagttcagtatattaaactccgctagattcaatagattaggcttgcctcaaagacaaccactgactctctggttgcaaacagtttgtttcccatggcttggttggtttgagcagtgttgtagtaccctttaaaatttttccttgcatgtgatgcgagagagcggatgggaaggtgaaaacgcaggaacagaccctatgacccctgcccctatgcttaggtcgtgtttagttgtttggtcaattttttttaagtatacggacacacatttaaagtattaaacgtagactaataacaaaataaattatagattccgcctataaactacgagacgaatttattaagcctaattaattcgtcattagcaaatgtttactgtagcatcacattgttaaatcatggcgcaattagtcttaaaagattcgtctagcaatttacattgcaaactgtgcaattgattttttttcatacacatttaatgctccatgcatgtgtccaaacatttgatgtaatatttttggccaaatatttttggaatctaaacacacccttactggatcctttgcgttctctcgaaccatatatatccatgctgtctgtgccggatacatgcattgcgcaagaacaacgtgccataaatcattcatactgtgccatcttagcttaacttaatgcttactgtagctcattgtgatgtgactttcaaatctgatatctaatcttaagagcaagtttaatagtatagtcaaatattagctccaaatcatctataatcaatttaatagccaatctatataatagttatctataaacatatactacacttttaatatctacaaattgtgtcttacagtccgtgttatagctgtctacaaatttatagctccctgctcttctctcttctcctttatctcctcgaaatatgtttattgttggcttataatctgttattgtgcctgctctaacattctcgtgctatagtattatagacacatgtcttgactaattttgtctaaattatagcgggcaatttgattaccgccgttttttaagctatacttttatcttatcagttatggcattggccaaactctccacgataattattgcctattggaacctggaacattagtagcgtagattgtactcctttggaggaatcctaacttatggttaaacctcatggaaaattcactttgtgtccatacgtggttgaatagttcttttgttttacaatttctaatgactatagatttgacacttcaactcttgtgttttcctaatcccgtttttaaattcatgagtcccctaacatattgttgtgtgttccacacagcagaacaaagaatcaacctgaattactgaactccaccgtaatagcttaagtgactataatttttcctattttcctgcgcactgtatgctgtaccaacacatatagaagtatctgtttaagccattgacaacaatacatgaagcatcatagtctatgttaaagttagccgtccttcttttgcctgttcagatgctaacaagctgtttcgtcaaagattggttcctacctgtcttccccgcaggtgaagtcgctgttttttttccatgcaactttgcaatcatgcttttgtcttttgcctgttgagattttcagaatggaacttgggggtaagtatcaggttagcagcagaaaacaacggggccgcatttcggcacactgcatccatcaaggaactgttgagtttgacttgccaggtacccctcttcttccagaatccaatgccccttgcccttgaaccctttatttttatttttgaaacttattgaaccctttattagacgtgctttcatttcccgtcttctttcatgtgaaacacccagagaatatcatcaggtcatcaggagcaacttttttttttagggaagtcatcaggagcacataaatgttttatcaagaaagccattttgcatagtataaaaagttcgaaattaactgttaacatatattgtagtaaacgaatgttagcatttggtagtaactgtcattaaaattaaattaatagaattttcactgattttttttctgttttctggatttccttttctagcaaaacttatccttgtgaattctagatctgtagattttttttttggcatttatctcaaatttaatctatgtgaaaggttttattttagatttttgttgctgttcaaatgacttattctaatggatttttacgagatgaacttttattatattagtagtgagctataaaccaactataaacttatgtgtaagagaaaaacaaagaaaatgcatgagtgttggctcttatacaagagaaagagaaaagcttcacattaaattcatagtaagaaaaagattcagacaaaaaatagagcaaactttatagttaatttattatacatattagctctaacatggactaatagctaattgttagctctattattaaacttgctcccatgaaacaccatagaggtttcaagaatttctcttcctcggtgcctctaatattgactgttgccccattcagtagaagagcctacggagttattgcagctgcagctacaactaggcaacaccattctagaccctcttcattactgcacatgcaggactgctcactaacatgtgggaccgatggtcagtggacaatgggacacatattattgttggcttgtaattgtagtaaatgggtagccgaataggccctgtatagaatgatagaataatttttgggagtagattacatgcacgtgaaaatttattaaacttcagtataactatcgttttgttattatatatgggtttagtttaattttgatttaagtttgaatgctttttccacgtaattttgtatatttatgaactgtaagtttatttcatgtttagggtataataatctactgctcaacattttatgaagaaaaaaaaaggttctcttttaaatgagtaagtaatggagtaacggaaaccattgaatcctcatctactccctccgtcccaaagaaaaacaaaccctagtttccatgcccaacatttgaccgtccgtcttatttgaaaaaattatgaaaaaaattaaaaaaacaagtcacgtataaaacattaatcatgttttatcatctaacaacaatgaaaatatgaattataaaaaaattttatataagacggacaatcaaagttggacacggaaaaccagggtttgccttttttttttgggacggagggagtagatgagaacttttaaaaatttcaagcacctgaaatctgatactcccataattctttatttgcgccgtgggccctctcatttatttttttatataatatgtggaaagaatattctatccttatttttttcgctcacaggttttctcttaattaccttttttttctcttttttttcgatggtgcatgaaaatactagtactatcttatactgtcgcttttcctctttctacgagtgtcagatatggtggagttcgagttcccaatgcttcagttggcccgccaaagccatccaatttgccgagacggacaccccgcgcgcgacgccacgccaccgcgcgcgaatttacgcggttgcccctcggtggagtccccttcgccgtaattagcccctacaaggaggggcagtctcggcgcgaaacgttgactcccctgcactcccccaatcccctccacgtcaacacggccctgccacgtcactggcgaactcttcccctgctccccggcgtgagcggagcaggtgcggacaaaacggcccctccaccatactaccagcaccacctgacaatttgcgttctcaccccaagttaaactcgtaattacgtgtagccccctcctaggctcaccatttataggagattttttttttcaatccggtacttgagaagggttggaattaggatttggggttcttccttggtgcctggtaatggctaaaataatccggcctagcgcacggtgcactcacgaacgaacgactgcctcggccagtgggggcgtactggtaagaaaagcccactcgttactcgttagtgctgcctccgcatcatctgcttgctacgctttcctttctcctaagagcattcccaatagaaaccacggtagcagtggtcttatatgaaccatatagcctaagagcatgtacaacagcgggctaaaagtcagctgtaaatatattttaaagagataaatgagaagaaagaagggcagtgggctatagatttgtagccagctgtagcatggatttcaagacatagtgtgtgtatgacaggtgggactagatattaatagtgtagtatgtaactattgtatgaatgagctattagattggctatagataaattggagctagtagttggctatactattgaacttgctctaaaatcatgctatataagagtaggacacactacttctattgaaggttacttcttaatccccccgtttcataatataagcatttttagagttggacacggttattaagaaagttggtaggattaaatgtgtgagtatagtattggaggataagtagagataggtggaaaattaaatagtgtagggttataattggttgaaaagagaatattagtggagaagttatattttatgataaattttaaaagctataagttgttatattttaggacggagtaagtaaatattacgaaatctgaggatactttgcgaagataagcccatcccagcccacaaacacaagcgctgttttcctctcctacccttttctttattttattcggcccactccccctcctttttctcgtctcctccgccccagcgcccggcgcctccccttctcttcaccgccggtcgtcggcgctgccgactgcgccccacgcgccacgacgactcagccccaccgcgccgcctccgactccaccccatcgcgccaccgccgactccgcaccaccgcgccgccgactccgccccaccacccgtcgcctccgctcttcgccgcgccagatccggtgggccgcgccgtcgactcctccccacggcgccgccgacgactccgcccctctccctccgcccttcgccgcctctctctccctccgcacggcgagaggtgcgcgcgagccgagccggagggggaggggagggggggagggagcggcggatgccatgggcagcggcgcgtcacggctgctgaccgcgtgcacgtgctcgcggccggcgccggcgtccgtggacgcggagccgtgcctggacgacgctctcggccactccttctgctacgccgccgccgccacggccaccgcccactcctcgtcgttccgccacggcatctccggcgccgcgctctccgccaactcgtcggtgcccgtcccgctctacaacgcgtccgccgccgccggcggcgtggcgccggggtactcctcggcattccacacctcgtcgtccttttcctccgcgccgctgcagctgtccaacctctcctcgggcccgctgttcctctcgggtcccatcgaccgcgccggccagctctccggcccgctcgaccccgccgtgcccttctctggcccgctccccgcaaagcctcccaagcccgcgtcctcctcatcgagggggttctcgaggaggttccggaagccgtccttcggcagcctgcggcggagcgtgtcggagaagaaccgcccgtgcgccgtgccgctccgccgcgacgacggcgtgcagtgggcgcacggccgcgccggggaggaccgcgtccacgtggtggtctccgaggatcagcggtggctcttcgtcggcatctacgacggcttcaacggccccgaggcccccgacttcctcgtcaccaacctctaccgcttcctcctccgcgagctccgcgggatcttctacaaggaggccgacgcggacaacaagaagctctggcagtttctcgtggacggcgacgacgacgacagcgagctcgacttctcgggctctggccggttcgcgctgtcactcgacaggctcaaggagagtcggtttcacatgtgggcgcacgccgcggccgacgagagcggcagggaatggggttccaggaggttggcaccggcgcctgcggtgagggaccatgcggcggtgctagccgctctcacccgggccctggcctcgacggaagcggcgtacttggacatgaccgaccagtcaatgggaacccatccggagttggcggtcaccggggcgtgcctgctcgtggccctcgtgagggacgacaacgtgtacgtgatgaaccttggggacagccgtgccattgtggcgcagcgtccggacgatggcgacgatggctgtgtgtttggaaccatgcggcggatggaggacgtcggggtgggcttggagatcgagacaaggcccggcggatgcgccattattgggcttaagccactgcagctgtcgactgatcacagcaccagcatcgaagaggtacattctcgttgacataggggaacaaatgcttacacgtgtttacatgcaattgcctttcttgtatccattggttggcacaatggcacgggcgtatggggatgctcatgtcgttgtttgggaacaatgtgctgacttatctgaatgcgtctgcaatatgactactatcctcttgcacttcaaaagccagaccattgccctttttcacttttgctttttatatttcagtacttcatataactagttatggtaagcattgttagtcgcttcctttttttatcattatttttatggctatgcattaatatcctttgtgttggtctgcaggaagttcacaggatcaaacgtgaacatcctgatgatgatcagtgtattgtaaatgatagagtgaagggtcgcctaaaagttacccgggcttttggtgcaggctatctcaaacaggtaattgtgatactgtttgagtgggtcagccattcttttaatttgattcttatacttacgatgtttgttttgtgtggtatacatatccatcttcagagcaagtgcatttgttgtcagtactttgtacttttaactagaaactatatctgtcatgtgttctgattaatccaatgccctgattgaattaatatagacactagataattcttgatcatagaacttcgtgtatttgtgcaggcaaaattgaacaatggattgttagagatgttccgcaatgattacattggtgatacaccgtatatatcatgcacaccatcgctttgccatcacaagctcactgcaagggatcagtttttggttctttcttccgatggcttatatcagtacctgagcaacgaggaggtagttttgcatgttgagaatttcatggagaggtttccagaaggtgatcctgcacaaagtttaattgaggagcttctctctcgtgcagcaaagaaggctggtaggctctcttctataccatacctcttgcttatttcaattcctgattgattctcgggtggttttttttgtcattgtatataacatcatgcgtatagaattggatgattatgtgcaaacattgatttgcctgcacatgtttgtctcggttgtcaaaacttcctatatcagtccatggcatgtgaggaacttctttatacttttaccaatcattcttgacataaagttctgtttgatgaaatagtcagatactcatgcaactccctcaagtttgtgatttgataaaattctaccagtgtatccttggcttattgcattgcccacctgtatatgagaccaagatacactttacacttttactacatcacaaactccactatggcttagagtgttagagatgattgacattgtcctagcttaacaattatggtttctcgaaactgtttgggccagtgagctaatcagcctgcatgctcgcacacttggagcatctgtccctcttgccaagaaatgaactacagctggattttgcaaactgggtatactgtttttcagcactatgtgtcctaaggtgcaagctggttaagcaaaacaaattttgcattgttggtgtaaagaacaccatggttcagttggtaattttggctctactgtaggatatttttgtattgattgttatgaacaacttgcagtcatcatcattggtacacgtttgtgttgaatatttgaatttcaatagatgaatgtcttgtcgaaacggtttccagttgtctttaatgtcaaatacatgtacctttttttttctcctttctccctcagtaataccatgatttaacttttacttttgtttctttaggtatggatttttatgagttactagatatacctcaaggggaccgaagaaaataccatgatgatgtcactgtcatggttatttctctggaagggagaatctggaagtcgtccggaacatatgtgtgatgatcagttggaacaatgtcgatgtcaatatttatggtgacgcatcaagtgatctcagctggtcagagcctctgagcaactgcatttatgctcatcaggggagaaacacccacagatggctgacagatgatgcactccatacatttgtcaaagcgattggagttggagccagcgttggtctagatcttagcttcagcacaaaacacagtccatgaatgtgctagagagttaattctcggttggaccaagattgcagagagagatgacacatatgaggaatccctttgcaaagcagagttaagaacactttcttttgtgacccgcttagttgattggttacatactcacctgtgacaattccctcacccccctcccccctagctggctagctatgctgcatagagattgacacttctttcatttttggagaaagaacgtctttggaaggcgccgttttcatgttcatgtcaggaatgggaaggaaatgtaatatgattggatattcatggtgaagaaattgaaaatgtgtccctcatgtggtgctcaacatcgttttcgtaaagtcctgaactcctgatagtccattggtattttgcgtgctcgaataattaggacagcagttgttatttgttcggttggtcctatatctactgttgttcgcagttgcctggaatgggccgtggtttttgctggctggatcgatctctcttggtatgggtcgacgccagcttgttttcaaacaaattgcaagtgctatccatttgatgattcagtcaacgattcagcaccgtcgaccagaagatttctaacatttgattctgatttcggtatcggctaagcaagaagtaaaaggcaaacttaacgctccatttggaatgatggcaatttgcatgaatttcatatctgaaacgttttcacttcctgtgtttggcgtaaagctaggtatatttataagtgacactctgagattacaaatgtgtgcactcaattctgaaactgcatgcttgttccaaccggatttcccagctcaattcaactttcaaccgtttgatctgaaatggatagttgcaaccgaactccataagattgacctgcagtcatctatgtaatccattcatccccagtttcaaagtcattgcaaagatcaggtaaaccttgtaacggaggaatcccaagatgaagatatcaaatctttgagatactctagcctatggttggatctttaggtaacaagaaatttacaggagaaatcacttgtacgactagcacgatctcttggcagattagtacgaagcatctgatgatatattataatggctttacgatcggtgataattcttaggatgcattttatatgtgcattagtcaacgtctggaatgattcttagcgatcatgagctgcgtttaaatagtcctttgataaattttttttcaaggatttgaaagccatctgcttgtgacgtacctactggctactgagatacgaatcgcattacagggtcaatgcgaacatgatctgagaggtatagtgcgttccatgtatacttatgcatcctcagatcagagagtttttctattggtgtattgcacgttagctcagcgtacacaattgtgcaaacaaaacataatcacctttctaattattttcgtctgcatcactgcaaagacgtttgagattttcagtacggaatccgttcttgaaaggaaatggtatcttgttcttgacttgtaaatgttaagaactttcggcgtttgacttgagcaagtggtggtatcttacttgtttactccgaggagcttagagcgcgcgcgtctcacttctaggacaggaaacatcgtcgtgcgaagcgctcaaccgcctgcaactaaaatcatatgaactgtaagcaaaagagttcaacaatatacagccttgcaagagaaaagcatgaaaatccttaaaaatcaacaccaataatcggaagatatctgccgtccacacccaaagtgtctgccgtctccatttaacaattcatgatatgcatatcacatttgtcattttcttatgttttttgttttaaattaataccatgcatattgcatagtctcctcctaactactccagtaaaatttaattagtggagatattaggattgcacttggtcatcatttgtcaagtatggccacaaacatttccaatttccatcagatttatggatgtggcatggcatacatatctcgaaaaatactacataatactatatactatgttttagaaaatggaaatgttttgcacgtcacttgaaaaagtccaatttacaggtcacatcaagcttccatgagaccatgaccttctcaccactaattgcaagcatctcttacctttgactattgacttgcacacttgccagcccatatgcccctacaagtatatataatgagcccaccgtgtcattacttgctcagcttcagctctgtgactgcgacgcgaacccatggccgccatggacgagcctcctcagctattcctctgcccgatctccatggagctcatggaggatccggtgacggtgtccaccggcgtgacgtacgaccgccggagcatcgaggagtggctcttcgtctacggccggaccacctgcccggccaccatgcagcctctctccaacttcgacctcactcccaaccacactctcaagcgcgtcatctcgtcgtggctcgatcgcggctcgtcgtcgtcgtcgtcttcgtcgccgtcgacgtcgacgctgtcgagcccgatccacgagctggcgacgccgctgtcgcgcgcgctggagcaggagcggttgctggctgcgctggccgagctggaggagacgccgttcaaggtgaccaagctgaagagcatgagggcccgcatggcgggcgacgtggcaatgcagggggagttcgtcgcctcgggcggggtgcgcgtggtggggcgcgtgatggcgcaggcgctggcggagagcggcggcgacttctcggcgttcgccgcgtgcgaggaggctgccgcggtgctcgccgcgctcccgctctcggacgaggcgtcggtgcgggtcgtccttgcgccggagtgcatcaggcccgtcatggcgctgctccagcgcggcggcgccgaggcgaggctgcacgccatggacatcctcaccaagatctccagctccggatcaggcggcgactggaccgccggcgtcgacatcgacgacgtgatcaagtccctcctcgagctcctctccgacgaggcctccacgaggctcagctcgcgcgcgctcgacgtgctcctcgacgtcgtggagcgggcgcggggcgcccgcgccaaggccgtcgaggtcggcgccgtgcacgtcctcgtcgagctcctcgccgacgccgacgaccgccgcgtcaccgagcgggtactgctgctgctgaagcggctgtgcaagtgccccgaggggcggctcgccttcgcggagcacgacctgtcggtggcggccgtggcgaggacgatgctgcgcgtgtcggagctgtccacgcagctcgccgtcaaggtgctgtggctcgtgtccgtggtggcgccgtcggagaaggtcctcgaggacatgatgctgaccggcgccgtcgcgaagctcctggggctgctccacgtcgagagctcgccgtcgacgaagcagaagacggtgaggatggttaggatccacggggtagtctggaggcagtacgcgtgcttccctaccgacttcagggactacctcaggctgctcgattgattctttctcccctctctttctgattaccgtggctaagctgtaacaacaaagcagatggaaattgtgtttttttttctggtccctcgaaaaaaagaatgtgtattttttacagaaaaaaatcggaaatgtgttttctcatcacgtacaaaaaaaaagggaacgtaatgcatttcaagtattcaaggatatcatcgagattttcaggcgacatttcccctggttttttcgaacaaaccaatcaagtttgattcggatattatcccccctgatccaaattctagctgttggcaccaccaatctataaattgcggcatcggtattgatgaatagagcttttttacaggccacatcttctagcgataatacgtgacacttcgttcgtttcacaatataagaatttcttacctgtatttatatagatattaataaatctagacacatatataaaacatatacattcatcaatgaataaatgtaagtaacaccaaaaggtcttacaatataaaacggaaagagtacttcttaactccaacacttcgatggtaagttagtgttgcataacaaaatgttcctatgcgtgagcccgttgtctacattcagtctggcttttgtcacatgtctcatacaaccttcatcctaaaatataattatttctaactatgtactctacctagaagtatgtaaaagtatatagctaaaagttgctatattttgagataatggtagtataatattgatgacaaacttagaagttacggttgagtttgctaggagcttgtttagggagcaggaggagtaaattctagagggatcttagatggtcttattgttgaggctgcatttgaaaagaggcattaattagataataattcacgaccttttagatcaggcacataatgcggtaatgcccatgaaaatagagtagagtaggctagacatcctcgtaaattatggtatagtctagtccatgtaagttaattttatgggcttccaccacgaacaataggttgttgggaaccctcagtgagggaaaggagaggctgagagggtgtattgacaatatcaaacaagttataagtgtttaaaaccttatattataactatcgaatctttttaaaaccttatattataactatcgaatcttactttggtctaacaaatataatcatatcgggccatggaaatcaagaaaagtggcaattgatcacttacatgttcgaatggatgaatttatgtgcaaaagaatgtccatatatttccttttaaatcaaaacattctcttaagggtaaatagacgataccacaacaaaagtataccaagcatcttaccctatgtcaagactttatttaattggcaacaacacatgctactcatggtgtaaatctcaacaaaaggaatatcatgttatgagctaaataacttgaatacgaccctacgttaatcattaaaaaaagagtgaatttcgtataaccacatgttctatggtcaaaattgcagaaaactgcatgcattatgacttttgacttgtgacacatagtcacatatttttatggtctaaatgtttcataaaaccccaccttgattcaaatttcaatttgatttatcatatatgaaacaatatttttcaaagtagtaaaaaattaagctaacaaccttaatcaaataggagtagacctacttaaaagcaaatgttttgggacgatggtttttccatgtcttaataggtattgaagtctttcttacttccagtaaaactatgcaactctgtttgccttctgatttttattactagtagcttaattaagaatgaacataattttacataaatttcaataaataacttgaaaaatttagaaaaatacttccttccaataaagtctaattacgtatgcatgactaattgacatatccattatattggtctatctttcatcccaaaagagagaaaaaattgtcttgtttgttaaccaactccacaagactacattggttctgttcttgagaattattttcaggtctacaattattgcattctggatttgggactagtaaaatttcttcaggattattgctgctactactgtttcagatgcgatgaaatttgaaacttctcgtgggggccatcagtccaacaccaaccgagcttacctacaataggcgaccacggaaatatgctctcttgcgaggtccatctcgaaaaagtacacgaaaaagctccccggaagggaagacgacctggggctggttgctcgtgctgcccccgagatctaaccaaaacccgcgtcccatctcacctcgcctcacctcaccatccgacgagcccccggatcaccggctccgacctgtcgccggcggagagcgccgcgggatccaggcgttgaggttggggagcggggtgtgtgtgccaggcgctcgggcgggggcgagcgggcggcgacgatgccggtggcggcgtcggccatctacttcctcaacctccgaggggacgtcctcatcaaccgcctctaccgcgacgatgtcgggtgcgtagtaccgttcgcaatcatccccccctcgcctcgcctcgtcgtctcgccgcgcctcctgcgcccgcgccgctcgtggtttggagtggtagatctgaggccgttgggatcgattagctccgtttcctagctcgccgttgcgcggatcgcgcgaggtctagtggatagctcgtgaaattccgctcggaaaggcttcgattagcgaacgggatgcggggattgactcgttgcgtgctgaaatttggcccctaccctcaggttgtcgcaataccatgtggttgaatttcggaatggtatctcgttctttagcttgtgattgtggaagctacatgttttgcagcatgaaggaagatgccactgactgaaatactgaataggagaattagttcgatttcaccttggatggctgtgctgtggtggtcgattatctgaaacaattgactttatactatttcccctccacattctgaattcgatgttgtgttgactgaagcatttcatataagctgactgctgcatagctcatatgatctttcctagtggtttactatcgagaaagatatagcaagtggccttgttgtctttaatacgatagccattattttctaagggtgctaaaaatgtaaactaccactaaacattttcggtttgcttgtcttacttaaaaccctcttttttttggtatttggttgcgtgcaagtttactgaccacctgttttgctcattatgtatgactatacaggggaaatatggttgatgcattcaggatgcacattatgcaaacaaaagaactgggtacatgccctgttcggcaaataggaggctgttcattcctttacatgaggattagtaatgtctatattgtgatcgtggttagcagcaatgctaatgttgcttgtgctttcaagtttgtcgtggaggtatgcaatttatatcatctttgaataatttggaataaaataaatataacatgcatacatattacatctctatgatctagatgaatatgaagctcaagaagtcaattgttgttttttccgctagaaatggtatgtctatgttagtgtgttgtagcatagatggctagtctaattcctcaataagtccagagcaaaagaatctattagttactaaagaggcatatgatttttctgaagttacctgtttaataataataataattttaaattgcaatatgccgtcgaaaagtttagacagttttaccatctaatgatggtatgttttgggggcaactagaattttctatcgcttaagcgtaattgcgtaaatggtgatgattttttgaggaaccaaaagttttttttttccttgaatggctacatggtcgatgttccttgttaatcattgctggaaaatactccttaagccctgtttcgatgctttctataatttcttaagccctgtttgatgaggctgactgggcgtagaattagtttaactagttggtagatgtgagtcaataatgaagcttcagttataaattctagacatatatccttctgatacctgcatatcatcctctagtgttttgaacggttttttatgtatgattttttttgtaaattaccaggcagtggctcttttcaagtcatactttggtggtgcttttgatgaagatgctatcagaaataactttgttttaatctatgagcttcttgatggtaagggacatcttatttttggactttgtttcatcaatttgcactgtggatgcttctatttacctgtagaactgtctctctcatctaactgtgcagaaattatggacttcggttaccctcaaaacctctcacctgaaatcttaaaattgtatataactcaagaaggagttcggtcgccattttcctccaaggtgagaaaaatgtgacattgaaataagataaccggataaaaagtcacatcaaatagtttgttgctcatttattttgtgtgaaagcatctgaatcattttttttttgttctctgcactgatagccttcagataagcctgttccgaatgccactctacaagttactggtgctgttggttggagaagagagggtcttatgtacaagaagaacgaggtgcctgttccaaatgccacctccaagtttcatctgtatttggacatattatgcattgctagctagctagcatttctaataatcccagctcagcatagatgctagtaatgtcagaacgctgcatgtatttcgacatgcagaatagttttcatacatattgtcaatgtgcactagattgcctgttacagaagtagtccatactttatttgttgatttctttgttgccattttggttctgcatactttatttctttttagcactttgcatgactctttttagcattgagatacactaatatagtattcttttctcttgaaaggttttcttggacattgttgaaagtgtaaatcttcttatgtcttctaaaggtatttcatggattactatgattttattgtactgctctgatgtttttgttgtccttaatgttgctttgactgatgtttaatgtggaaattgccttctctgcagggagtgttctacgatgtgatgtgactgggaagattcttatgaagtgcttcctttctggaatgcctgatctgaaattgggattaaatgacaagatcgggcttgaaaaagaagctcaactcaagtccaggcctgcaaagaggtatcactttatcaataattagtacatgaagaaaaaaaattgagcatctggtttttctgattagtatagtttatatggtatgtacacaatctttactactttaactgaattgtctgctggtcggttctcctttttcctcaacagcggaaagaccattgagcttgatgatgtcacattccaccagtgtgtcaacttgacaagatttaactcagaaaagacagtcagctttgtgccgccagacggtgaatttgaattgatgaagtaatattatgatccctccttatgcttgtattagttttcccctgtagtgacatttttattctttacttggcttttgaccacaaaattctgttgtagatatcgaatcactgagggtgtaaatctcccattccgggttctaccaacgattaaggaattgggccgaacacgcatggagataaatgttaaagtaagtgtgcatatctgaaattgtgaatgcatgaggccattatcacgttttctgacacgatgaaccttttacacaggttaagagtgtttttggtgctaagatgtttgcacttggtgttgtcgtcaaagtccctgttccaaaacaaacagcaaagactagtttccaaaccacatctgggaaagccaaatataatgcttcaattgattccctagtgtggaagtaagtgcaaattatttctatatagcagtttatctatgagaaagatgttctttggcttttctttttatgggttaggtcttgttctggcagagcataaacataaacctaccaatttttgttggttacggtgtacaaagctgtatccgatgctatattggctcaattttcttactcttgaagagctactccttgccaattttgccacaaatttattagcatgccttttgcactcataagtcttgacacacttctgcaattataggatcaggaagtttcctggacaaactgaggcaaccatgagtgccgaagttgagctgatttctacaatgggggaaaagaaatcatggaacaggccgccaattcagatggaattccaggttaattttacctccttttgaacaaccctcttatcattagcaaaatctgtcagccagttcattttatttttgagcttacagaaaatgcaatgttagagatatcataacagttatgaattaaacttgagcatgcacaagaaaaaaaaatggtattccatcattcgttggcctttgagtatgtttattatccgaggtgttatcttgaagtgttcttacaaaaaaaaacatcttctgcttcattgttatgctgataaaatgtgccttcgagtttggttatcttgtttaaccatgctttctgatttgttgtttctgtaggttcctatgtttactgcttctgggttacgagttcggttccttaaggtacgtgcagggaatgctaatatagaacctttttaacacataccagacagttcagaactcatgttgagatgcatattccaggtgtgggagaagagcggttacaacaccgttgagtgggttcgctacatcacaagggctggatcatatgagataaggtgttagcgatgaagaaaaaagtcccaggtatttggcacggttatttcaaggattcgcggagctttctttctagtacggcgtcatgaatgatcataaagcatgtatattacatatgacaccactttttctttaagctattactttggcaaagggtagagcagagcagacaaattttcctgggttcttgtaatcgttttgacacgggatatctagtatcccctgagtcttgtttgtgtggtagggcatattttcatttgtatatgagaagatggcggtagcgtttgttcttgttgatcaatatacatatactcattggcagtttgtattgctttcttattaaattgatgggtgaattcacttgcagaagcaatgtgtataaacatgtgactcgacggtgctcgagacatcgactcctgaagtatacagtgtcttaacattttttgaggttttttttgcccttttgcgaatgactatttgtgattgccaccggagtccatgcgttttatagggcttacattggtatcgaatcaattttcgtaggaatctgaaatatttcctgcgtttcatcatagtagttgatgggttgagatagagatagagaaaaactgaggagtcagctgatttttatgatagctatttattaagatacaaacgaataaattaattcctacagagttgaaatcaaaaggtattctaaaaaaatattactacacctagtacaaaggtgaaaacttattttagaaaaatattttaagaatagggtagtagcgcatgagcatccgattcgatatggcacgcatctccgtggcgtcgttgacactaacaatgtcgcgtgattcgtacgggagtcgggacagcctcctcttgatctcgtaaaaatattagaacttcataaaataacagaaaacctatacaacgatatcccattagattaggatacccttttatgagatagtatctgattcttttgtgatactagctgtatggtacccgatacctgtaataccatgttacatggtacctataataccgaggacatgaaacctgtgatactcgcaagagaatagttaatatgtctatcccgttgtagtgggatcccgttttatagcagccctcgataataaagttagatagattttttgaactttctttttttctctaatttgcaaatctatttttcgatctcgttttcatgtccaactttaattgtccattttatttaattttttttaaaatctaaaaatataagtcatgcataaaatactattaatactttataatatactaatagcaacaaaaatattaatcataaaatttttttaaataagatgaataattaaagtactattcatgttttattctaatatactaatagcaataaaattattaatcataaaagaattttaaataaaacgaacaattaaaattaaacacgaaaacttatagctacgcttattttggatagagggacttgattggctgagtttgagagtaaaggaaataagaagattaagaagagacgcaaaataaggtgagctattagcgcatgatgaatataactattttaaaattttaaaataaattaatatgattttttaaagtaacttttcaatagagttttttttaaagaaaaacacatcggctagtactcctccgtcctataatataaaggattattgtttgaccactcatcttatcttaaaaaaatttgtacaaatataaaaaacaaagttatgtataaagtaatttgaataataaaataagttaaaaaataaataataattttaaattttttttaataagacgagtggttaatctttatattttatattagggtcaattgcatatttgccatcggtttgaaccggtacggtgaatttgccattataaaaaattttattgcatatttgccaccaaacacagatagaacccaacaaccttgccattagactcacagatcagactaacactgttagaaggttggttttgatgaaaattaggacaatgttaccttgccaaggaaattgaagcaacagagtctttcctctcctttttcttctgccgccatggtgctgctacaacatgttgctgttactgcagtccgaagcagcaagccgctgcagctgcccaagatgcagccgtgctcgccgatgttgtttgccgcagcttcacaagcctctgccgtgctcgccgctgctgcttccgtagcgtcacaaactgccgccgcgccgtcacgccgtggccgcccgccttgctgccccgcaaaatccatccccgccttgctgccttaccatatcctactttattgcaaccaatttttgtttgatttgctcttgatttggaagaagagatgagaggatttggggatgtagtagggttcgaggatagggaagggaatcggccaatcgggacctgcctttctgggagatgggggcttctgcgtgcgagaggggtagggaggggggcaaaacggtcttgttgtgcagctttgtttttcacattagttttatgaattatttttgtcttcttatttgcactagctcaaacggtaatggtaaacggaaggtacacatatcagttttaatggcaaatttgcagtttgcgtttttttaatggctatttcgaattagagggtaagagtagtggtatatttgcaattctccctttatattatgagatggacggagaagtagtttgggaaggtgttttctctcactcaatctcccagcaacgaatagcaacctaggttcccatcgcaactgaccgatccccagccgccgccgccgccgccgccgccgctcaaggaagcgcatcagatggcatcgccgtcgctcagggacgccgtgggcggcctcgaccgcgaccccttcgtctccctcctcgggaagctcatcggcgagtcccgccgcctgcagaacgacccgccggccctcgtcccgcaggaggacctcgtggcgcagcacgtggtcgacgcgctcctcccggtgtccatggagaccgggggcggcccgctcgtcgtgcggaaggtgagctacgccgagggccggagcaacgtcatcgtcgagtaccccggcaccgtccccggccgcgccatctccttcgtcggcatgcacatggacgtcgtccccgccaaccccgacgaatgggtaggttgctatggagattgttctcctgacgctgtcaaaaattgcttctcaagtttatgcttctttatgaattaatgatttgagtggttgcttgatttggtgtgtttctgccggatattttgattttgtgatcttatctaatttcgttgatggttgcctaaattgcatcattctcatatttacgggtggattatcctggtgagtagtgaccttgtttatgtgagctggtgatttctccatagtaataaccgctttgttgtgtggttgttgtaagaaaataataagttgcatgctagcgttgcataagcatattgatagatatgatgggatatagtaatgtgaaaaatggcatattgtttacttccactgtgttgtatactgcaaaaatctttgctcaatttcatgatgtttatttttgctcgtgctagctttgttgcgtcaaattactaaaaggtttacctcaagtaaatttctccttggttctaattggtggcccaaacgtctctacttgtccaggatttcgatcccttctcactaacgtttgacagtgaagacaaggacaaacttaggggccgtgggacaaccgactgccttggccatgtggcgctggttgctcagctcatgaggagacttggtgaggtcaagccggtgctgaaacattcggtcattgcggtgttcattgccaatgaggaaaactcacttatcactggcattggtgtcgatggccttgtgaaggatgggttgctggataagctcaagaatggacccttgtgagtattgtgctgtttgatgcatggagggaatgtccgactaaactaatgtgttgttcgtgaggaatatgtgctgatttggttgtcattgttgtgtggcattgtgaaggttttggatagatacggccgataagcagccttgcatcggcaccggtggagtgattacatggcatctgaaggcaattgggaagctattccacagtggcctcgcacataaggtacctgatttgaacttgtcagaactcagaatagtgtacttgttgtgttatatagctccagtaggttccagcaatacactgcttcgtggaaagaatgcataaagcatatggttcattttctatgacctgtgttcttttaaattgtatagctgcataaattaagcttgcatccttgtagttagtgcaaaagcaacaatttatattgatcaatgccaaattgaaatgacacaaaaaggataaggaaagtgactgcttaaacatgagttatgttgcaacttacagcgtgatcactctgcttttgaaatgttatctgttgcaacattaccccttggattttttttggggggtaaaaagtgcagaacgtgtcttcatcatgctagggaagattcattcgaatattcaattggcttagagggacaaaacaatttcaaacatacaagttgggagacaacaaatattgtatttgtatatgaattacttttcttttgtgtgtgtcaggccataaatgccatggagttaaatatggaagcactgaaagaaatacagactatgttttacaacgatttccctccacatgagaaagagaagctctataagtttgctaccccatctacgatcaaaccaacaaaatggagctgtatgttcaagttttacttgtgttttctaatgttacaactttttagttgtgtttcctaatgttaaagaaaaccactgtgtacaatccatgcaattaacaaatggtgatttgcagatcctggtgggggtctgaatcaaattcctggagaatgtacaatttcaggggatataaggtccaactattgctatatggttcttgaatgcactttaattgtactcaaaagaaaaatggtccaagcttttgttttattatgttcatacattgttataggcatggggacatgcggttggtgaggctttgttcctcccaggggccctaccataaatttgcttggtcatttaggcggtgttcttttctactaaagatgaagttagggcacataaaataagaaagccaatagtgcatgattaattgagttttaattattaaaaacttgaaaaatggatttacatgatattttaaaacaatttcatatagaaagcttaagcacaaaatgcaccgtttagctttttaaaaagcgtgctaacagaaccgaggtaaaatctatgtcttaatcagaaaagaacggggccttagtgttacaatgcagcagagtatcactgcacaaatttttatatgtttgcaggactaggggaaacaaaataatgggatcaccagtatttcacaagtcacaacattcaataaagactgatgcttctgttgtttcttccatatcattgaaaaatagttttttaaattatactgaccatatttttgtacatattacaggttgactcctttctacaggtaaagcccatttttcatgcatggactgttctctctcataattttgtctccacttctgccgaatgttgttttaatttgacagttgcatgttgccattcatacagcacgacatctgtagtgaagaaattacaagagtatgtacatgatataaatgagaacattgaaaagcttcctactcgtggtccggtatctaaatatgttcttcctgatgaaaacctccgaggaaggtgaagcatatatgactttattctcttatggcagtaacagtaaccatcataatttacagattgattatcaattcgccattacttaccattgatcttgctaggcttgagatcactattgatgaagatattatgaatggggtggcctgtaatctcgagtcgcgaggctttcaagcattatgcaaagcaactgaggaaattgtcggccacgtggaaccatattccattactgggagtctgcccctgattagggaattacaggtttgagaggaaactggtgcaagtgttatcttgggaacaatcgccatttaactaaaacaaattcctcttcaaactttgcaggatgaagggtttgatgttcagactgctgggtatggtaagtaccttaccaaaaaactgtttcctgatttctttaggtcatgtcatcaatgaacaattaatggaaaagtctgttaacagtattcacatggttgagagtagtatagattaaattatgtataccgttcattttttgttgagttccacttggcatcctattatattgatatactatcgcggtaaacaagtggaaatgtagacagtgtgctgtaaatgtttatctgatgcttcttctgttcctgtaggcttactcaagacataccacgcaaagaacgagtactgtctattttcagatatggcccaaggctttcaagtatttctgagcatcatttcacagttggaagcagatgtttgagtcttgttttagggaggaaaaaaatgagcgttcactggtacttattcctgttacttgttgctctaataaaggcactcacagtgcaagctacccaaaatgaggaacctcaggctaaggccacacctcctctcccacggtgcaaagatgctttagggtgttcttagtttttcatgtaaacccttgtcatcttctattctagtcctcacatgttttcaaacaacataacatacaaaatttaccactaaacaccctaaaatgtacaaactagtataaaatttctcccccgccctcaatctctccgttccccaatccaccacaacagcgccaacggaagccggcggctccccgacctcttcccagccagtggcttggagggcgacggcggcgtcacgagaactcgctggggccccttctctccctgctggcaacgagggtgacgggggcgccgtgagagctcatcggtccctccacttccggtcggcgatgagggcgcagaggggggcggcggcgcgagagatcactagcccctctactttcggccgacaggccgatgacgagggcgcggagggcggctgcggcgcgagagctcaccggcccctccacttctggccgtcgacgagggcgcggagggcgacggcagcgcgagagctcacagggcccctctactcctagccagggtttgcaaaaccgtcagtaaccgcgcggttaatggtaaaagaaaaaccacgataacctccttaaattcaaataaatttaaaaattaatttgaaattttgataaattttacacggtttcgtatggtttgccatggttaccgcgcggtaactgtgtttaccatcggggcgtggtaacctcggcggagggggggggggggcgacgatagatccacaatgccgtggaggctggggacaagacgacagtgtcctcggtctcgtctccacggcgcgggagcggagcacggggacgaactcagcgaagcagagcggagcaagggggcggcgacggggtcggtgacgcagagcgggagacggtgacgaggtcggcggcataggagcgggagatggcgacgaggtcggcggcgcggatcgagaggcgattctcccttgaggtggagccgacgagctcaccggttgccgctgaatcaagtttccctggcgacgaatcgagtaagctcgccagagtgggtctacctcctcgccctagtcctctcctcgttcattcctctccgcccattcctccctagccatcgccatcgccgcgacccaacctgtccccgccgctttttcccgtcctttggcttctcctcttcctcgtcagcacttggcacccggcgagctccaagcctgctcagatcttggcatggcagcgtgggttggcggggacgaatggggaacatttgggagtagcaacagagaggggaccgctcgcactttctttttcaggcatgaggaacccggaccctagctaggaggcgcaaaccttgcaagggcacgagacccacctccttttctcctccacgtcaacaaggtaacgctccacgtaggagcattgtgaaaggcttaatagttctctgctcttggactcagtccattgtactaggaaatcgagctcatgttagagcataagcaatgggtggcttagggtcgtgcccttgctcatggccgtccgacccagttacctttcgcgcctgagccgtctcctctgctaggcacgcgactactagcggggggacacgcccctcggtcacttttcgttgagacggcgtgggggcacgtgttgggtgcgcggtggcctggcgtgtgtccagtggacaccgctcccacccctatattttaccgttccacccctcgccctcgtcgttggaagtaggcaagaggcacacggcagtgaggaggagctagaggaggcgaggtggtggaggagccggcgaatctgcgatgaccccgcggtggcgacggccccacgacggcgacgggctcaccagatccagggccggcgacgaccccgcgatgccaacgggcggagggagagcggtggcggcgcggcactcaagatccaacctccgcgtgccgctcgccgtggtggaggagctgttggccaccctgcgcaccatcggcggccccacgaagatccgcgacagcgacgacctcacggcagccgacgacgggagagagaggccgatgggagagagaggccaccccgcgctcccctcgcggtcgtccaccccgcgcgctgctcgcctttcgccaccgtgcaccgttcgccatctatggaggagacgagaagaggagaggaagagacaaggacggcagcgtcggtgggctgatgagccctttagctgggctatagaagggtactttcataatttttcactttgtgggctggagtatctttatcaagtggtctcagattttgaagaacccattggaggtatccttcagtgagagatgagttccctagaaaggatcctcagttagtgaagacactctaagggtggctttggatgtagatgcccttgtaccacgtagaagctcttgtcaatatcgaacaattccattgtgtgtgacaatcaaggatggtgcttttccgctgggccattttcgtgggttgttctgacaatggcccgaacttatgaagtctgacaggcagcatttgttcagtttctcgtttcatgggctgcatacctgatggtcatcctcaatagccaggttgcaatggaaatccatcatcttggtgcacgaaatgggaatatgggatatcactacatcctgggcctagggttaccacatttagggtccatttgattgttagcaaaaacataggaaattagaagattttgatttgtatgaaaaacatagaattttagaagattttaatcgtataagaaaaaaatccaatgaagtcttttgaagcaaaggattaaatcatatcttttccttggagattcgtacggaatgaacaatcctatacgtattttgaagaaaagttagcaagaattctaatatctttttcatccgattcctgcgtttatctcacgtcctaaccaaacaaccatcttgtgtgtttgcaattatctattttgcatttgttttccttgtcaaaaaccttttttttctattttttttgttttttttaatttttgttttctattcgtttcaaatgaacctttacactttataagctcagtaagtcattgacttgtccctagactgtcatatgttcctaagtaacctggatcacaggacgagctaatgttcctgtcccgggaacgaagcatctgtttgttcctaagtaacctggatcaccagatgagctaacgttcatgtcctgtgaattttgttccctgatcgagggtcgtgattgatgtatgggatgagcagggtgttgcacctagcacaaggccaatcgtcatagtaaaaaaactagaatcggtgggtgacccgaccgacctctcagttcactagtcttggcttgggcggtcgtagttcacgtatacatttatgttattattcctttctattcacaaggtgaggaatagtatgatggttagggaatgacgtgttggaaatatagtcatatatcggcatattttaatccaaaatattaagacaataataatgcatgaacaatgtgggatgatctagtgataaaatctaacataacaggagcatgcttaagatagaataagcatcatcatcatacaaagaacgcaatagaattgcgactaacaaagatatcaaaaattgaaataacagtaaacgcagaaggttatacctgtgaatgtccctccgctggattgtgaggctgaaggtgtggaagaaccccacggcctcggcccggcgcgccgcgcgtgtggctttccgatccccacctcaaccggtcaatagggagcctccaataactccctatttaagttgagatactcctcttttaattcccaaggtggtattattatccttaacatttattatgggcctttgagatttaatagaataaatcgggcctagcccatttattctaacatgacattgtcaactcgctagccaatcagtagcgattttgctatatatttgtcgacaaattttctcccaaaaatttgacagatgtaattacagtacaatcgtagtgtaattacgctgtaacttgcatgtaattacactgtaactatagtgtaacttgtatgtaactttcaaaaatctctctgtaatatgttatttcggtaaaatggaggttgtgggaacaaatccttatacatatgtgtgtgccgtgattttttttcttcctcagcaaaacaaatcttgtaatagatataatgatttaaaattacatgaaacttacgtacaagttacactgtagttacatgcaagttacagtgtaattacatataagttacagtgtaattacactacgattgtattacaattacatctgtcaaatttttaggagaaaatttatcgccaaatgtataggtggtcccatcagtagtggtttaatgtctggttcacctgaaaaccaactggttctctaaatgcatgtctagcgagttgatttttaggtgaaccagatattaaaccgttactgtttggcagcgagttgacaacgtcattccctaaccatcatgttattgctcaccttgcgagttgactagagcatttgtgcaattattgttcattcatccataatacaaccaagcaggagtggggtttattatcttccgatgacccaacctaaaatatttttgtatttgatttagtgatcatagccccaaaaccccttttgccaaacaccaggtccctcacaaatctatctgtcgactacagaacatcgacaacgaccatcacattgcctcagccagcagacatgttactagcaggataaaggaagaggtggtgaagagaagaggaagggatggagatggaggttctatgttgcctggtcgtgcaagaggcactgactgatagcaaccgagcaggagaacaaaagattgggagctgcttggggaaataagtgaagggggattatgttaacgggccagacaagtccatctgccctagctaacaacacaacgagagaaagggaggagcttggcactagatttgctcgcaccacctcttcttgtgcgagcgtcactcgagttctctggtctcgacgctatgttataccttgccttcttctccaatgtcctctcgttccgatccatcgtccccaagaatgtatatggtcatcgagccacgtccctaactagcatatcctaaataagtagtatacccctgttgtcccatgctttcgaagatgtcgtcccatatttctcgttcctgttcctcaaagcatcaaaccccgcgggagcattagcgactagggttcattccagcaaggataccaaagcaagcgcgcagacgcagaccagaccatttgcgcgcctcgcggtgcagcagcatgcagtgctacctcatctactccctccggctaaaaaaagacaaactctggatttccgtgtctcgtttgactgtccgtcttatatgaaatttttttataattagtattttcattgttgtcagatgataaaacatgattaatactctatgcgtgacttgtctttttaatctttttcatattttttttaaataagataaatggttaaacgttggacataaaaaaccgagggtttactttttttttttgggtacgaagagagtagctgttacgaccacctagcaggctagcagtaacatgtgttgatggtgcgtgcggaatgaacagccgcatgtggcgaaccacgataggacatgacatttcgtttcacgtaccgtacgccgtcggtacgtgcaggtctatcgaccgcgaccgaaaacagccaccagatcgatcgtggtcgtggatcagctcaaccacgtaccagattctctgcccgaccgatcgatcgattggcactacgtgctgttagtactagcctagctagctcgatagctgcaggggcagcgtcacatatgcacgagatgagagacgcgcaagcgtacactccgtgcactgcccagtttccttcttttgatgcaccagggggtccagggccggatcgagctgcacacgcaccaattaacacgtacaggatgccacagcttttgtaccaaattacaatgtagtagcaaggctcaccagccgcggaatgggttaagctcccgtgcggtccccgacctgggcgcgtcgtcggctagagtagcgctgggtacgcgattgcatgggagtactcaactggtcgggtaattggggcatggatgcatgagctgtttcggttggttctgcggttggctgtgacctgtcacgttttgttgctttgcttggacacatccacagcccctgccacgcattaccccacgactatgcgactgatagaccactatagtgtttttactgtttttacagggcatgcagagacctcgtacgtccttggggttacttacgcatattacttttcgtgatactagtattcaaaaattgagaatggatacatctcaagaaaatgagaatgcatcaagcaatggcggagaccccaaatgaaaggggccaactacagagatgaaatcgatcgcttctagagaaaaaaaaaggaaaatgaatcaattacatcagataatcgttcttaagcatgaatgataatgtgtgcctgagagcacaaaacctctgtttccatgtttgattaatacatgatatataatatatgaccgtcatggacatgtgatttttttaatggaacatttaactatttaccatttttaagacgtggcgtgaataatttatcatttatagtttatgacaagtgggtccaggtaaactgttaaacatcacatctaacattggtaaatagttaaatatctttttaatgggtacgcaatgtttaaaattattttgagcaatgagaaaatattccatgatataacaacggaagaatatataaaagaaaatattttcatatcgctaaaagtatatcaaagcctcttatttatattcgtagtactaggatgagactcatcttataataagttgttaaattttatgccggagggagtgaatagtgataaatgtttcaaaaaaaatagtaatatagtcatataggacgcatcattaattgatgctatgcatgtcctaaaatgtcatctgtctaagatccaggcagtactccctccgtcccattttaaacgtagccatgacttttcgtgtccaaatttgatcatccatcattcgaactttttatgattagtaattttagtgttattagatgataaagtacttttatgcataacttatgttttttaatttttttttaaaaaaaattcaaacaagacgaacgatcaaaattagtttgcttggggtcagaccgccaagaatacatttccttatagttagctgccaagaaatctgaatatccctgactctttagacttagcggtatttacatggcggtcggccaacggaataattaaccttaatggttttcaggctatttttgaccgccaaggacattatattttcttgtagtgcacacgaaaacttatgtctgcgtttaaaatacgacggatggagtacttaactagctagcccctcctgcaaagtgcgaacttaatttatcttaacctgtgtatcaaggaggttccacagaatgacatgtaatcgatgcatgcatggaattaatggatattggacccctctatgtcttaaatatatatgaaaatgacgtggagcattgtagtccctaataatatgccctaaatagtactgtgactatgtaatgccgctaacgtactcagggacactgatactcttacactaatttgtctcaagtactgaaacccaacaccaacagtgcatgctaagcgcctaattaagcatctagccccatgcttggcgactggcagagcgttgaggagtgacttcaccagcttttgctgaccatccagagctagccatgacgatcacgaattcgctgatatatcgatctgccagccagtgtggatagatagatctgcatatatactagtcacgcatgctccttggcagggcgccccccagcgtagggcagtgtacagtggctagcgtctgcctacgtacggctgctgctgcgtgcaatcgagcaatgcatcattgcgtcgatctgcacgatgcatgcatgtctccgctcttgtgccagccagcgaatgtaatggacacgtactatacacacaccattgattgatctcgagcttgtatagtacgtcgtgatcggccgatcgaacgaacgcgtgcgaatcgcatgcgcgcgtgatggccaatggatcatcgatcgtatgcatgcatgcaatgcattcgcgtgactgttccatccaacgggctaatcctttctttcttctgttcctactgatgatatgccacttgccacgccaatcaacgcatttcactgtcccagaacaagggttatagtactgttagcgtacgcgttagggccccaagtgcggtgcatacattattaatgaagaccatctgacatgaaggtactcacgctattagatctacagacccacctctgctcggtcatactgacttgtactgagctctccatgcttcaaacagttctgtgtatggtatatagtatgtaagatctgtctaggaggttacaacgacttacaagttgaaaccccccatactcgtatgcgtgctttaatccaatgcgatgctggtgctttcgtacgcaggagagcaaggaccaccacgtgaccggaaccctctgtttcggagcacggacacgagcgattgtaccgagatgtggcgtacgtatacgttcctatcaacatcaccgaaacggacgtagacgaccaaaaaccagaaggcggaagggtgggtgtggatgggccgtcggctagctcgtcgcatgcgcaccgcgtacgcctacgttatcgagtcagcttccacgcacgtacggttccaccacgaacgaggacagcgcggttggtatacgtcggtctaaccatccaccggtccactactagctcgccatgcatgcagctcatctgtctcggcctagaaaccgggccggggcgcgcgccggtgaacctactacttgctggctgccgcagcgcccccgcccgcgcgcgcgcatatgcgtccgttcgcgtggcaccaaagcgcattgattccatcccttgtctcgcacaggccggagggggggccatccgcgccatgcgatgcatgcatgggcgcgcgcgtctgcctccccgcccgcccgctgcgacgtccctccaaaaaaaacggccggccgggcggcacggtgcgcaactgcacatgcccacgctgcatgcgcctgcgccgagagcgcgcagcccggccggcggcgcgtgtcagcgagggagggaggggtgatggtgggtgagcccggcctgcctgcctgcctgcatgcctcgcgcgcgcaagcgcaaaccgcacacacggcaggcaggcaacagagcgccttgttgttggccgccgggaacgagaagcccgtgaacgaccgagcgaggccgcgccctcctgcgcgcgcacagtgacgcccgccgtgccggccgggaggatctgtcgttgcgctgcccgcgcgccggcccgcgcgtttcggacgcttgtgcttgtccacacgttcgtcgctcacgaaaaacgtaccgatgcctagtccaagggctgatgttacttactactactactactacaactgatctcgaagtagccggttctggatacatgtagccgtggaccgtttgcaacgtcagatcgagtgcgtacagcgtagcgcgctatatacagtgtgtacagagtaaccgtgtatcgatccaaggacatgggtagcaggaggagcaatacagagaactgactgtaagatagagtttctttctcttcgcttctatacgcagtacaagtattagagcaagtttaatagtacatccaactacaagctccaatttatttatagctaatttaatagtcgatttgtacaatagttgcttactatactattaatacctggtcccacatgttatatacacatcacgtcttgtaatccgtgctgtagctggctacagatttgtagcccgctgatcttctctcctattttatcactttaaaatatgtttatagctggcttatagcctatacctgctcttatactgtactactattgtgttctaagattggaccatgtggtccaatttgtcaggggaatccatgtgacgagcaacgatctcgaaaaccgcgtcacagagcagtgatgggtacaaatctcgggcagcatagacacgaacaaacttgcgagtgtaggtgtgccatgcactcatgcaggcagccgtaaactttttgggacaggtcagtctcaccaaactttctacgagtactttgccagtttgcctggttgaaacgtcgggattttgtcaatttaaatgcatcgattcgtgtgaaatttaggggttgtttgttccctcccaaacattgccaaaccttcttgccaaacctagccaaatatatggcttataaattgatggacacaccttagacatggtttgactagaaaatggttgtatgacacgtgggcctttaaattagaaaactgtggcatgccacaagtttggaagtgaaacaaacatatgtcttaaaaagtgtggcaaagtttgttaaagtgagggagtgaaccaaactccctccgtctcacttacgagcaactatgagtttccgtggctaattttaatcgtttgttttattttaaaaattataattagtattttttattgttatgacatgatagaacatgaatattactttatatttgacttatgtttttaaattttttaaaaaactttttaaataagacggacgatcaaagttgagcacggaaaattatggctgcacttaaaataggatgaagggagtacaactatgtgtttaatatagtactactagtattccctctatcccataaaaattaatctagtactccctctatactcgtaaaggaagtcgtttaggataatgtttaagtcaaatcttatgaatataaattatgaatatctcttaagttgttgagtttaaaaatgtaaaaattatatgaatagatttgtcttgaaaaatactttcataaaagtatacatataccaattttcaataaataattttatagaaacaagaagtcaaaattgtgttttggagaccgtgccgctgtccaaaacgacctcctttacgagtacggagggagtactggatgtgacacattaatttggacatacctctatttagatccgttgtactagaatatgtcacacccaattctaagttcgttttttatgagacgaagggagtacttagagtgggtttagaattgtttttttcttatttttgtaagaaatgtactcgtaattgtgatgttagttttctaaaaaaactaatgggacctggttttcatatgatcctggtaaaactttataaaaagaactgctcatctcgtttggagtacaaaatcctaaaaatgcaagaaaataaaagcacaagattggaatgtcacggcatttcaaatcccatggaaaaaaatttgtaagaattattcaaagcatgtattccgatggctcatagaaaaaagagtaaattacacgcgaagatgtcatattatcatctagactcgtaaacttgaaaaattgcacattgagatccactatcttgttttaatgatccataagtggtccaaagtgtgtttgactatagccgaacgcctatgtggcgctccacatcttaacgtggtggtaattttgtaattaccccctattgctacaatagtcatcgaaatcccccaaaatattctaaatccctttgcattcccccccccccgccgcgtgcttccatgggagaggcctaagtatcacgaggatgatgtcggcagtcatcggcggtacgagatgattgaggtgttaatttgggttgtgcgacaaacgatgctcgataggcgacggacaacgcaccttcctcgtcgacacgacggttgcgatggacctcaactttaagggagaagattaatcggtgtccctaccgtcgttacctcatcgtttcctgccgcctccgaacagcatcctcatcattgcaaccctagtcgtcaggggaatgcaaagagacgaagggattcggggggatttcgatgactacattagcagtagggggtaagtacaaaattatagcctcgtcgagatgcggaggaggctggatgcaaaatgctgcctacgtggagcgccatgtaggcagccaactctggtcaaacgcgctatggaccggctatgatttattaaaacaagattatggatcttaatgtgtaatttttcaagtttatagatctaagtgatatctttgtttaagtttaagaaccggtcatgtattttactctagaaaaaatatagaaattttgtgatataggttagttaccccatctgtctctaaaatacttagttcctagaatccaaatgcacattttgtaacgagagtaaattactctaatgcctctaattaatagaaaattagtttggtgagttggtagataacggggtattgaaggataaattttcttgattcgtgaaccaatattaagtaataaggtactacgtatgagttagatttattttgaacaaagtttaagctctataaatttattttttttagacgaaaggagtagattagagtgagggtaaagagagaaaaggatattgcatcgatatatcaaaggaaatgaaagccatgaggttggagttcacgtttaaaatctaaagatttgaatcacacttggtattccacataaatttgacaaaccctaaatcctatgatccaaatgatttcactaagaaatttcctatgaattcatatccattatttttcctttaaaaatactataacccaaaggtctcggtcctacggaaattagggagacatcgtgtttgggataggctgatttttcctttactactcaaaaatcagaaactacctaaaattgacagaatctgacctcgggtatccttgtactccctgtcaaaaaaatttccaattctactcccttcgtactaaaatataacaacttcgtattcaaaatttgttccagaatatatataacaatttcttcacctacattctcttcttaacctatcacaatcttctatcattcaaattctataccaactttctcttctcaatcaatcacaactttcttccatttaattctaccatcttttttaatacctgtgtctgagcctaaaactctttatattttaagacggaggtagtatatatgaaaataactcctctctcggtaaaaaaagaactataaatatgaatctacatataggacagcgggagtatatgatggacggaaagaacggcggactgaagctacaagtgcagaaccacaaaaaggatggttaagcacttaagcttatctaatccttcttgctttggaagaactgcctgcttgcgttcagtatataaaaaatttaactctcctgtattaaaaaaaaaaagaacaggcagttctcctgacgatcttcactaaaaaaaagcaataaaagctgaaaagctgggcagattcttgcagaagattatagtactcgtatgatcttgtctgttggagtagtcgctacttgtactggcatgtgcacgcttccatgtttctactcctacaagtttaatactagtactaatatatataccatgtatctactctacgagttcagtactagtatatgtacaactcatcgtgacagtgtgagtagtaagcagtgcgaataatacttgatacacggtgaccgaatgtagtaaagtaaagctagcctagcatgtaattatttttcggaattgctaaaagactgtcccaggttttttttgaggaaaaaaacttttaaatgtaactatagcagtacaaacacgcccaccattattcttaataaacgcacactatacatctaacgagaccatatatgaattgaagtgatttgttctttaaaatttagaccagtacagaccggttttgcaataattacgtacactacaaattttgaaatgaatatgcttatatgcctcaattatttgtctctgtctggttcctgcgacccagtgctcattgtgtctccatagcttggacaaggacaacaatgggtactgtggcaaaagtagcatgagttaattaataggcaaaaagttaatcgcacgagttaagctaagccctgaattttgggcgatgcatgattgattgctctagggcttatggagctatggtcattgctcgcatcactgaagtactgcttcatgttactcatgtggcctccttgtctcctcgtcattccctgtactgttaatccatgtgacattggtgtatatctgttgttcctaccctgattctcgtccttcatctagctggaaatgttataccttaagaataacaaatcacaaagttggattgttaactttcggagactgtctgctagctgcctagctggaccagttcctcaataatttacatattcgggaagataaaaattccatgtgccaacatttctgtcttgttttcaaccttaagatgaacatttcaggtcttgaaacccatctagaaattgggaataaatttttgacagaactttacaaattcaaacaagaactttaggggcaatttcctttgcttcgttgctcacgttgaatatcttttgtcccttgttgcctaggaaggagcccattctacgatattaaacttctgcaaatgtctaaaaaataaaggaatcataaacttcaagctttaatatagtttaatctgaataattacatcaaatgtttcgttttccaacattggcctcttctctttgccagcgtgtatgccattctctgtagtgtgaattgatcaatcttcctcaaattcactacttcttccttgttctctgcagcttcaggttcttaggtgtagttttattttgcttgtttaggacttccttaaagaattgaatgggtaggaaacgctcattctcaaggttaaggctgtgttcgtttgtgtgagatagggtgagaaaacacctcgttttccgtgcgcacgcttcccaaattactaaacggtgtgttttttgtaaaaattttctataggaaagttgctttaaaaaatcatattaatccatttttgaaatttaaaatagtttatactcaattaatcatgcgctaatggctcacctcgttttgcgtatcttcccaatcttttcaatcccctatctctcaaattgtaacatcctgaaaattctcaataataaaaatcactaaaattttgaactttttaaaacttttgcatcatgctggttgttataactgctattgctttccaaaccgtaaatgattacaaagaaagtaaagaaaagaactacatttaagcaatagatataatttaagagagtatattatttatgtttaaccctacaagtatttatgcacaaaagttccaaattgcattcgggggttgaaatttaatagattaaacccctccataaaataaactaacatataaataaattgagctaatgtgttactgcgttaataacggtctcattaggaaattatagaatctttaataaatcttaaatatcggacaatattaaattttgggaaaattcacatttggacacttaatatggtcacccaaatgcttaggagtaatacaaatttaatttataacttttcccaatttataaatcaaccaaagccctaaaagtaggaaaataggaatacttagaaaaatatataataaaaataaaaataagttcaatattaaatttgaatacaaatttcaatggaataacttaggattggtgtatttttacattgtgacaaaattagtggcaacaatatatttttcctaattgcaaagtaccctctaaattcaaaaatagttggctagcactgttcattagcccctaggtgttcgatttggtttctagccatcctagctctctttctccccactgttgcgccgccctagccggcctcgagccccgcccgcaccggcgccgtcgccgtcgcctcgctctgccaccgctgccgcgccgccgcatcatgtcgcgtcgccgtcgccgcgccgtctccaacccgccgtcggctgcgccgcgccgctcgtgtcaccgtcgccgtcacccgcgtcgcgccgagcctcgcaccagtcgcgtcgccgtcgccgtcgcatcagtgcctcgcgccccgtgcgccgctgccgcgccatcgcgtcaccgcgtgtcaccgtcgccgccttgagccccgcgctgccgtgcgccatcacgtcgctctcgagccccgtgtgccatcatgtcgtcctcgagccccgtgcgccgtccgtcgcgtcgactattaagccacccttcccacaccctataaataccccctcccatctcccttcctccccacacaccatgttggctgccatcacaaggccccaagagcccccacgagctcgtccacccctctctgcctcttcttctcccttgtatgcattttctcaaacaccttgtgtgcatgccggcagcttcttctccgctccaccaacgccgccgagcttcgtcgttcctccatctctcggtaagtcctcgctcctatgtcctctctagttccgtagaaactagagccccctttaatttcgccaattagcaaccgtagccatgccggtccggccaccgttttgccgccggtgagctcgctgtggacaggccatcccggagcccctcctctccatctagccagcaaaatggaaccctcacacgccatagatgctgacgccctcaccaattcggtcggaaaccctccttatcgccttagcacctagctacccgtgcccggccatggcgtccttgcagcgccgctcgcccccgcgccgtcctgcgccatgaccgccggcaggtgtgcgccgtgaccgccggcaggtggacgccagagccttgccgctcccttccctggtcgctgtcgggtcaccctcgcccgggcctagccgcgccgtgctctgctcggccgatggctggaggtagaagacgataaagaaagaacgagagagagagagcagtcgggcgcacttgtcaatggttcataggatttgctttagaaaaataatccagtaggaaagcaaatacaatcctaaaccccacatgtcagtcacttggagttttggataaagtttaggaataaaaataatggattaggaacagtacctttttacaatttctcagatttattcaaatttgaatctttaaactagcgtaactctctcattttaactcggatttgagtgaaacttgaacctaaatttatctaaattcataagctttccaatggtatataattcactatttgataaaatacatttataattattaaataattaatactaagataatgcataatagtcaacttaaaaatgtgctaacaaataaaattagtactttacagtaaggtagatgtaagaatatttgtctttaacatgctttgtcaatgtaacaaccacacaaactaattttaaatgatgtctcaaattaatgtataggaagatactagtactattaaatggttgtataattaaaccccatgacttatagattatttaaataataaagttagccttataattaggtaaatcaaacatgaatacagatagatgagtctttaatttatttatgaggaataggtacagaattgttatgatagaaccacccaaataaggttgagtcggttagcatccaataattactcaaagagtaaaatcacttgccaacccacttaaatcacatatattgtacaatccatttaaaatcatacataataacaataacctacctttagcatatattaaaccaaggagtatatgacaaacatgtatggtggataaatactagttataaatcttgacctcatataattatagttcaactgtaagttaggattgttcattaagggataatctgtaactataatatgattaacctaaacaactctaacatacaaagcatggataattattaaccttttctaatttatcgtgacaagtaaaatattttcataattaaagcaaagcctccatcaataaaataataatacaaatggttccctgcgattaattgcttgatcccaaatccatctaacaacagaacctctggtatgtaaccgtgctatttagatagatgcatatatagccataatccttccatagccatttgatagaataaatcgccgattagccaaatatatatgtatcccataaatgctatgttggttaactcctaaatcgaccacgatgacaatagaaagattaagaagccttagccctagcatgattgaaatccattagcaaacacgaatagtatgagcaaccctaggatcgaccccaacaattatcttttgcttgtgcatatttgcttgttgtttgaatattggtttttctcgcgtattatagaccttgtgtatcggttagtcgtgaggcaacgtctacaacttccaggaggtgaaggttgatcaagattatatcaataataagaattatcctgagcaggcaagtcatcactattccttgaacatgttgatcccaattgcgaaaattattttgtttacaaataaaattgcatgcaatgatgaacatcctacttgtgattatgccatgccttgattattgtttacccttattcccttgtaaccatgattacgtatgagtccctagtcaactatgacaaatgcttagaaatgctactctagaatcatgcattctcatatttatcaaatgctatatgcttgggcaattacctttgggaaggtattgagatgcggcatgtggagacataagcgccacattgccatgatgttgatgacatgatttgtgaaaggagaaataaaattaaacaactgttttcgactggggcggacggaggatttgggtggtatccggaaaaggctagtatcgtccccggtcaattaaggaccgagccatgaagttaagcatgaaactacccccgtacaaccgcacttctcgtatgggtatagacctagcggagtagatagctgagtggaatccatgcatagtggtttcttgatgtgtgaggcaggggctctacggtggggcagccattggtagaaccgcgaggtgggtgtctacagtggtgtcgccatcggtaggactgccatgtgagaatttaaacataattataacttaatgcatgtg

SEQ ID NO: 7953 - DNA, 13966 bp, Oryza sativa
ggcctcgccactccgcgcgcaagccgccaagggacggaggcagagcccctcctccttatgccgcgtagcccccgctcccctcctccttttctcaaagaagcaaggggcgagccccctttctctccctcctttttccccttttcctcccgctggcgttatcctccctccgccctgtcgccgattggacgcgagcgccgagcgccagctcgcgccttgaccgcccaagtcggttccaaaccgacattgccgcccttaaagcccaggcgccctccctctcttctcctcccatcgccattgttgccaccgccttccgagctctgtctcgcctccgccgttcatcgccaagcgccgggagagccggtgcgttcgaggacgcggaaggggactccgggcgctcgtcttcctcctcttccccggcccgaggccggagagattactcccgcgccgtcggcctctcgtcacagcgcccctcctcatctcggtagtgcctccctccgttcttcctcctcgctccatctcccccccttagttttcggtggtagcacgagtagcctccccgtagctagccggcgccgccccgaccattgctgtcgctcgccgtgtgctcgccgccgtcgccgcccgagctccgtagcacccgctcgtcgccagcctcgctcggcgtagctctgcccaatccgacgctagcaacggattcccgtagccgcgtagatgctctcaccgccgggaattggcccctcgtgacctcgtcgccgtttcccccttttctctccgccggttaccgccgccgaaatccgccgccgatgggctccctccggcgaatccaagccgttggctcgctccctctcattctccctcgtcatcccggtgtacgccccgtcgcccctcatcgtcgcaaggcgtcccggagaaaccgccgccgcccgccgtccattcgtggccgacgccttcgtcttcctccggccagcccgcgtggcagccacgtaggcgccacgtaggtgccacgtcggcgccagctcggtcgagatcgggtcgggccgaccccggtcagcccctcccgtgcgcgcgttccaccgcgagccgtgaggctgcgcgtgggcccgccgcatcctttccactgcgaaccgcgcgcgtgcaccgcgtccctcccccacctacgcgcgtgcgccgtgtgctcgctccgcacggtgaaccgtgtcaccgacaagcgggtcccacccgggaccgcgcgcggtgagcccggtccactggctctctctctcctccctcccgcgcgcgcgcccgacttgggctggccggcccatttagctcggccggaccgctccaattctcttgggccgcgccctagccgcccgagaaaagtctattttccctccctcttttcttttcttttcttttctttttcaaaaaggatttaattaaatcctttttcctttagaccaaaaatccaataatcttagaaattcaatatcttcccaacctaaatccgtttgactccgttcaacttccaaaactcctcaaatctcgagatctatctaatggcacgcttaggggtcattaatagggctttattttcgccgtttgttgagttgtcccgtttcgcgtgtagtttcggagcccgaagacccgcagtgcgaggatttcgaggatcaagctccagatctcgagcaaggcaagccacctttgaacatcttgagtctatatttgattttaattatgttgcttgaaaaatattatgcattgataggatcgcacttaatctgtttgtcccgtctgcaaggcagattggcggacctacctagtttgttgcatttgatccttcctttgttaattgttataccatgttcccttgtaaccacccagttgcgcctcggaaatcgtgcactatgcagagtatcgacggtcgccttcaaacttaaaatctgaaaaacttcttgggtaaaacttgggttttacaaaagacttggaaaacccgacacctgggtcggtacttgcgaactaaatgaattttccaaaaccgcggaccgggaaacgtaccgggtgtacggtttcccgctcttgcacttaaggaccgtttccttggaatttcatccaaacataagaccagtacgaccacatgggtggaatgggacacccctggctgagtaactagcttatcaggggagccttgatgccgagagacatgtggattcaccggggtggtgtcggggaggacccctgggcttcctggcacagtatggtctgggacctaacctgttgttggtctgggacccctctcgtcggcatatggtaaacctgtgtcggctttcgaaatgccttgtcatgaaagcttggaggtctcccgacgtggctgatccccacgggctgggtgatccgggttagtaatgtcgtgtgggtaaggtgtaccccctctgcagaggttaacaaactgttcgaacagccgtgcccacggtcatgggcggatgtgaggtgattcctagcgtagtgttgtttgactactgccttgtgaaattgctgttgtggaaaggggttcgatgtttggaaaatctgcagctgatgggatcagctaggcccgggtggccgtttgaaagttgttggcccgggtggccgttgaaagctgttggccgggtgccaatcttgatcaattttaaagactgatacattgcacatactccaaccggacgagacgcactgtctcaaccgtgtcgtttgagaagcactcacttagttgttttcagaaaagagttcaaataaaatcaattgcaaaaacaacagcctttccttgaagcctgcattaaacacttatttcccatggcttgctaagtactcctatactcacccttgctctatataaataatcccccccagttgctgaagaagatgtagcggatcccgctgacgaggagttcttccaggagcaagccggctacgatgagttttagggtttcggcctagttcccaagtcgcgcctgtgttgtttggtccaagtcctggcttccgcttcccttttgtaatgcagttgtgagctcgggatctgtctgcagcccgacttgattgtactcctactctataataaagagacctctgttgctgtgatattctgtcttcctgtgataccagcactgtttcctggtactggtatcgattaacaggttaatttggagcgtcacgggctagttccggtcggtactagttcggggcgtgacaaccgttgatctcatttgatcgaagggttcagatctatttatactactaccccagttaacggtagtacaaacgtggagggacattattgtcaaaaataataggtgggtataatcgccatttaacagtgagtatacttttttcctcctttttagctttttcgatgaaatatgagtgatgttggcgcaataaatggtcatagatggaattaaccgggaaaaaacataaatgacaaagtaacctctagtcatcgtgttagtaaattgctaatctatcctaataatactagtagtataacaggtagagagcatctgagcatcgctatttccaaaaacgtgcaaaatatatttatagacataaaggggtggtgatgactcctttttgaagagaaggggttaggggtggcaactaattggcccaacccttacaatatacgagtaggagtcggtaaaagaattctggctaaggataacctggttcattaggggttggaaaagctgaaatgcattctacttttggtatgaaatccattacctggtagagtcgatgtttttttttctactaaggaatttattgatggttaggatgacagcaattctgcgggtgttttgcaaaatttcaaccattattatttgatgcaacctatataagatggctgtatttattcttccccaattaacttgattttttttctaggggttgttttaattagtgtaggcttcgcaaataaatatgtaggtaggtagataagattgggaatacaccgattgctacaaacgaggccatgtttaggtcaggagtgaaaagtttttgcatgtcacatcagatatacagacatatatttgaagtattaaacgtagtctaataacaaaataaattacagatttcgcctgtaaactgcgagacgaatttattaagcttaattaatccgtcattagcaaatatttactgtagcaccacattgtcaaatcatgacgcaattaggctttaaaaatttgtctcataatttacacgcaatctgtgtaattagtttttttctatatttaatactccatgcatttgtccaaacattcaatgtgacgggatgaaaagtttttgtttgggaactaaacagagcctaaatcagcatgaagaatacaagtatcgaaaaggaatgcatagtcaactatgaattcgagtttcatgcagtgtgactttttagaatttagaatgtctcattttccttaattaccagctcgattttgatattttcttttcatgagaaatcacgatatttatgcttttccttaccaattataatatgtgtatagattgacctttgattcagttcgagctaaaattattattgtttaatcttttttggggagagggggactattttcatagcttcttttccaagggtacaagcgcacaataacttgcacaaaagctatcacattaaagaaaaattccttgacgtcgtctagacagccctggctgaatcctcccagacttttctcccagacttttggtgcaagcgcgctctctagacgcatgtcctcttgtgttagcgtcctagcttacgcaagttggccatgtcggagggtctagaggggagagcggttccatccttctctctcacctctctctctctcaatcccaaagatgttgctagagttagggtttggtttcagttgttagggataggttcgggcgacctcggctgtagttcatttgttggcctagcggcggccggtcacgcttagcgatggctggtttggtgctagccttctcccgggtttgtgtttgatgttgtcggtgcgtggagaaatctttgtattttttttcctggttacgacctcccagggttgtaatcttatattttttccctgctctatcaatatgaacttcgcactgtctggtgcgagtcgttcaaaaaaattccttgatgattgttgcaaaggatgctttgcccttgtaaatgatgccttatttgcccgcggtgagtcactgacatgttattaagagtgagggccaaataaggggttgagttaacttttaggggtgaataaagattttattccttcaagtaacatttttctgggtgaaaaccatatctttcttagattggcgatggcggtatccttgatgtcgtgacctccatggtggcatcgttttcggagtctcgtccctgtgatgctgtcgtaggcctagcggcgattagccatacttagcgggggtcatttttggtgctaggctccactctcagttgtttgtgcttgtgtggttagcacgcggtgtttggtcatgcactttggtgcattgtggtgttttttcttgtaacttttctccttcttaatatattcgaatagcctccttcagccttcttggtgaaaaaaaagcaacattttttcagcattttggcattcaatcgttcaaattaactgcaatcaggagcagatctagcgtgggtgctcgagggactcgagtcccctagtccccaacccctacccggctaaatcactattgataaaaggagagatgggaggaggaggaagaacagagaggggaggaagagtaagggacattgaaggaggaagaaaaagataagtctctctccaattttgttctagatctgcccctaactctgattgaattattgacttgagagttcggaaatagacatgcaacggtaccactgttttcgaaggatgcattcacctaacaacccgtttgaattggataatgattctgtgcaggaatttgacaaactttggtcatgttatatagtacttgctacaggaatttgacgaactatttttcgagcaatacggaccgctatcttttgatccaattgcaggtcatctcaattgctttggatcaactgtccatgcatttatttcttgcagctgacgaacgtctcaatcgcagcccattaagtaattactactacatccgtcatattataaatgcggttatggtttccatgtccaacgtttaaccgtccgttttatttgaaaaatttataattttttttaaaaaatagtcacacataaaatattattcatgttttatcatctaataacaacaaaaatattaatcatatttttttaaataaaatgaatggtcaaatattagacacgaaaagtcataattgaacttatattaaaacagagaaagtagtagagagccccgtgtcaaaaatataaataagtaaacagcccatgcgtccaataataaatgtacatctctcaacataaagtcgttttggaattctagacattgtttatgttttcttctatgcctgtcattctcaaaaaacaagaatgctatccctctcacaaataaaatttgtcgtctttttcaagatagtatacatgaagggcatgagagttattttctcaagtcttgtgcataagcctaaaattgacttatatttggaaccatttgagcatgttttctttatattgttgatactggccattgtaaatagcatttgtagtattttcggatgctgatggagttaggccttgttaatgtctctggataactttgatccgatagccatcaggaaattctagtcctggagttcggactaccctgcttgctcccagcggtatccacctgaaaaagaaaagcgcaattatttcatctccttcgctctcgtttgcgagaccaaaaatttcagccatcgctgttccgaaatgttacttcaattggttggcacatcacagagatatgggatgacaaggatttggacttccccaaatatgccctcaagttggactgcgaaagagaaaaacactacctgtattttgtcacaaggaaatggaggaaaatagccaattgtagcttgctgaagtctgctccaacgcagaaccgtagtcctccgccgaatgccatgaagtgttttgatccacggtttatctctggtttatcctgcatgttacactcaagctgattaaaattttcttttagtggaaagctaactaaatatacccgaatgaatagatatttttgtgtctgtatagggggagacgggcttggccggggtacgtgttactccatccgtttcaagttacaagactttctaacattatccatatatatatatatatatatatgtctagattcattaacatagatatgaatgtgggcaatgctataaagtcttataatatgaaacggagaaagtagatctttcatgagtttattttttgttttttttaacttgtgggagatatgtttcataaaaaaaatgagtggaaaatcaggattatcaaaccttaaaccttgaagggatgaaggtgagaggatccggataaatatatggatttaagtgcactgctggtggacagaccatcactccccatcctgctggaattgtgtatcctgtcaccaatggatgtcacttaggaaaagaagaatggtattcagttatgctttttttaaaagtaaatttcacaaaactatagatactttggtcaaattatcacaattaagtaatgtatcacagaactacaaatttaactataaatttatcacaaaactacagatttaaggctaagtatcacaaaactacatattgaataataaaattatcacaaaactacatattttagggtttaaattcttagcactagtgttatgttggacttataattgttcaagttttgtgattaaattgtcattaaatatgtagttttgtgataattttgttactaaatacgtagttttgtgatatttcaccataaatctatagttttgtgataaatttagtactaaatctgtagttttgtgataaatttagtactaaatctgtagttttgtgacacgtcatgttaaatctgtagttttctgataatttgatcaaaatacttgtagttttgtgaaatttactcttttttaaccggatgcatgatgtactgactcgttagcaaggtttcaacatgtgacatagtaatctggagatggattctaatatatcgctcaataaacatgcgagttcaaaagtgacttttgtagtttgtaaaaaaataacaaaattaattgtgaatatagatatactatttaaattttgatttgctatttttattacaacttgtaaaaatcaaatttgaacttgtatatttgtagagtgccatattatacatgaatctatcttatcaaaaaatttgatttttttttcataacaatttaattagcatgcaacaaatcggtggatatctagctaagtgatcaaaactgtttcaactgaccacgttaaaaaaagctcaaactaatttttttagcaaattttgcctgaatatcacatgttttcatcgataactagcatggtggcccccgcagattgcgcggctagcattattatattttctctcatataatactacatatattttctcaatttgttattaaaatatattagaatgacaacatattttaaattttatattaactttaccaaactactaatttgtaatattcatattttattgtatatacatgatagttactaatatcaaattttagttatttctgaattgtatttctatatggactctatactcgcctttcaatatttcttttttttaattccgaatttttgttatttgcaaattgtattttttatatagactctaggctattcttttaatattatttatctttaattctgaattttcattatttctaatagtatttctatgtggactctaaactcatctttcaatattctttatttttttaatttcgaatttcaattacttcaaaattgtatttctatatggactttaggctcttcttcccatgtgttttaaatttcgaattttagttatttgtaaattatattgctatatggactctaaactctatttgtaattttattatttttattcccaattttagttagttctaaattcctatatggactctatgctcttctactgttccttattttttaattccgaatttttattatttcttaattgtatttctatatggactatatactcttcttctaatattccttatatttaattctaaatttcagttatttctaaattgtatttctatatggactctatactcttctttctgtattttttttaattttgaattttagttatttctaaactgtatttctatatggactctaacctgatttttattttttttattttttatttcgaattacaattagttctaaattgtatactggcatgaactctaatctactcttccaatatgcggatttgctcatattgttttcttgcccaggcattgctgcagaagagtgaaatgaaaaacttattccttattttttaattctgaatttcagctatttctaaactgtatttttatatagactctaacctaattttaattttcttttttttaattccgaatttccattagttctaaattgtataccggcatggactctagtctattctttcaatattcctttttattaatttcgaatttcaggtatttctaaattgtatttctacgtggactctgtttttctttttctccgattaatatgagaatttctatgccgtgagagcgaacgtggaggctcatttttctattactttaaataagttggagtaatagatagattgggttattcaatgactggtcgcatttgtaagccttgctagctcatcaatcatactcctacctcattattaaatagcagcatcaagatatgattttggacccatgatcaacagattgtggggggctcaccattgaaccgtatgtctttaagtgcctttctgaagatgacaggagcgatgttggccaaacggaccgtctcgtttatgacctacataataggagcatgtgcgcgtatgattggtttagcaacgcacgttttgatacaaaacatgcatggggtgctataattggatccaatgcaatcagtagcataaactgttgcacagcaaattctgaaccctatctgatcgatatttatctagcagttttgtgcgagctagtactagtaactaacctgagatgtgaatgccatggatttgtactccttccatgtgattctatctagctcgctgcctgcctcacggtccttcagaatcgtttcatgctccacctgcgtacgtacatatccgtgtatgtcagtacatagtcataaacgtgtatgtcagtatatcacatcttgatttttgcgtatagtataggagcactcaccgtgagctcctccaggacgagagggtggtcggcgagcagcttgacggccagggtgagcgccagcgacgtcgtgtggaagctggcgaagaggagcacgaacatcaggtcgagcgccatcttctctgtcatgaccggcttttccttcgtgatctcctggatcacataatccaggaagtcgccgtgctgctgcgcttctcctcctcgctgcaatcctgtcgattgcttcctctcctccagaacttgctctagcaccaccatcgcgcgcctccgcccctgacaagagtctcaaaaccaagagaccatgtctgaaactttgcgaagaacgactaattagtgcaatatcgtgacgacataagttttacctgcatgcatgagtagtaagctgtccctggcagatacagcgggaaggagatgagccctcgaacgaagtcgaagaagctcttccgcaaaatctttgacctcgacggctccaggccgagcagcttgcttgcagcaagatcgaacaccatctgcgcaagtgcatgcactcgaacggaacatacatcacaatgagacagtacaagaaaccaacattctaaaatctgggtagaaaccgcgtacgtacagtggagacggcttctttgagctcgacggccggcaaggtggaccaggtgcagagggagctggagacggcgcgctcgacgtcgcggatgatgccttccttgaggctctcggggccgaagtacctgagcaccatgttcttgaggtacctgaacatggcgccctgctgctccccgacgttgtccttccccaggatctccacgaacgagtccgggtaccagctctggaacagctgcccctcctgctggaacaccatgtggttcagctcctcgtcggccgacaccaccaccgggtgccccaccaggctggtcttgaatatcggcccatatctgaacttgcagcccaaactagtaaaaaaacagcaaaagaaacccagcccgttctctggcccattaacaaaggcgtacctagccagcctgtgccggatgaagggagggatgtccaaggaggcgtcggaggagaagaactggaacgtctcgccaacgagcgggaggcccatggagcccggcgggagttggccgccgcagcgagggttcctccacctgcgcgcctggtgccgcagcagcagcagcagcacgagcgcagctgcgccgcccacgagccccacgtaggcgtacatctgcacgcgtgtaatatgcgctagtggcagtatctgcttctgttgatctacatgtgccgtcgtcgaaagcaaagcacatttggctgtaggacgatcggtatgtaaggagtagaggggggggggtcacggctttgaccgtggtttggtgaagccatcaacgtaaaggttgtgaaaaactagtggttgctcagcctgtcgttgttggtggatcgaatgttcgatggctgctgctactaggatgggccggcctgatccttcccgttagatcttaagattctggcccatctacagagatttcggcttcccaaaatccgcacaatgcccatcgtcacacggcctacgaaatcctttgctctctccgggtttccgtggcacaactgggaaggcaaacccggcgtctctccgccccccaatccgcatggacgagctgctgcttcgctcgtctgctgattgcggaggccggaaggatcacccgcgtagcgtggtcaggtactgttggcgaactcccgcaggtgttcgacgaaataccgatcaaaacagagcgagcgagaagatgatgtttgtgctgcgaaaaaacttgcagcgtttttagttgcattaggaaactttaaatagcaaattacatgtccacaactctctactggatcacgtcatcccacgaccgaagttgccgccatgcgttcctaccctcccgccacttcgccatgcctcccgagtagaccgcgccatcccacgatcggaaacacgcaaagcgcacgcactccctaagaaaacggaaagggctcccgcatgaacgcagcatgcgtcggagcgatacacacgccatgatccccagcaaaaccggaaccacgcgcttgactgataacttggagcagaaaacgggagatggcgccatggattatcacaacaggtacttcctcctcaggtcaaagcctcaaggccacatttggtttagggttgcaaattttggtacggggtagtcggtaggtccgagcattgaacggcagtgttctgaatgtatatatcgggtgaaagtaaatacggagaataggccaaggactcaccgacgagcgggcaccgaaaaaggggttgctcctcaatgctgcgggtggctttttccttgcttgtgctgggcaccaagccaccaaccgaagcagagagcagaggataatcccagctctcgtactgcaagcacgtggactccgccgtggctcatccaaatgtcaggtttctcggaacagatcagtgctcggattatcctgcctccaatcatgtggctaccctgcacgccttgcgtagggtcgttggggatagcactgagcagctgggatggatgtccccaacgcaaaactatccgcagtggagtactgaggttgttgcaaagctttcttttcggtccgcactgagatgaactttgtcaaatacctgaatccatttattacagtaaagaaacactacatggaaatgagctttcagctttgtcaaaaccaaaacaagtactacctgaattcatttcttcgtccgttaacagtaaaattgcctgataaagagccacggttttcattcaaaggtatatatacccacacacaggataatggaacccgacgtattgtctgacagaagatatcagcagcggaagtacttgctgcaccaatccccaaaggtatgggcttaatttttaggcagttataagagtacaagctaattaatcagtaccattaccagccatacttcttgttacagtatatcctgttcatacttcttgttggacatgaaaatttactgtattatttgctctggcctatggcattaccacaaactaaatgtcaattattttttctccgtgcatgtccttgacagaagattcttaaccactaccactagcatcctatatagactgattgccattgctagctcaacagctaacaagtaaccactgttgcgagctaaccagtaaccagtagccctcctattgtatacagagatgccactgttaagagctctgttattgcagcgttaggtgagattgacactttggttagctgtaaggtggtatgcatcactgttcttccggtggataatgggggatatctcagatgaatccttgtgacagggggacctcgtggtctgtcaagtgtcctcatcatttcaatacatgcaccgatcgcccaaaagtgaattgtttcttctgctcctcctgtcggggaccagtgcgttctgttgccgtcgcattgcatgcatgccaatggtgatgaactctttaattagccgttagtccattacttgcaagatctgaaactagacagctaacgttatcttctccataatacagggagaattttgcccttaaaa

SEQ ID NO: 7954 - DNA, 72514 bp, Oryza sativa
tgctcggtccgctcaaggtttgtgggatcccatcccttatccactggataacttcgattggaccggttacatgcccagtggtccacctctctcccgattggtatactaacatttctttacttgttcttttttacttgcaataattcacttaataacacttcttttttcttaaaatgctaatttaggctctacgttctatcaaacaagttgcgtggagaattaaatgtgctatgagtagaggatggagaaagatgggcaagattcttatctgtacatgttacaataacgtccaggatatcaatatggaggctaagttaagcagcatgctaagcgagtcaggtctacctttatgtgtagatgacattcgatctgatgatagtgcatcaccattttctacccctaaaccaattaaacctgaggagataaacatggatgtgatggatgactggttgtactcaaacaggggatttacaagataccttagtttaggtacagattctgatgtgctggaatctcaggataaacattgagcatagatcagggcaaagagctttttgttactcctgctgttagacaatgttattatttggtttatcaaagcttgtgattttctttgtttatctgtaagttctataaattagaatctatttttttacatacatatggtttaacctgtatcttgtatttcctgttcaacgtatcaaaaaaaaaaaacctcctgccatttccattcaaatcacattgagcgaaataagacaagcagtgttgtccttgtcaagatacaaaaataacaactaattgtcaatagggaactttaaaaatatcaagcttgttacatgagaatgaagtccttactcacagaaaactaaatccaaattttataatataagctagaagtagatttgctagataaatttctagggcgatgcagcggagtccatcctatggattgtatcacccttgatgttggtgagatggcacacctgcagtgttaattctatattagtaggaagcatagatatatcatacaataattaaattatgacagaccggcttgatttttatcttgggttgaacgacgtgcttgatgtcctaagcgtcgaccttgcatttcatccatatacattggaattcggttatgtcttcgtcgacccaactgtatcaacctagcatcaggctcaataattggaccattataagttggccactccgattgatttccatatgggtgaaactgaccagcccaagtgtttgcgagtgttgtagaagagtagtaaggatggataaactgattctcattaaggtttctatcttttcaaacagcaagcacatgagcacaaggaatactagtaaggttgggcttttggcactcacatgtcggaatagcattgttgcgcataactagcttatacttgaaatcccttcgaacatacacaacacgatctccttgatgcaatgcaactcgttcacggtcaaccttcacctcatattctcctctttcatcaccatatgatataacatgcatggatccggccttggcccctcgtttcactaataacttctcaacccgtcgagaccacattttccctgagtttgcaagatcaagagaagatcttcttctatcaataaaccattctaagcacttgttaaatgtttcctccactattgccatgactggtaatctccttgagtacttgaacacattatttagagactcggagccattacttgtcattatcccccatcgatgtccaccatccatgcactggaaaacctttttagatttttccggctcattcttatcttcttgccgatattttcccaccttaccaagataagcaattgcatctggacaagtttttgaaatagcttccataccttcattgaatctacgtggtttcttcttcttgacaacccaattaaaagtttttaccacatcatcatctttacattgcttgtaaagattctcagcaatatgttgtgaacaaaatcgatgcacacactcaccagcactttcattccatccaatatgtggctgcttgaacacccatttgatagctttgtggcgatcagaaataacacacacaaatttaccaaaaccaataacctctttccgcaaccatctcatgaaccatccccaattgtcactgtcttccttctccactattgcaaatgcaagaggtaataatttgttttcagcatcatatccacatgctatcaacaacctacctcggtaccttccagacaaaaaagaagcatctatattaatgacaggtcgaagataaggtactgcttcaatacaaggtccaaaagcccaagccacgcacttgaatgctcgatgcccttcacgagtcatcggttgtgacaaaatttgatatcttgttccaggattagttgctttaatagcctccaataatggagtgagcaatgcatatgatccttcccaacttccaaaaagttgagcaattgctaactcccggccacgccataacttgttgtagtgtggctttacatttttataccgttgccgaactaattgccgtatgttcattatgctcaactccaagttctcttttaagtcatcacgtataacatctgcaataactgcagatgtcaattgtgcacgatcaagtcgatcagcgggagctcgacatgtgtgaggataggggcaagtttgtatcttccaacttgaaccaatttttgttggtttcccatatagcttccacaagcaagtattgtctatgcacttcatacttagtcttgacttgttacttgtggtaacctttacttcttgattggtactaatgtgaaattcattaatagcaaactgcaaatgctccttggaatcaaaagttcggcctttagctaatggactgttaaaatgtttcctcgaaccaaagaatctctcatcggccgttgtattctgtagcacagatatatcatggaaggcacttacagggtgcttgtcagacctgcccacgagtggcaacgatttgatcaatttgaccacaggctgaccataggtgttatcattcacatcctcttcggcttcgccatcgctctcatcttcctcaatcatatcaccctcacgttctgtctcttcgtccacatagccatcatcttgagaattttcttgcgcttcatttatgatattatcagaagacaagcccacaattggtgcagaattactcacatcatgaattttaggagatataccatgcttaggcgactgatgtgatgctgacacaatattctcagcaactgtagccatagttggttctaggttttctcttattatttcactaacaatgtggttttggctgaatccactatttgttggagtgaactcaacatataattccaccatacgccaactgtttagtgctaatgtcatgtcaaaaatcatttgccatgatctggtcttatataatgggatcaactggaaaaaatgtggacttggtgctcctacatcatatcggccttgtataacaagtgaatattcagtttcagaatattttagccctccataaatctcattctttacatcttcgaaagttgtagcttcggaagcaggaaaagtaatcttgggtggaatgctatactctgcaccagtcgctccatatacaatttcacctccagtgtatacaagaacaattatcatggtctgatgacctaatagtaataaagaaaagaaaaatatatatcaatttccatattcgatttattcatgatcagaatatttagtatatacatggcacagagcactactaacgtggagcacatagctaatgatgatataatcatttcatgcagtaatttactcatactttcgattagcagtgccgcaacctttccatgatagaagaataaaatgatacaacagatctgctagttttttttacggggaaaaaactgatatattactcagctacagcctcattcacaaaatgtgagatgagattacaagaaccatctggccagaactcggagagatatgctacttgactagtactaatgtctaatcaattccaaacaacgaaaagtaaacataccttgcaaataatcttactcgtgatctctgcttaaactctaatctcatctgatataagactagggcatgacttctgcagtaagggaaggttagggatagaaagaaagacactaaccaatgcgtagatctgtatttcttttctatgttgcgggcgtgcagttgctcggcggaggccgctgttaagttttggcgtccaagttctgtccaggaacgcagtaaaaaccttgcgtccaaattagtcgctgccaaatgacagcgtccctatcaaacagatggacgcttcttgaatcagaacgtcctgcttattaatagaattagatggctgtggtgcttacataaaaaaatatatttcttattttgctcagaattaaaaaaatcggtgaaaattctgtgtgcacttttgaatggttggaactggttgctttggcagaatcacctggctacaagtcattagtgagtagtgactcgccattttatttcgatgatccctgtgcaacctgcgtcgtcttttaaatcttcagtgagtaaagttataaacatttacggtctctgattgtatgttagtaagctctttggttgcttgccacagaatatgtttttcttatctattatcgtcgtgtgtatcttttttccggaaattttgtcatctatgtaggtcggtcaagactcaagtgggcagcaaagcactacttagaaattggaattttgtgatgcttgactattacctgtatctggagtatttttttaggcttgtgatgccggtgtccaactgtgcaagcggtgctggtagcgaactagtaccaatgtcatttggactgctggactcgtggtgatctgggctaacgcccggccgctctgtacatttggagctggaataagttcattttaaatcccttatcttgtctccgagtttgaaatgtcgtccttgaaatcgtaatactggatataacgagtctctcaacttgcaaaaccggtgtacccaatatctcaaacagcgcatattaccatctcccctctcctctctcgttcccacccaattcacccaattccgcagcttcagtcgaaccgccgtcaccatcacactaccacactataccatccaagttatgtacgccaacgccttatggtcgttcgtgccgtgccccctccaagagtagtgctccgtcgtcgccttcatcgtatcccccaagttgttgatggcagccacctccatgataccgcggatgttgagcatcaacgccatcatggtgacctccctgaatggcatgacgaagaagaacctcacgtggaataggagatggacgagggaaggttggaggaagaagaactagacatgacatatggggttcactcgtaatgtcagccaaaaccggatagtacactagttttgcaagttgagggacgtgttatatctagtattgtggttggaggacgaaatttgaacgcgacgttaagatgagggacccccaatgaacttattcgtttggagcgagacaagtttgttccgggcctggaaaatcaccttccttttgtattcggccaacaattaacatacggttcgtactggccctactatccttattttagattagtactggtcatagtttcgccttttttttcttcgtcatgtgtttacgctgctagagacaggttcctcggccccgttcctttcggggaaaaacagagcagctcaggtacagggagacattaggtcccatgcatgctcgggggagcctcggaagagaagataatcaaaagtaccaaacccatgaaacgtacgttgagatcagtttacgaatgtgtcgccttcgcccctgaaacagaagaacccaaaagataacagctgccaaccagtgaagagcagccggaaccaccgcttgaatcgttcgtcctgtcctgccgctaccgatggtgatgccgctcaacgattgggcacttctccagcaacacggctcctaacccggtctagtacgtgtaagcttagccagccaagatacgcacgcacaccatacgtgttggaattaatgaatgggccttagcccactcgaagattaattctttggaaaatcacaaaagcccacctcatgggatggcatgcatgtggagtttagtaccaccttgcttattctaggagagggggacctccttaaaagggatgatgccctcctagtcgcttgaagcatgtgtggtggagagaagaggggaaacacacgcgtgcgctcgctcgcctcgcctggcagggcaggcggcgcgcgtgcacgacgtacgcgtcgaatggtccgaaaaattggctcctcacccttgcgcagatgtgttccgaaaaatctggtgcgtgcaaacggcgtggagtccggataagttatgcgcgacttatccggttcggttacgcgcagtagagatcgtgcgagcgccctgatcaagcgacccttctctatataaaccgacccgccgtcttcacgcagtatatacgcaaaatcaatctagggtttgcctcctactctgtactgcgctgtcgctcgtagactactccatcccgctcgccggcgtgcaccagcgatcgggagagcaggtctccggaacctctgcctttgacgtcctgcaccgggagaaggcggcaataaggtttttgggaagcgcttcgcgcgactgctccctgttcgttcgcgacggctcaccttcctcttcgctcgcgtgtttcgtgccttcgtagacacctgcgaaaagtttcgaccaagcagccggtcttttcgtcacctcggtacgtgttcaatatgttgcgcatatttgatctgttcatgttattctgcgtagtttacatgtgtagatctaatgatgcgttcatgctagttttcatctgtaatgtcatgatttatttatggaataaattaaatcattatatgcccataatctcaacaatccaaaaaccttattataggcactgtgattttactatggctggttttgccgatgcactgaggccggataaattcaccggtgtgcattttaagagatggcagatcagggtcactctgtggctgacagctatgaaatgcttctgggtgagtactggcaaacctgaaggagttcttactgctgaacagcagaagcaattcgaggaagccactactctctttgtgggatgcattcttagcgttcttggcgatcgtctggtcgaggtgtatatgcatatgaccgacgctaaggagttgtgggatgcactgaatactaaatttggtgctactgatgctagcaatgatctgtatatcatggagcagtttcatgactacaaaatggctgacaaccgttctgtagtcgaacaggctcatgagatacaaaccatggctaaggaactcgaactccttaagtgtgtcttacccgacaaatttgtggccgggtgcattattgcaaaactacctccatcttggaggagtttcggtactgcactcaaacacaagagacaggaatactccgttgaggggttgattgcgtctcttgatgttgaggagaaagctcgggaaaaagatgccgcgtctaagggcgatggtgggcagtccagcgccaatgttgtgcacaaggcccagaacaagagcaaggggaaatacaaagcttagcagaccaccaacttcaagaagcagaagaagaacaacaacaatcctaatcaggatgagaggacttgctttgtgtgtggccaagttggtcatctggctaggaagtgtccacagcgcaaggggatgaaggcacctgcagggcagacttctaagtctgctaatgtgaccattggcaacactggagatggaagcgggtatggtaatttacctactattttttcagttaatcaatctactaattggtgggttgatactggggccaatgtacatgtttgtgctgacatctcattgttttcttcttatcaggtcgcacggggttccaccgtcctaatggggaatgggtcacatgcttctgttcatggtgttggcacggtagatctgaagtttacttcgggaaagatcgtgcagctgaagaacgtgcagcatgtcccttctatcgacaggaatcttgttagtggctcccgtctgactagagacgaatttaagatggtttttgagtctaataaagtagtcgtgtctaaacatggatattttattggtaaaggttatgagtgcggaggcatgttccgcttttccctttctgatttctgcaataaatctgtaaaccatatttgtggcagtgtggatgatgaggctaatgtttggcattcacgtttatgtcatattaattttggcttgatgtctcggctttccagcatgtgtttaattcctaagttttccattgtcaaaggttctaagtgccatagttgtgtgcaatcgaagcaacctcgcaagcctcacaaggctgccgaggagagaaacttggcaccactagaactcctacattcagatctttgtgaaatgaatggggtgttgacgaagggtggaaaacgatatttcatgacattgattgatgatgctactagattttgctatgtgtacttgttgaaaacgaaagacgaggctctagactattttaaaatttataaggcagaagttgaaaatcaacttgacagaaagataaaaaggcttaggtctgatcgtgtggagagtttttctcgaacaagtttgacttattctgtgaggaacatggcatcatacatgagaggacgcctccctattctcccgagtctaatgggattgctgaaaggaagaaccgcacactgactgacttggtgaatgccatgttggacaccgcgggactgcctaaggcatggtggggggaggcattgttgacctcaaatcatgtgttaaacagagttcctaacagaaataaggacaaaacaccatatgagatatggattggtagaaaaccatcactttcttatttgcgcacatgggggtgcttggcgaaagtcaatgtaccaataacgaagaagcgcaaacttggacctaagactgtggactgtgtttttctgggatatgctcatcatagcattgcctatagatttttaatagttaaatccgaggtaccggacatgcatgttggtacaattatggagtctcgtgatgctaccttctttgagagcttttttccaatgaaggatacacatagtggttcgaaccaaccctctgaaataattcccagttcaatcacaccaccagaacaaactgaacatacacatgaacttgtctctgaggaggatgtcagtgaagctcctcgaaggagtaagagacaaaggacggctaagtcttttggtgatgatttcactgtgtacctcgtggatgacactcctaagtcaatttcagaagcatatgcatctcctgatgcagactactggaaggaagctgtccgtagtgaaatggattccattatcgctaacgggacttgggaggtgacagagtgaccctatgggtgtaaacctgtggggtgcaagtgggtgttcaagaagaagcttaggcctgacggtactattgaaaagtacaaggctcggcttgttgctaagggctatactcagaaagaaggcgaagatttctttgacacttactcacctgttgctagattgaccacaattcgtgtgctactttccctagcagcctcacatggtcttctcgttcatcaaatggacgttaagacagcttttcttaatggagagctggatgaggagatctatatggatcaacctgatgggtttgtagttgaaggtcaagaaggcaaagtgtgcaaattgttgaagtctttgtatggtctgaaacaagctcctaagcaatggcatgagaaatttgacaaaacattgacatctgcaggctttgcagtcaataaggcagataaatgtgtgtactatcgccatggtaggggtgagggagttattttgtgcttgtatgttgacgacatactgatatttgggacaaaccttgaggtgataaatgaggttaaatcattcttgtctcaaaattttgatatgaaagatttgggagtagctgatgttatcttaaacattaagctaattagaggtgagaatgggattacactcttgcagtcccattatgtggagaagatcttgaatcgctttggctacattgatagtaagccttctccaacaccttatgatcctagcttgttgcttcgcaagaacaagagaattgctaggaatcaactggaatactcccaaatcattggctcgttgatgtacctggctagtgcaactaggcctgatatctcctttgctgtgagcaagttgagccgatttacctctaatccgggagatgatcactggcgtgcgcttgagcgagtaatgcgctatctgaaaggtactgtggaattggggcttcactatactgggtatcctgcggtactggagggttatagtgattctaactggatctctgatgtggatgagatcaaagccactagtggatatgttttcacactgggtggtggtgctgtttcatggaggtcttgcaaacagacaattttgacgaggtcaaccatggaagcagagctaacggcactggatactgctactgttgaggcagaatggctgcgtgatctattaatggatctgcctgttgttgaaaaaccggtgccggctatccttatgaactgtgacaatcaaacggtaattgtcaaagtgaatagttctaaggataatatgaaatcgtctagacatgtgaaaagacgattgaagtctgtcaggaaattaagaaactccggagttataacgttggattacatccaaacagcgagaaacctggcagatcccttcacgaagggactatcacgaaatgtgatagacaatgcatcgaaggagatgggtttgagacccatgtgagttatactatggtggtaacccagtctatgtgatcggagatcccgtgaattagatcctgggaagaacaaaccattaataaactagaggagagtaccaatatatataccctctccaagtgaagatgcatatactcttgacggagcgtggggctcctcaccgggagactgcgcaggcccccctttgccagttcggccgggggccctgggtgagattctaagctcctagtctgtgtgtggaaggttcgcgagaatggaaacacacaagacacgggcgatgtatacaggttcgggccgctgagaagcgtaatgccctactcctgtgttctggtggatctgtgtatgaagaagctacaaaagagctggagaaccagagagctcttactctctccctctctggtccttctggatccgaaaaatcaatcccccttctaagtgggcaaggtcctccttttatacctcaaggggataccacatgcaccatctctctcttttttgtggggacttatcctatcttttcataaacagacggagacttgtatggttgccgtccgaatgaccttctgatgggacggcccatacctacctccacttccgtcggaagcaggcgcgacgtgggaacatggctgtctgctgacgacatgaccagtgtcagaccggtcacaaatcggtcattcttgtccaccacgcgtcagtttatcaatctgcatgttcgcccctcttcatacaaagtcttgcttgtaatggttaggatgaagcctggtatatatctgaccgggaccaacgtgccatctccaggagctaacacgccggctccggctagggacgagtgattggaggctctcatcctgacgggatggggcgaggcgtgcgtcagaccgcctgtcgccacctaacccacgatctgatcggtctgtgactggtcactgaccggataaacgagcgcgctgcactgcgttacatgcggcgtgacgcgctcgtccaaaccgcaataaatgtggttaggtgagccccgctatgctcacctaccacatatacgcggcgcaaaacccacaaggggtcggggcgcctcgaccctcggggccgagacggatgcggtccgacccctcggggagacaaagagaagggcggccgtatcaccctcgggcccgacccccccccccccccgagggggttaggccacgtgggtgatcgtgtctgcctcaagtctctaagtcatgatactcccggtcccatgtcaccgacagtagcccccggcgttatgccagggcgatcgccctcctcgagggaagcggtcgggcgtgacgccacttcctaaggcctggtgacaggtggggccggtccaaaaatcgggacaagccggttcgtttttcctggagatatggtgatggcgcttcggtcggcgagcgtaattaacgcgcgcacgagatgttccatctcgactgccacggccgcatatccacctcatgcaccgcaaacgggcgaatgggattagtggaagcgtgggcgcgagaaacgagggggcaagatagtgggcgcgagaaacgaggagccgggcacagcgttggcaagggtataaagtcgccgaggaagagatttgcttccttcctctcgccattattccccttgtcttcgccgcttgcgccctaactccttgtttcctgtgccctaccttcgccacacgcgctcgctctcaaacatctcttcttccggcatcatggcacggggctccgctccgcttgacggtagcgtgctgccgccttcccgcatcgtgagcgagagacaggccgggctgccgcgccgcttcatgccggaatctgccaccggccgggagatagtctcgctgggcgagggatgcccggcgccacgctacccggggcggtccgtcttcttccttcctttcgctatggcagggctggttccgccattttcttctttcttcatggatgttctggagttttacgatctccagatggcgcacctcacccccaacgcggtaatgacattggccatcttcgcgcacctgtgcgagatgttcatcggggtgcgcccatcccttcggctgttccggtggttcttcaccgtacagccggtgtcgccgccgtcggtggttggtggttgctacttccagccacgggggccggtgctgaaccgctacattccctgcgtcctccgcaagaagtgggatgactggaagagcgactggttctacacccccctcgccgacgaagcgcgcctccgacttccgagctagcctccagcgcaggcctccaactggcgggcgccggtagatctgggagatggctacgacgccgtcctcgaccgcctggcgggcctgcgatcccaggggctcacaggggccatggtgttcggcgactatcttcgtcgccggatcgcgccactccagcggcgcgcccggggcgcctgggagtacaccgggtccgaggactgtatgaggacccaccagggggtcagatgggactaggctcctgaggacttcaagatagtggtccaacgggtgctgaatctcagctccgtggaggcatccctcattcctcaaggagtcctccccctctgcagcgatccagaccgcgcctccatcctgaccatcatgcaggcggtcggggtgtcggaggagcgggctcctcgaggccacgatggcgtgggcgggagccgcagggggaacaatctaccccgggagggggtcgtgcttctgggccccgcgacgggggcccggggagcggccgccctgccgacgcccgggggaagaggaagcaggaaggaacccctcccccatctcctccccgagggggcggggcggcgcgtgccagcagcaggcgcccggagggggccacgccgacgtcgcagcccgagggggagcggaagaagaaacggctccgcaaggtgggggggacagaaccatcccggggaaagctcatttcccctccaaggtggtcgtttaaccgaccccctcgcaggttcgtcccactcccatcgtggccgtattcattctctcaacgcgagttttcactcatccatcttgtttgtcttctggtctttcttctgtttcagcgagatcccgtcgcgtccctcccgccattccaagtccggccagcctgaggccgaggacccggcgaccatagaggcccggaggcgggaatctgaccggcgagaagccgcggatcgccttcgagaaaccgaggaggccgctcgggaggccgcccgggctcgccagaccgaggaagccgctcgggaggaggccggactccgccaggccgaggcgacgacatcctccgaggcgacccgtgaaactgacgggcaagaggccgcggatcgccttcgagaagccgaggaagctgcctaggtggccgtccgagctcgccaagctgaagaagccgctcgggaggaggccagacttcgccaggccgaggcgacgacgacttccgaggcaactcgtgacgaggccgcgggcgcatcgcttgggcccactccctcgtgcgacgctcagatcaaaccaggtccgggggacatccctgagtccggcacgtccatcggcgggccaagccgcgcggcatcctcttcgaggcggctcttccccacgccttccgttgctccactgagcgcagaaccccttctgcaggccttagccgtcgcaaacaccacagtgttggacgggttaagtgcccaggtggaggccctgcaagcagagcgggcggagctcgacgccgcatgggtgcgtgtcgatgaggggcgacgctcggtggaggccatggtggaggtgggccgcaaggcacaccgccagcacgtctcagagctcgaagtccgtcggaaggtgctgggggagatcgccaaggaggtggaggaggagcggggggctgccctcatcgccaccaccgtgatgaacgaggcgcaggacaccctccgccttcaatacgggagctgggaggcggagctagggaaaaaactcgacgcagcccggggggtccttgacgctgccgctgcccgagaacggcgggcggcggagaccgaggtggcatcccggcggcgcgaagaagcccttgaggcccgtgccatggcgctggaagagcgtgcctgcgccgtggagagggacctggcggatcgcgaggccgccgttgctattcgggaggtcacactggcggtgcacgaagccgcctgtgccgaagaagagtccgcgctccgcctccgcgaggacgcgctcaccgagcgggagcgagctctcgaggaggccgaggccgcggcgcaacggctggcggacagcctgtccctccgcgaggctgcgcaagaggaacaagcgcgtcgcaatctggaaagtgcccgcgccgagagggccgcactgaaccagcgggccgctgaactcgaggcgcaggcaagggagctggatgcaagggcgcgtagcggcggggcggccacgggcgacagcgacttagccgcccgcctcgcagctgccgaacacaccatcgcggatctgcagggcgcgctggattcgtccaccggggaggtcgaggcccttcgcctggcaggcgagatagggcccagcatgcttcgcgacgccgtgtcccgtttagaccgcgccgggcggcaggcgggtctctggggcgggcggactgtgaagtacgccgccaaccaggggggcctcgcccagcgcctctcggagatggccgggactctccagcggctccccgaggaactcgaggggacgattaagtcatcctcgagggacctcgcccgaggagcggtggagctcgtactggcgagttaccaggccagggaccccgacttctccccatggacggcgctggacgagttccctcccgggaccgaggacggcgcgcgcgcgcaggtccgggatgccgccgaccatatcgtccacagcttcgagggttcggcccctcggctcgcgttcgccctcaactccgacgaggagggcgatgacggcggtgtgggcgacagtggcgacgaggctggtgacccgggtgcatcggagtgagcccccaggcccccgccaatctttaaatagtttcttcttttcttcttccgagtccttcgggcccccttcttgtatagactaatttaatctgcaatcaaataaagaggaaattttttgtgtcaattctatttgttgtgtgtatgagacgaggatgcctgtgccgcggtccttttgtgtcttggcttgaacaagggctcgtgcccaggtcctagtcctcaaatggctcgggttggggctagtgcctggggagatccacatgtcgagactggccaggccgggagcgtggtgaccgagggttatgggttacccgattgtgggtttttgccgattcccccccggagttcaccacgccctggggcacggctcggttctgggccccgtttggcgattttagccgacccgagcccccgagggcaggattgaacacgagtgacctatttcaagtcaatatccttcaaaaggaaacaatagcacagatacagcctttaggaaatcgaaaatgcttttattgaaatacagatataagagaaataagaatagacatatgtggtagcccccggccaaccctgcacgcccgaggggggtgcggggttggcccaagcccgaaacctgacacccgatccccctttaggggtagaagcgacgaaggtgttcgatgttccacgggttaggcagctctgtgccgtcgcccgtggccagccgaacggagcccggccgggggacgccgatcactcgatacggaccctcccacattggtgagagcttgctcaatccagcacgcgtttggacgcggcgtaggacgaggtcgtcgacgcagagtgatcgggcccggacgtggcgctgatgatagcgccgtaggctctgctggtagcgcgcggctcggagggccgcgcgccaccttcgctcttccaagtagtcgaggtcatctctgcgaagctgatcttgatcagcctcgcagtacatggtggcccgaggggacctcagggtgagctcggatgggagaaccgcttccgcgccgtagacgaggaagaaaggcgtttccccggttgctcggcttggcgtggttcggttcgcccagagcaccgctggcaactcctcgatccacgaatcgccgtgcttcttgaggatgttgaaggtcttggttttaaggcctctgaggatttccgcattggcgcgctccacttggccgttgcttctggggtgggcaggtgaggcgaagcagagcttgatgcccatgtcttcgcagtaatcgccgaaaagttcactagtgaattgggtgccgttatccgtaataatacggttaggcactccaaaccgggctgtgatgcccttaatgaatttaagtgcggagtgcttatcgatcttgacgaccggataagcctcgggccacttagtgaacttgtcgatcgcgacatacagatactcaaacccgcccggggcccgcctaaacggtcccaggatatcgagcccccagacagcaaatggccacgaaagtggtatgatctgcagggcctgggccggctgatggatttgcttggcgtggaattgacacgctctgcatcgccggaccaggtcgaccgcatcattgagagctgttggccaatagaaaccttgacgaaaggctttgccaaccaaggtgcgcgaggcggagtgggctccgcattcgccttcatggatatcggcaagaagctcgacgccttgttcccgaggaatgcacttcaggaggattccgttagccgcgcgccgatagagggtcccttctaccagcacgtagcgtttggagatgcgctggacgcgttcactcccttcgcggtcctcgggtagagtcttatctgtgaggtatgcttggatctcagcgatccaagcaatcaatctaagggagctgggagcgctcccctcgggtcccgaggcctggactccgacgggcctcgggggcctgtcaggcgcgtccgtctcctctaaggggtcgggtcgcgccgacggctgggcaagcctttcttcaaaagcgcccggtggggtctgggctcgcgaggaagcgagccgtgagagttcgtcggcaaccgtgttatcccgtctgggcacgtgccgaagctcaatcccgtcaaaatggcgctccatacgccgtacttggcgcacgtaagcgtccatctgcgggtcagagcaccggtactccttacagacctggttaacgaccagctgggagtcgcctaacaccaggaggcggcggatccccagtccagctgccaccctgagtcccgcaaggagtccctcgtactctgccatattattggtcgcccgaaagtcaaggcgaaccaaatatctgaggacgtctccgctcggcgaggtcaacgtgacccccgcaccggcgccctgaagagatagggagccgtcgaactgcatcacccagtgggcggtgtgaggcagctgcgaggggcccgagctggcctcggggactgagacgggctcgagagctggggtccattctgccacaaaatcggcgagggcctggctcttgatagcgtggcgtggttcaaagtgcaaatcaaactcagaaagttcgattgcccatttcaccacccgtccagtaccctctcgattatgcaagatttggccgagggggtaagacgtaaccaccgtgacccgatgcgcctggaaataatggcgcagtttcctcgaagccatcagaatagcgtaaagcatcttctgggcctgagggtatcgggtcttggcgtcccggagggcctcactaacaaagtagacgggccgctgcacctttcggtggggccgatcctcttcgctaggggccacatccctggggcgctctttgtccaagcggcctcgcggggcgcactcgtcttctgtgccgacgacctcggggtcggaggacgacaggggcggccttcccacagtggcctcggggccgtcctgggggtcgggggctcctggcgtcgtcggacaagcgggcaaagggccaactccggtcgtcaggggccttaggccaccgtttggctcgggggcctcttctccctgctctctcccgggtcgagtcggcacagggttatcctcggggtcagagggcgataggtgcggccttcccgcagtggccctctggccatcctgggggtcgggggcacctggcaccgtctgacaagcgggcagagggcctgctccggtcgtcgggggccttgggccactgttcggctcgggggcctctcctccctgctctctcccgggccaagccagcacagggtgggggtgcgcggaatgaggatcgtcctcatcgcgctccacaaccaacgccgcactaaccacttgcggggtcgccgctaagtagagtagcaagggttcatttggctccgaggcgaccagaactgggggagagctgagatacgccttcaactgagtgagggcacgttcagcttcctccgtccaagtaaatggcccggagcgtttgaggagcttaaataagggtagcgccttctctcccagcctcgatatgaaccgacttagggcggccatgcaaccggtgacgcattgcacatccctaagcttgctgggggggcgcatccgctctatagctcgtatcttcttggggttggcctcgatgcctcgggtagagaccaaaaacccgagaagcttgcccgcaggtacaccgaacacgcacttatcggggttcagttttatgcgggtggagcggagactctcaaaagtttccgctagatccgagagtaaggtctcttggttgcgcgtctttacaaccaagtcatcgacataagcttcaacattacgtcctatttggctacccaaagaaatccgagtagtacgttgaaaagtaggacctgcattatttaacccgaagggcattgtcgtataacaataagttcctatgggggtaatgaatgcagttttttcctcatcctccctagccatgcgaatctgatggtaaccagagtatgcatctagaaaacacaaaaggtcgcaccccgctgtggagtcgacaatctgatctatgcgaggcagggggtaagggtccttaggacatgccttgttaaggtcggtgtagtcgatgcacatccgaagcttgccgttcgccttgggaacgaccaccgggttcgccagccactccggatggatgacctcgcggatgaatccggcctccagaagtcgcgccacctcctcgcggatgaaggcttgacgttccggggcctgccgccgtactttctgccggaccggcattgcgcccgaccgcacggcgagacggtgctcaatcacctccctggggaccccgggcatatccgccggtctccatgcgaagacgtcagcgtttgcccgcaggaaagagacgagcgcgtcttcctatttgccgtccagaagaccaccgatccgtgtggtcttggacgggccgtcgcccagggcaacctccttaaccgggacctcgtcgcatgtgactatccgctgcctcggggcggcgggggcggaggtgccaagcctctcgtcgcctccctcgggcttggacgcggcggtgaggtggtccgcgcgctgctccatacaagcaagcgcgactttgaggtcgccatggacagagatggggccaccggggcccggcatcttcatctggagataggcgtagtggactgccgccatgaacttcaccaacgcgggcctccctaggaccgcattgtagggcagactgaggtccgccacatcaaagttcacccgctccgtgcgaaagttggcggatccaccgaaggtgaccgggaggtcgataggacctagcggccaagtgtgacccggcgtcacaccgataatcggctgggacggccggagccccatccccggggccttgatagcgtcaaaggctgcgggggaaaggatgttgagggctgctcccccatcaatgaggacacgccccagcttcacgttgcaaacagtgggggaaaccaccatttcgatctgtcctccccgggcaacgcacggtgggtggtcggtctggtcaaaggtgagggcaacctccgaccaccgcgtccggcgcgtcgcctcatgagtaggggccgcggccagaagctctcgcttcatggccttgaggctccggcgagaaacgtgagcacacgctcccccatcgacagtggcaatggtggccccaggctcttggaaacctaggtcatcatcgccgtcatcgatgtcctcggcgggggccttctgcttggcctcacttcgccgattgccggaaggaaccgccggggacttgccctctcggcgctcctgcctcctctcctcctcccacttcctcgtccgctcagccaaagttttgactgcgcggcaatccgcgaggtcgtgaagggaggtgttgtggacgatgcaccacttgccggttgggcgctccctactgggagcgccggcctccttctttttgtcgctcgcaggcctcccctttcgggtggcccgcgaaacgccctcgacggcgaggacatgaccctcgtcgtcggaatgggctgacctcttcttcctcctcctgtcacgccgccctgtccgagcagcggatccgggggcggccgaagctgccacactggaaccggaggggttccaggtccatgcctcttccttacgagccactcggtccgcgtgctgaaaaagctccgcggtagtctggggctctttggaggcgatcttttcgagcatgcggttgtgccgcacacccccccctgaacgcgtagatcaccgcgtgtgcagggatgcatggtatggtgttgcggacttgacagaaccgctgaatgtatgagcgaagtgactcatcatcccttcgctggactgcatgtaagtccgcttcttcacctgggcgcggatatgtgccttgaaagttcatggtgaactgttggcacaaatcctcccaagagtggacggacgcgggtggcaagttcattagccaaccccgtgcctgtcccttcagggccatgggaaagaaattcgccatgatcctgtcgtcacccccggcggcctcgatcccggtcgtgtagacctggagaaactcgacggggttgacgctcccgtcatatttttcggcgatggtgggccggaaccttgggggccaatggacgttccgaaggctcgccacaaaggctctacagccgacaccaccaaccgggggcacggagggctgatccccgcgtccgtgttgatgtgacactccggacgaggaggcgccctccgttgcgtgggcagcacgtcggccattacgccggcgctcgatactgatgcgggcatccggcaccccacgcagatcttcctgggtcggaggcgttgacgaaggagtggcggccgaatggcgagcaaccgccgccgctcgccgcgcccttcgccttgacgacacggagccggtggtagcagcgccagaggttttggtggcggaggaccgcccaccagcacctaggcgctgccgtgccgtcatgaccaagttggccacgtcgtccagccaacgttgggctggagactccgggtcagggacaatgggcgggtgacgtaggagcgcgcccgcagcttggagcgcgccctggggcgtgctgccgtcgccgtagacgaggaggcgacgctccccatctcgccgcccttccccatcacccgtggatgtcgaagtcgcggatccttcgactctctcgagcgcctcctcccgcctaggactttggcgtggagggggcggtggagtacgagctcgacggcgtgggttcggctccccttcgtcaccgctaacactcggagagaggttgtgcgcctttgcttgttcagccattgggctgaacaggaaaagcttggcgcacacgaaagagtgcgagagcttagaagaacacacgtagaaccccctacctggcgcgccagatgacggagcgtggggctcctcaccgggagaccgcgcaggcccccctttgccagttcggccgggggccctgggtgagattctaagctccttgtctgtgtgtggaaggttcgcgagaattgaaacacacaagacacgggcgatgtatataggttcgggccgctgagaagcgtaatgccctactcctgtgttctggtggatctgtgtatgaagaagctacaaaagagctggagaaccagagagctcttactctctccctctctggtccttctggatccgaaaaatcaatcccccttctaagtgggcaaggtcctccttttatacctcaaggggataccacatgcaccatctctctcttttttgtggggacttatcctatcttttcataaacagacggagacttgtatggttgccgtccgaatgaccttctgatgggacggcccatacctacctccacttccgtcggaagcaggcgcgacgtgggaacatggctgtctgctgacgacatgaccagtgtcggaccggtcacaaatcggtcattcttgtccaccacgcgtcagtttatcaatctgcatgttcgcccctcttcatacaaagtcttgcttgtaatggttaggatgaagcctggtatatatctgaccgggaccaacgtgccatctccaggagctaacacgccggctccggctagggacgagtgattggaggctctcatcctgacgggatggggcgaggcgtgcgtcagaccgcctgtcaccacctaacccacgatctgatcggtctgtgactggtcactgaccggataaacgagcgcgctgcactgcgttacatgcggcgtgacgcgctcgtccaaaccgcaataaatgtggttaggtgagccccgctatgctcacctaccacatatacgcggcgcaaaacccacaaggggtcggggcgcctcgaccctcggggctgagacgggagcggtccgacccctcggggagacaaagagaagggcggccgtatcaccctcgggcccgaccccccccccccccccccgagggggttaggccgcgtgggtgatcgtgtctgcctcaagtctctaagtcatgatactcccggtcccatgtcaccgacaactctcatgagctgcaaggcaggttggctatgccttaatgagttctgttggctttaattagcaaagatgttgtcctgcagagcattcttgaaagaactcacctttgtgagcttgactgttggtcgcagtctatgaagattttgggtgaatcttctaggaagcttactaaagacctaggagtatgacttatacgctccacccgaggggtagtctacagacggtctagtaccagataagactttaagtgaaacttgcttgcacaagacttacaattcaaggcgtagtccattgttcaagttgtgagtaagtgtagcttggagttctaggtggatgttcaaccttaattggtctccatcgaaccactggtatataaacagtacattggaaaaggcaaatctcagtgggattttgagatttggtgggggattgttggaattaatgaatgggccttagcccactcgaagattaattctttggaaaatcataaaagcccacctcatgggatggcatgcatgtggagtttagtaccaccttgcttattctaggagagggggacctccttaaaagggatgatgccctcctagtcgcttgaagcatgtgtggtggagagaagaggggaaacacacgcgcgcgctcgctcgcctcgcctggcctggcagggcaggcggcgcgcgtgcacgacgtacgcgtcgaatggtccgaaaaattggctcctcacccttgcgcagatgcagcctccttttgcagttttgttttgctgcaaattcggattcgtttttgttttggaaacgttccgaaaaatccggtgcgtgcaaacggcgtggagtccggataagttacgcgcgacttatccggttcggttacgcgcagtagagatcgtgcgggcgccctgatcaagcgacccttctctatataaaccgacccgccgtcttcacgcagtatatatgcaaaatcaatctagggtttgcctcctactctgtactgcgccgtcgctcgtagactactccatcccgctcgccggcgtgcaccagcgatcgggagagcaggtctccggaacctctgcctttgacgtcctgcaccgggagaaggcggcaataaggtttttgggaagcgcttcgcgcgactgctccctgttcgttcgcgacggctcgccttcctcttcgctcgcgtgtttcgtgccttcgtagacacctgcgaaaagtttcgaccaagcagccggtcttttcgtcacctcggtacgtgttcaatatgttgcgcatatttgatctgttcatgttattctgcgtagtttacatgtgtagatctaatgatgcgttcatgctagttttcatctgtaatgtcatgatttatttatggaataaattaaatcattatatgcccataatctcaacaatacgtgtaccgctcctagccatacccgggacggcagctgcccccgcgccgacgccgtccgcgacctgtcacccaagcgcgcctccggtggtaggccgtacccgcgctggctgtgctggtacgaggggccccgccgtaccagcacggcagtcgatcgccgaagtcggagaagtgtactccagctgctgcctgctgcgccgaaatgtcaaaccggagtcgagcagagctgaggagagagagagagagagaggcagggcgactcttgcgttcgggaagaggcactctgccacgctgcttcaccttcgcgatcccatggctgatcagcaagagaagggtgcaaaatgtctgatccgtttagagcggactgaaagcagcacaccagtacgtggcgctgcaagcgtggatcgtcttcatgtcatatactcatatcctgatatccgtggtggatgtgattggtcaggaggaaaacgacgcatgcacagcttgatactgatacagtactgctagtatgaaatagcatcgtatcggagtaagatactatgagattttattttttaaaaaagtttaattaagatttgtattaattacaaatagccattcaataaaaaatacatagtaataatatatatcatgcaaatagagactttatcaagagaaatcacattagttttgatatatttaactgatttttatataaacttaagcatatatatttacgttatttttcaaaccatcttattttaaataatattttgtagaatcgtaagaatcgtagaatcaggatactatctataatttcgtaatatcgtgtcgtaataaatgaaaattaggatactatattgtttcgacttggtaattacgatacggatcgggatactaacaaccttggatatagtagtgaatatgtcgccatcacccctttcacttacgtgtgggcccacaatgctggcagtgttagtgtttcatcccgaagcaacataaatgtgtacctttagctcagcctaactcagtaagcatccaaaaattgatggaaaaaatggcttataggtggacatttttaggctttaaaatgaatcaaaatatattttttaatattccatggcaacacacgggcaaatcatctagttattctaaagttattactaccatattgtatctgaaaagcactctccttccaatcttaaatattattgcgacataattctcactgtctaaagggagggccgaatttattccctttatttaaaagatcacagttcactcacttaacacgttaatttacatgtctatagataattttcttttaaaaaaagataagtacaaatgcatgtgctcacatacacatgtacacgttgtgcacatcctatatctccgagagactggaccgatatatattgagattgacaaagttataataagtgtcttgctgttgacggggacatcatctatcaaaaaaatataattactcagaaaaatgatcacccatattaaatctggaatttaaattggaatagatataagaaatctaactagttgagttatatttgctggtatttatgaatcttgtttcaagtgaacaaggccacttgagacattgtttttaatttgtttaagtcaaatatcagttctaacaacttaggcagaacaaaaatctcaaatatatgagcaattttgaagcttctctgcagttatagcctggtttaattcctaactttttctttaaactttcaacttttctatcacattaaaactaattttctacacacacaaacttccaacttttctgtcacatcgtttaaatttcaatcaaacttttaattttcgtgtgaactaaacacacactatatatgtgaaactaagacgccgtacgtttggtctaatccatgaaggaaaggagaacgtggttttgagctttcatatgccaaatttgtcactatcgactcacggttggtgtttgaatgtttgttaggccacagcaacagaaaagggccggcaacttgttcgtaccactctagcctagtactccaacaatcttactccatctattctaaaatataagtatttttagatcatggcacggtcttcgagatgctatattgaccaacaatatttataaaagtaagatattttaaataaaaatagttgtatattatgatagtttgtttattgataaatctagtaacatcaattttatatgattgatgttctttactctttttttttttgctattaatagtcaaacttaaaaatgtttgacttatcactgtgctaaaaatgcttatattttaggacagaggaaatactattgagttactactggtattcctagtatttggtaggctagtattcataatttcctccgttttagaatatagcaatttaaaatcagatgagacttattctaatcatataaatttagagggagtatatccagattcatgctattaggatacgttctattcgatattgctatatcgtggaactgcggaagcacatggcaattgccaacagcccaaaccgcgggacacgcaagtagtacgtgcttgactacccgttttttttatgtgcatgcatgtgctgttgtgataaaagcaacgggtgcagatactagaagatatctgcctgtaccattcgatatcttggagaagtgccgtttatatatactccaggcagcatcacgaggtgcttttgtttcttcttcagacgtgcaggcgcaaatgggtgagatattctcgacgcattcattgagccgcctccttccggtgagtgggatatttctgatttctcgtcatgttttgatcactgcgtattcggcatgactgcctaggcacgtcttgcttttcagagcgatgcaaactcgcagatggaagatacacgggtgacgggttacggcccatgtttgatgggaggtcaccatttcgtagctttcccttgtgcgttgctcttcggctgtcacctgtcatgcacctgcatcccggatgtgttcttttccactgaaaacggaagataataggaatacgcgctctagctataatttaatgctgcgaaagttaaaaaaaaacgttctgcatatgaatctttaaggtgctattttaattctattttgttcgtttacttcctctatcccaaaaatcttgatgtttttagattcctcagcaaaattatcttcatgccaaaatgattaaattgctcccgtcaattcgattcagttgccattttatcaagtctacacgcactcatcaggttatacagaatcattgcatgcaattaattaataaattctttctaaaacacattgccaaataacttgacggaatagactagataaggggcaattgcaaatttaccactactttgaatcgttattgcaaaactgccactagaaaattgcaaaaatgccactagaactgtcattcgagtggtatccttgcaatattcaaaaaaccggtggcaaatttgcaaatgccccaatagataaatggtctcacttctccgatcaaatttactactccagcgactttttttattggtagaacggctcgtttgtagggtggatgaaaagaatcatcggttggccatattttctaataagttaaaacaactttattaagaaataaaaattaatttattggtaaaaaattgtatatttgctctgcgacttaaaagccaacataaaaaaatacattaaaaatatcttaaaatcaacttaaattttagcttttgctttagcttattaaaccaattgatagggcttgaaatatacttttaatcatttgaccatttagccatacaatgtttccttccattttattctgtccaaaataagcttaaagtactactatcttcgttctactatcttcgttctaaaatatagtttatttttaacacagtacattattccaaaataaagttatctgtttaatacctatctcctcccttctactattcacaactattttccttcactactccctccgtcctaaaatataagtatttttagttatgaatctggacaactgtgtatccacatttatagccaaaagttgttatattttaggacggaggtagtattttctattctcaaccaattacaaccatcctctaattcaaactatattgtccagattaatagccaaaagttgttacattttaggacggagtgagtaacatttttaatgcctatgtcaacaaaaaaaatgcttacattttgagatagttgtagtcctatgatactagagagtactttctctgttttagaataagttaatctagtactaactccgtcccaaaataattacagccgtggatattcgtgtccaacgttttaccgtccatcttatttgataaatttatgatttttttaaaaaaaagtcagacataaagtactattcatgttttatcatctaataataataatactaatcataaaaaaatcaaataaggcgaacggttaaacgttgaacatgaactatgcaaaactacactattttggaaggaataagttcacttcatgaccctcaaaagtgacccgaatctaatccatgaccctaaaccgcaaaaccggatatcttcacccccaaattattgaaaccggtgcaatttgactcccttggtggttttggagggcggtttcgctgacgtggcgctgacgtggcagtattgactcggtcttctttccacgtggcgcttaggtggcattagaaataaaaaatatgcgtgggacccattagtcattcacacacaaaataaaaattgtggggcccactgacatgtgggccccacatgtcatcctctctctccctttcttcttcctcccttctctctttctttctttttctcttctctccccttcggctggccacggggagcacgagcggctggagctggagcgccggccggcggggccagagcagcggcggctgcggcggtagcctcgctatcagcctcgccaagtggagagaggagaggagaggatgtaagggaggaacggaggtggtgggttacacgagaggcggcggcggcgcgtgagggcaggaagggagaggggagaagcggagccgctgagctcgtgctgtcgccgccggtgcctcctcccgcactcgtgctcgcccgcacgccgccggagccgctgagctcgtgctgtcgccgccggtgcctcctcccgcactcgtgctcgcccgcacgccgccggagccgccactcgatgcctccgtcgtcgacgtcccgtgcccaccgccgccgtcgacgtcccgcgcgatgcgaggatggatgcggggaggtggtggaggacggcgacgaggagctctgatcccggcgatgcggatggatccgaagccgtagccggcctgtagaccaccgtgcccccgctcaatctcgtcggcgtcggcgctgccgtcctctctcgcgtcatctctagcccgccgccgcttcagctctcgtcgaccgccaccaatccggcccacgccccccgctgccagctccagcccaccgccgctcgctccccgcaaacgcccgaagtggagagggagaacagaaagaaagaagggaggaggaggggaggtccgggaggaagaagaaagggaagagatgacaggtagggcccacatgtcagtgggcctcacaatcttgtgtgtgtgaatgacaaataggtcccacatatatgtttttaattgaaatgccaccacagtgccacgtcagcacacagactaggtcaacaccgccacgtcagcgccacgtcagcgaaaccaccctccaaagccaccaagggagtcaaattgcaccggtttcaatagtttgtgggtgaagatatccggttttgcggtttaagatcatggattagattcgggtctcttttgagggtcatgaagtgaacttattctattttggaatggagggagtaggactacagcaaaagtgcatccagattaactgcatcccaacaaatctgatgacgtggaccgaattatgtccccgtctgaggactgagagcccacgaagcaccgagtgcacgacgctattctttactccccgccacgtcatccccctcccccaccccacggcccacccctgtgcccctgtaccaagacaaccactgccacatgttgcgcctcggacgagtcccgccatggccccacgcgtcatccaccgggagaaaagaaagcaacaaaaacacatggccagcgatttttcgtgaattttctggcgcgcgccccacacctttgtggccaggaggcgcccatttgtagcaacccgggaaaggcggccttggtttttactatcgttctatccgctccccgctcgcgcggcttccggaggcgcgacgcgcgtcggccccggacaccaccagttcggtggtggattgcggctcccctctcgggtcggtcgctagcagcggcgtggcctgacgtgtcaaaaaagcgcagcgaaagtcccaaagtcctcgcccccacccggcgatctttgcgaccggacccgtccacacgagcgcggtcggtcgttgcggccgcatgccgctccaaatctagaggctgagatatttcctcggattttcaaaaggatttttactaggaaaatactccaattcctcgatgatctgtatctgtactccgtgcaggataaggtaggagtagctagctagcaatcccgtattctgtgaggctcgataaaagagagtactgctgctcctgcttgtgttgccatacatgttgacgtggcatcacgataaggtggccctttttaatcttggggagataagatttagcccttggtgatttaggaatgttcacatgatgctcgtcatcgaaaacgaatactctttttcgtcgctactactactctactctgcaagttatcttcgcgtgtcaagtttagtgagcgggggcaattactaatggcgcattagcaacacatgacagcgaggttgccggaggagcatccccagccacaagaacgagcggcttcccgaattcccccaccggattatttatttttcttttcgcgcgaggaaggtatagggggaaaaaaataaagaaaaaggagaaaaagagacggggaaaaaacgcagccaaaagaaaagagaagagggaaaaaaaacgagggaaaaagtttggcggaaaaaatcgagtcctacgtggcgcgtctcgccatgctctttttctcccgtcccctcctccctcctcctagtgcgacggggcctacgtaacgctcgcttctttgcctcctcgttcccttctcctcctcatctccccccatctcgtcgtcctcatcaacaacatcgaggagaaaactcgcaaagattgcggggtttgggaggcgctgattttttggctttggtgtggcgatcctgtggagtgtggtttggtttgggaggagttcggttttttcagaatggagatggcctgtttgccggtaaattgagtttgatctttccgtttcttttcttggcgagatcgtttttgaatgaactttgtttttcggattaaatgatgttactgggaactgaccgtgtgctgttttttcccctctttttgtggccgttctgtgctattcagggaaacgccatggcaaccgacgaaaacggtgccgacgatcgcgccggcggcgagagcaccgtggatcatctcaggagccatatgaactacggcgacatggatttgtcaggggaagagcacgtgccaaaggtaaattactcctccccccgaatcgcggcttctccgctgcaaaatcccgtgcggttcttgtgtgcttgagttcgttggctgctcgattccctcttaaaagattgtgttccttccttgcacgcttgcccccgaccaggcgcgaaagccgtacacgatcacgaagcagcgcgagaagtggacggacgaggagcacaggctgttcttggaagccctgcagctgcacggccgcgcatggcgccgtatacaaggtatgtctcatcgaacagatcgaattttcatggcgatcgatcgcaattgtccgtattcgcctgtgtgccgtaacgtttgtgttcgtctgtgtgtggatgcagagcacataggtaccaagactgccgtgcaaatccgtagccacgcgcagaagttcttctctaaggtcgtacagcctttcgttctcatgtaaacaacaacaaaaaatctctgatctctgccatgaaaaaacaaacaaacgaaaaaaaaaaaaccattggttgtgttacttgattgcccaaagtaagtcgccaatttttcaattttttttcatgggagagaagaacagatgatgtcatgtttttactgcgggttgtttcacagagtttcctgacgctgtgattgcgcggtgctctgcaggtcgtcagagaatcttcggggagtaacaccggctcgggcggcgcgtccgccgcggcggcggcggcggccatccagatccctccgccgcggccgaagaggaagccggcgcacccgtacccgcgcaaggtggacggcgcggccaagaagcacgtcccggcgctcaggcagctggagaagccgccgttgtggatgcagtccctgtccgagcaggaggagggctcgccgacgtcggtgctgacggcggcgcagataggcaccgaggccctgggcggtgggttctcgaataactcgagcggcagcgggtcgctggctccgtcagccgccggtacggatgagcatgtcgacggtggcggctcgccggcgtcgtcggtggacagagaggacgggtgcctctcaccgagcatcccgactgctgagttggctatgcaggcgccaaatactaaggtatattctttcgtgggcagcacatgttggacaactttgtaaggcattagttcttccaattttgcaagaatacaagatattccccatcagaaaagcaatatttaggaccaataatttcagtcgagaatttctgacatcactttcagagaaacacaggtttttttagccttttaggtaggagtatctctgaatcaaattgtgatatgcaatctgatcatctgcagttttacatggtattaatttgatctattgtcgccaatggaaaaataaccatacccttttagtgttattggcacccttaataaattctgtttttgtttttcgaatgtgaatttcagatgtcaattgcaaccacggatgccaaagaagcatcctcagaagcatcagtcttcaggctattcggaaagagcgtagtggttaaggattcagaccagctgcacctgcttaatggcagtaacattgcaacgagtggttcagttgagagagcaaccagaaacatactagtaccttcttttgctgctgccccagaagggagctcgtcgaatccatggccgagcagcatgcaacagtttctctacttccttcctcgatcggatggtttcgccgcgcaacctgtcatgccatggttgagctacaacgggagccttccatgcgcgctgttctacccggcggcggcggcggctgcgaaccagcagtgccaccgtgattcagagggcgtagagttcagagtctcgcagagggaaggatcgctgacgggctcgaacacggcctccagcgtcgtgcttggatcgtcggcggcggtaccggcggcggcggcggcggctcagaattcggacgtcgcggagtcccgtggccaagggaacagcagggaggcggcggcctcgccacggctgaccaagtgcgagagctcggcgtccgtcaccctgctgcagaggggcttcatgccgtacaagaggtgcgcggcggagagcgagctgctgcgatcggaggccgccggaggagaggaggccgtcgccgacggtgagctgacaaggctgtgcttgtgacaactgactcgtcgcacggacacgtcacgccacagtactactattcgtaggtgacaaataacaaatctgacatgagattaaggcgggaagaagaggcatgtcctgctgttaggatgttgctcgagaccactttagttttccagaaaatggaagagcaattctggtttttactcgtcgatatagtattgtataatctgtaagataacaacttttgtacttttttttttactttgcctgtaattttatccccaactcgaatacgttcagagttgagtggctgtcaatgttgccttttatcaacctgaatctcggacaggggttgccataggctaactacatgtaatctaggcttgtatctctccacaaaatgcaatggaaagacgaggaaatgttggatgcaatgtagtctgtacttgtgtgcatcgaatcagcatagatatctggacttggtttcatggtttgttaccatagtacgattttggaccatgtcagagcaggtacaattctagattataaaccatcgataatataataaacacatatcgataatataaatgagaagagatgagaagagataagagtagcgagttacagatttatagacagctgcagcgtagactataagacatagtgtgtgtatgacaggtggaatcaggtggtagatgtgacaaatatagtacaatgaatctggacaaacatttgtctagattcattgtattacgatgcttcacatccacccaaaatctcttatattatgggacgaatgaagtatatgtttatagggtactacctccgtcctaaaatataagcaactagttgggtggccaacgcaattacgcggctagcacccaaacaaaattatatattttcttagtatgattttacttaaaatttattaaatagctatatcattgtcttaagactttgaaagactaaaccttatcatcatcgtgtttctaattatatagtttttaaaagtcataccagttgctaccccttgtgtcatcttcttctttatttgcttgctcgatctaccattatttctattcattctttttggaacctttaaaaattggattttatagtttttagagtttattgtcaagttggatttcatttttataatttctaaatgtcccgtcaaacgttgccattatactcctctacggcccgtccactgtctcttctctttattgtcattgagattttaaaaatcgaacataattatcgtttgggttcattttttactttctagaagtccagccaaaccgtcagcagctttgccattgtactcctctacggctcgcccgctgcctcccttctttattgtcattgagattttaaaatcaaacattattatcattgttttttttttatttttttagaagttccaaacctttaaaaatggacttgtagtttcactttttataacttttagaagtcccatcaaacgatgccactatgcccctctatagcccgtccgccgccaactctttattgttattatgattctaaaaatcgaacataactattgttggaattcatttttttattttctagaagtcccgtcaaccttcggcggctctgcaactatactcttatacacccccgctgcttctcctttttattgtcattgagattttaaaaattgaatatgattatcaatgagttttttttttactttctagaattcccggcaaccgcattactaatttgcttcacggcctgcctaacgtccctccttttaattgtcattaggattctatttggtgttttattaacaatttttatatctcgtatcaaccgccaccactctactcctttataggcatgttacttaatttatctcgtcatatgttttagatggtcttttctttcaataatctttattttatcacaaattttagttatttaaaaattgtattcctaattgatatcttatttttctttttttaatttcagaatttttttaaaaaaattttagttaatatcatattgtattctttgaatgtttttattttttattttcaatttcagttgttttaaaattgtattcctacatgaacttttgtcatgtgttttagatggtcttttctttcaataatctttattttatcacaaattttagttatttataaattgtattcctaattgatatcttatttttcttttttaaatttcagaatttttttaaaaaaattagttaatatcatattgtattctttgaatgtttttgttttttattttcaatttcagttgttttaaaattgtatttctacatgaactttcttttaatttttctaattttaggtattattttatttttattctcaattttaattaatatcgtattaggttcttatatggattcttctttcaatattgcatatttttaatttcgaatttcagcaaattttaaattttattcctacatgaactcttcttttattttcttttgctaatttcagatttatttatttttatttcgaattttagttaatctcgtattgggttcttatatggactcttcttttattattccttatttttaattccgaatttcaactatttttaaattgtatttctacttggactctcattttcttttttaattttggattttattttatttttgttttgaattttgattaattccttattaggttcttatatggaaacttatttcaatattccttatttttaattccgaatttcagctatttttaaattgtatttctatttggactctcctttccttttctaattttagattttattttatttttatttcaaattttgattaatctcgtattgggttcttatatggaaaattattcaatattgcttatttttaattccgaattttagctatttttaaattgtacttctacttggactcttcttttttttctttttcttttatttttatttcgaattttgattaatctcgtattgggttcttatatggaaacctctttcaatattgcttatttttaattccaaatttcagctatttttaaattgtacttatacttggactctccttttctttttttttctttttcttcgattaatgtgggaatttcttttaatttttctaattttggatattatttttttaattctgaattttaattaatcacgtattgggttcttatatggagtcttctctcaatattgcttttttttaattccgaatttcagctaattttaaattgtactccgatttgaactattctttttttttgctaatttaggattttatttttatttttactcccaattttaattaatctcgcattgtgttcttatatggactcttcttttaatattccctatttttaattccgaattttagctattttaaaattgtattccgacttggactatccttttcttttctaattttggattttattttatttttatttggaattttgattaatccctcgtattgggttcttatatggaaacttctttcaatattgcttatttttaattccaaatttcagctatttttaaattgtatttctacttggactctccttttcttttctaattttggattttgttttatttcatttcgaattttgattaatctcgtattggggtcttatatagaaactattttcaatattgcttatttttaattccgaatttcaattatttttagattgtacttctacttggactctcattttattttattttctttttctccgattaatgtgaaaatttttagcccccagagcgaacgtggtgcctcctttcaaagctgttttaataatataaatagctgggtggcccgcgcaattgcgcggctagcaaaaaaatcatatatttttttaagtatgatttccttgaaatttattaaatagctatctcattgttaacactttgaaagaccaaaccttatcatcctcatcctcatgtttctaattatatagttttaaaaatcacaccagttgctaccccttatgtcatctcattctttatttgtttgctcgatctatcactttttctattcattcttggacctttaaaaattggattttatagtttttagagtttattgtcacgttgggtttcgtttttataatttctagatgtcccgtcaaacgttgtcgttatactcatatacatctcgtccactatctcttctttttattgtcattgagattttaaaaatcgaacataattatagtttgggttcatttttactttccagaagtcccgccaaaccatcagcggttttgccattgtactcctctacggctcgcccgatgcctcccttctttattgtcattgagatttcaaaattgaacatgattatcattggtattttttactttttagaagttccgaacctttaaaaattagacttgtagtttcattttttataatttttaaaagtctcatcaaacgatgccactatgcccctctgcagcccgtccgccgcctactctttattgccattgtaattttaaaaatcgaacataactatcgttgcaattcattttttattttctagaagtcccgtcaaccgtcggaggctctgcaactatactcttatacaccccgctcgctgcttctcctttttattgtcattgagattttaaaaatcgaaaatgattatcaatgtggattttttttctttatactttctagaagtcccggcaaccgctttacttgtttgctttatggcctgcttgacgtccctccttttaatcgtcattaggattctatttggtgttttattaacaatttttatatgccgtatttgttagggttacgggttaggcttaccctttactgtcacgtcccaaaacgaccctaaaatacattctctaaattatgcctagaataattaaaatccgtgtgaaagcctccaaaaattaaaatgtgcaaagtaaaagtcaaataaggcttagaggatttttgtatatttcctaaaagcctaaaatatgtaaataaattttagtggaattttcatagcacaaataataattgttaagaaataaacaaagttaaaaaggttttataaaaaaaaaccctaaaaatcccccttccctctcttgggccggctcggcccacttccctccccctctctcctcttccctcgcggcccacacggcccctccccgcgtgcgctgctgacgggcgggtccgcctgccaccctcgctgacgggtggggcccacccgtcatctccttcctcccgccgctcccgccgcctcgcccgcgcctagcgccgccgccgccgcgaatcccgccgcctccggccgttcccgcgtgcaataaagtggggggaaatattccccgtgatcccctccccctttccccccatttttccctctctctctctcgcatacaaacgggcggatttgctcccgcaaatctcgccggcgccattgatggcggccggacctcccggccggtttccttcctctcccggccgccctctcccccttccaaccctatttaaaccctccccgcgcctccctcgcctgtttctgccccttgccgcaccgtctccctgccggaatcgagctcgcgccatcgccctctctctcctccgtcgcagacgacctccggccggccctctccgctcgccgggaccgtctcccgcctcggcgtcgccttctccggcttcgccgcaccgtcaccgtccccgtccaccccctcgtcaggctcgccgaccgccggagcgccgccgtccccgtcgacccaagccgcgccgccgccttcctccgctccggccgcctttttcgtcgtcgccgtcgacctagggtgagccgtggaccgccgcctcttttcccccttcccttcccctctctcggccgctgctccgccgtgcctatggccgccgccggcgaccataggggcgcaggtgccgcctcccgccgaccgcgccggcatggccgccttcgggcgcgccgagtggccgccgcgtggggcccggccgtcagccgcctacgccctcgggtgcggctgacgcgtggggcccacggcgcaggccggtgtgagcccgggagcgcccggtccaccgtggaccgtgaggctgccgcgtgggccccactcccatggacccggtccgcgcgccctctcccctcggctgacgcaataaaccatttttaaattaaaatttaaatgaagaaattcgcaaatattcacttaaagagcatataaacttcaaatggccataacttggccatttgaactcggaattggaccgttcaagtctctaatttttccttaagaagtcaagaacccatttttgtgctttgttcctgcttgttatatggagtttattagagtaaaagcctttttcctttccattggtcgtgtagacgctgcagcttcggaagatccgctcttcgtgaaggttgaagccgacgtttgggaaagtgatcaaggcaagtcacatcatccttgaacatattgaatcccagtttataaaattattttgatttaaattaatgcattatcgctttatttaaattcccgcgttatcactgttttatttagccatgcctatttacctttgttatgacctaattattattgctattgttattattaccttgttcaccctagactaaacaaaacccccaactagtaggtaccctatgcatggtaccactagtatgaatttaggtagatgcttcgctgcttaattaagcaacattaggtggttttacaactctagactttgggaatgttcatatcacctagacactatggaatggttggattattgtggaattggattcacacctccccctctattcaaaatcctcaaaatggttttaggctgggctcggggtgcatggttttgattgtagcacctcggccacataaggaccggtcttcgggcctatgttgcaaagcactaccgtacttccacatgtctagtgggtaaggcttagtttgtggctcagtctggttataaacaaaagtacacggatggagatggacgaagtcaggggtcgatggacatctctagggcaaatgaaggctacacgagctgcggcccggtagtcgagatgtcatggcacagggctggtgtcctgctgctaggggctcagtcctgcctacctgtcccagaggttccggccgtaggtggggttgggtcggtactcttgtctatggctaggatgggttggaaactatgtcacgtcttccgtccgtataccgtggtggtatgtggcacgtggttacacgtgaggaagatgtgtcttgtgggtaaagatgtacacctctgattagagtataacctattcgaatagccgcgccctcggttataggcaagcctagcaatgtacccaagttagtgttttaattcttaaaacctgcttaacaactaaaatgtggaatggttggcctgggttggcttgggacgagctgggacccagggtcgggttgccagttcggtctgaatcatcgtaggtcttgggttaaggcaggttcgtgtgggttcacggccttgattaataatattgcatagctctaggatcgtatttacaaaatagctttgagcaactaagtgtcttttaatgctgtttactgcaaaccctaaccccctatgttataactcccttgtactcccttgcatttattctgcacttgtgggtgtgtcttgttgagtacggtggttgtactcagtcttgctcaatttttcccaaacccagaagaggagttcctggaagatgaaggctttggtgtctagctcgtgcctgccgtcaagcgcctgtggtcgtcgccctagtcttccgctgtttttttcgtttgtcttcctgtgtgctgggccttcgccgcccatgtaataaattatctatttacacttccgcttgttaaactctgtattgtatcaacttttggtgtaccttgcctcctgggacaaggaataatacacgcacgtaaggaacgcccgttgggttatttccggtcgtgacatttacccttcgatatacgttacatatcgatatggcatacccacgcgcatgcggatatttcctgtatatcctaaggaaacttttcacggaatctacagatgggaagaatcctactcgggcagaactgggtcgttggcgtatcgtatagggtctgatacctccgagttctatgaggagacctccacatctgcgatataaaaggggccccccggggagggtttaggatcgaatctcagacccaacacaacctccacagcctacgaagccggagcttgcgaggagccaagtcatcgagagctagtcgaatcaactcgactacaatctcgccggatccgacaagttcccttgttctctttgtaacctgtgttttttaccatataatcccacatcaactggattagggctattacctgtcaaggggcctgaaccagtataattcttgtcttttgtttgcttgatgtcatactacgtagatccttgtatcaacgtaccccaataccctctatatccagtctacgggtatcacccgtcgacagtggcgcgctaggtagggggccttggtacttaaggttctactactatgtcatccagcttcgtcgacaacaacgtcagcaccagcctcagccaagtactccctgcttcaacaatgctggtatggactcaagtcggcgaaatcgtcttcccggtttacaccacgacaccgatctcaaccggtcctccaatgaccggagacgagaacgcagtggctacgaaccaaggcgattccatgtcaaaaaatcctctcgtcgagacggagaacggaatatcgacgacatccaagctcaagagggattctgatacggccaaaccttgtccttccgacatgaaccacgagccgacaaagatgacttccgaagccacaaggtcttggtgtcctatccacaaaaccaagaaacacaccttgcaagattgctgggttttcctcaacgtccgtgctgaaattcgcgcctgcaaagaacgtggaattcagcgtacttctccaactcgggatgtctattgtcctattcacaagacaaagaatcaggacctctcgagctgcaaagtctttctcggcgccatgaaagctcagtctcctaagtcatatgtccccatcagggataatgacaaggaacaaggagtgactccaacttcagatcgattcgttggagtaatcgatatcgatcctcacgaaccatcggtcttacatctcctcgaggactatgggtcatcgacaacgagcacgccgcgggaggtattggctatcgatgatgttggcacgtcagcgcacgccaacgcagaagcggggaaacaatcgactactcaagcccagcacatcaggcccgttcaagcgatactgagggaaactccttacgatcccgttctgaacgttgacctcgagcgttggatagaacgactatgggaatcggtgactaacctcagcaacgcgtttgaagaagccgctaccgcagcacaccaggagcagccaccaactggcgaggccaatagtgaagatccggaacggagggaatcacctcaacgagctaccccttcacctcgcggcactggcgatcttcgagatcaaatcaacggccgccgggaagcacgacgcacacgagacaacgtgaatcgctcttgacgtcatgtctcttcacggcgccatgataacggaaatcgaggagactgctcaaacgaggaccgggaccacgacaaccaccacgatcacaacgatcgcgaacgacgggtgccagacaatactggtcatggccgccaccgtatcgacgacgacgatggagatcggcgccgagacaacagtggaagacgacgacaggattctcgagatccaggccgtcatcctcgtaatcgtacgccggaaccaagtgacccatcgtcatcgtcatcatccgcgtcctcctcatcgtcagacagatatccacgaaggacacacgatcgccaacaacccaccgccccaacgctgggtgtagggctttcggtcgttccctacgtgatgtctgatggtctgagagattccgacccggagcaatagaaaagtatgatgggagcaccgacccagaggagttccttcaagtctactccacagtactctatgctgccggagcagacgacaacgcgatagcgaactatttaccaaccgcgttgaagggttctgcacgttcatggctgatgcatcttcctccctactcaatctctttgtgggcagacctgtggcaacaattcatcgccaatttccaaggaacatacaagcgccacgcgattgaagacgacctacacgcgttgacacagaactcgggtgaatcattgagggaatatgtttgacgtttcaatgagtgcagaaacacaattcctgaaatcaccgacgcttttgtaattcgcgccttcaaatccggtgtcagagatcgctacactacccaggagttggcgacaagacgcatcacaatcactcggagattattcgagatcgttgagcgatgtgcccacgctaatgttgtgctaagacgcaagaacgataggccgaagaccgggggagagaagaaaccagccacggacacatctgagtcaagcaagaagaaaaatcgcaaaaacgggaaaatgaaagctcaagcggaagtcctcgcagcagaatacgcaaaccctcccaaacacccagacccacaaagcagcgacacaaagaaatcatggtgccccatacacaagacggacagacattctctggaagattgccttgttttcaaaaagtcgctcgagaagcacatggcatttgaaaaaggcaagcgagtacgcgttgttgagacgaacgaagagacggctcctcacgaaccggactcagcgtatctagactccaacctccacgtctcacacatcttcggcggttccacaacgtactcctctaagcgagaatacaagaaagtggaacgtgaagtctgctcgacatggcagggggctgcccccaagatgaagtggtctgagcagaagatagagttctcggaagaagaccaccccaagaccgccgttatcccaggatgatatccgatcatggtcgaacccactattcggaacatcaaggtagcgcgagttctcattgacggtggcagctcaatcaatcttctttttgccagcactttggacgcgatgggaattccgcaaaacgagttgacaccaactgatcaacccttccacggaattactccccaatcatcgtccagacctttgggcaagattacatttcccgtgactttcggccaagccaacaacttccgaacagaacagatcacctttgatgttgctgaattcgatacagcttacaacgccatcatcgggagaactgcacttgcgaagttcatggccgcatctcactacgcatatcaagtgcttaagatgccgggaccaaagggaacaatcactatttaggggaacgcaaagctggcggtgcaatgcgacaagcggagcctcgacatggtcgagcaaacgcccagcccacccgccacgactgagccacccaagaaagtgaccaagacaaataagacgccgaaaccagacggcgccatcaagattgttccactctccagttccaaccccgacaagaccgtcaagatcggggcaacactaaacgagaaatagaaactcgcgctcatcaccttcctccgcgacaatgccgacgtgttcgcttggcagccgtccgatatgccgggggtccccaggaaggtgattgagcacaaactcatggtgcgacccgatgccaagccagtaaagcaaagactgcggagatttgcaccagaccgaaaacaagccatacgagaagagctcgacaaacttctcaaagctggcattattagagaagtacttcatccagagtggctagccaatccagtcatggtgcggaaggccaacggaaaatggaggatgtgtgtcgacttcaccgacctcaacaaggcgtgccccaaggatcactttccacttcctcgaatagaccaactggtagattcaacagccggttgcgagttattgagcttcctcgacgcttactctggctaccaccaaatcagcatggcaaaagaggacgaagagaagacagcattcatcacgccgtttggggtattttgctatgttaagatgccattcggactgataacagctgggaatactttccagcgcacggtccagggcgcacttagcaaccagcttggcaacaatgtcgaggcttacgtcgacgacatcgttgtcaaaaccaagacaggcgactcattgattgacgatctgcgggaaacgttcgacaacctccgacgatatcgcctcatgctcaatcctgagaagtgcacgttcggagtaccgtcgggcaagctgctcggattccttgtctctggcagaggaatagaagcaaaccccgagaagatcaaggcaatcgagaacatgaagtcgcctacaagactcaaggaggtacaaaaactaaccggatgcatggcagcactaagtagattcgtcgctaggatgggagaacgaggacaacctttcttcgctctgttgaagaaacaagacaaatttgtatggacataggaagccgaagaggcattcattgcactcaagtgctacctatcaaacccccctgtacttgttgctccccaacctaatgaagaattattcctctatattgccgccacgccacactccgttagcactgtcattgttgtcgagagagagaaagtacagcgactagtttattacgtcagtgaagctctccacgacgcaaagacaagatacccacagatccaaaagttgctttacgctgtcatcatgacatcaaggaagctacaccactattttcaagcccacagagtcacagttgtctcctctttccctcttggtgaagttgtgagaaacaaagacgttgtcggccgcattgcgaaatgggtagtcgagctgagccagtttgatgtccactttgtgccacgaacagccatcaagtcccaggtactcgccgacttcgttgccgattggactatgccagataacaaattagacaaccaaggcgacaatgaaacatggacaatggcgttcgatggcgcactcaacagccaaggagcaggggcatgatttatcttgacgtctccctccggagatcaattcaagcacgcaatccacctcaacttcagggcaaccaataacactgcagaatacgaaggactactcgccgggatacgagctgcagctacacttggggccaagcgactaatcgtcaaaggggactccgaactagtcgcgaaccaggtacacaaagattataaatgctctaactccgagttatccaagtatcacgcagaagtcaggaaactagagaaaaagttcgatgggatcgaggtccgacacgtctaccacaaggacaacgtcgagccagacgacctagcatgacgtgcgtccagacgagaatcgctcgagcccggcacttttctcgacatcctgacgaagccatcggtgaaagaggttagcggcaaagtcagcccgaacacccccgacattagctcggaggtcaccgaggcagaacgcgccattgccgacatcgaaaccacagacgactggcgcatcccactaatcaaattcatcagcagcgaggagttgcccgaggacgatacagaggccgagaaaataacccgtaaagcaaagatctactgtacggtcggcaatgatctatataagaaagcgccaaacggggtacttctcaaatgcgtctcgaccgacgacagcagacacctcctcctcgacatacatgaaggcatatgtgggtcacacgccgccggtcggacattggtcggcaaagcttttcgacaaggctttttttggccaaccgcccttaaagatgcatgcgacatggtccagcgatgtgaagcctgtcaattccacagtaaacacacaaagctacccgcgcaagcgctccagactatccctctgacttggccattctcgtgctgggggctagatatacttgggccattcccacgaggacagggcggctacagattcctattcgtggcgatcgacaaattcaccaaatggatcgaagcagtacccacgggggaaatcaaggccgacaacgccatcaaattcatcaaagggatattttgcagatacggacaaccacaccgcatcataactgacaacggctcctagttcatcagcgccgatttccaggactactgcatcgggttgggggtcaaaatatgcttcgcctcggtctctcaccctcaaagcaatggacaagtcgagagggcaaacggcatagtattacaaggaatgaaaacccgcgtctacgacaggctcatgtcacacgacaaaaggtgggttgaagaactcccatcagtactatgggccgtacgcaccacaccgacaacgtctaataaggaaacacccttcttcctcgtgtacggctctgagaccatgctcccaggcgagctacaacatcagagtacacgagtacagaagtactccgacaagaaccaggaggagtagagagatatcgatgtaaatcttctcgaggagcatcgggaacgagttgccgtccgagcagccagctatcaacagaccctccgccgttatcacaagaagcacatccgtgcacgcatactttcgatcggcgactatgtcctccgacgagttcaaagccaagcagggcgaaacaaactctcacctaaatgggaaggaccttacacgatcacacaagtcttgcagccaggcgcattcaaaatcgtagacggcgacggtcgtgaattagcaaattcttagaacattgaccaactacgtaaattctatgtatgagtcaataccatccatacctgtaagcacccttacagtattaataaaggctatttctaggcccatattacaatcaacgtgtttcccccgatgatccctcactctgatgacacctagtgttgaaacctgtccttatgtccctttacgccgtctcgacaaggcctctgaggaacctaagggatcttcggctggggacgcccagagccgataaggccttgtcagatcctgtagagacgaaagaccatataagatctggtcgtgtaagagttctcgccgtgcgtattaaccaagccgtgaaatcggaaattaactttccaacttcacggctgggggctaggatcaaagcttattcaaccaaggcaggtcaaaggtccaagagccttatcctccgagaaaattcctccgacgacaaggctgggggctagggagagtgtacgactcaaacggctgactaaagtcgttaactgagaacgcactcttacacatgacatccagagtaagagacatttgtcaaagatagatttctttattcacaaaatactccttacagttttttcacaaatctttcgctacattacatcttttcctaagatatttgtcatagggtacgagtactaccaagaaggccaacgccagtccatagactagaagatcttctcggccaacgacgacattgaccttgccagatggtctatctccgccggagtccttcgagaacgagcaaaaccctcacgaagatattcgaggtccaggcgcgggcgatgatctcgtaggcaagccaacacgtgccccccagcatatcggctcgatcgatgacactcctgcttcaaggcctcgtcgatacgctttccgattccatcgagttgggcacaggccccattaagccacgagatgtacccggccgccgactcctcgggatctccgcggactactcgaagctccctgcatactctggccatggatgtgcagcaactcttcaagtacgagttaaaccacacctcacgacctcggagcgtttccacagtctgctctttcttcatggccagcatggttctctcgagctctgccacttcaaacttcgtcttccagtattggatacaacgatcttggctagcaaggacaccctcgagatctgctaaacgtgataaccactaagtcaagctatacatctctttcgggatatggctgacctagtcaggtgggcattaaggggtgaagggactactaacctgaggaagtcgtcgccgtccttccctctatatcaaggggttgatccacatggtcaggcgagacgtgtggttcaaactcgagtaccggaattactgccagtgactcgagctgcccgcgctgctggacatcctcgtgatcagtatctctacagaggacaaaagttcccgaggtcagcataccaaagtaagccgggatagtaatcgcacgcacgaaggcggtcagagttcgagttttacacattatctaggaaatacaagaagtcctactcttcaaaaagggggagaacagactcccccagatcaccgacttcttccatcacctccttacgcgtgtcgctggccgccccctggtccaagatctcacgcagatcgagttcaagacgcgacagccttacacacgcgaggacatgacacgccccggtgtagattccgtttgacgtctcctccgcaatcctagccgcatgcttggaggggatttcccccatcgccgtcaccaattctgcgagagaggaggtcagcgaaaactcatcgggattcaccgggatcgtggacgtgacgccgcattccccgacgagctggtgaaggctagtgtaggtgaccctcaacgagccccggatctcagataggttgttcccgagttccgacattcggtcctcgagccccttccgttgtcgctcgttgccggctgccaactccctcatcttcgtgaggtcttcacgggcttcaaccaactcgcacaccagtctgtcagcacgcgcgttcgccgtcgccgcttccgacctcgcctccgcaatctcgcggtcgatgccgcgagcaccggcttcgaggaggcgccccatctcgacttggagctcctcccaggtgaggactgcagctggcagatcacgacctaccgcggggtcgctgactgggccactaggcatcgcctcccggctctcggctacgggcacgacatccgttgaggccacgacgggcgacgcactggaagctcctctagacttggctcgtgcagcctttgtccgcgcctccctacaggacgaccatgagtcagacaataatcgaataagaagcgcggggattcaagaattcatctacttacttctcgccgatcgtcacaatgcgttgtcgtcgtggaggtgggggagacgcgtccgaggcctgaaagacaatcaacgcaaagtaaggaaaaatccttcttgctgcatgatttaacgacaaaataaattaccgagggggtcgacgccttgcgacgatgtccgcttacagacgagaatttcctcggctttgtcggaacattgccaccgctagtggtggcagcatcagacacctccttgacgaccttcacttttagagatgacgccacctgatggtccgcgagcggtccgatgacatcagtcaaaggaagagcctacgctcaatcaagtcataaagtgatttcgaaaggagaatgcaggatgtttatcgaatatacttacgttgatggctttatcacgttccgccgcccccttttcacaaaggggcacagggatgtcactcaccgtggtcgggccactgatcatcacttggccgacgcggcgctccacggttttgccgctcagacctgttaatcgagaaccaaccttcgataagtcaagaggaatgcaaacacaagtatgtcaagataaatgcgagaaagataccccgaggagaaacccgggtcgcgtcctctgacccggaatagttataagctggatgggcccgagcctgaagcggctggatccacctaccaacgaagtctgcaacgacttcatatcccgacaaaccccgtactcggagatcgtcgatgatgtcgataaacgactgaagagagggggtcaaggggggctttgcggtccaagacggaatcttatccggttgatcttcgggaaccacaaagacagggttcgagttcttgatctcaagataaaaccacctattcctccacttgctgcgagaagaaggcactggaagggaatgtaacgcgacttcaggccatcccgaagtcggaacccgacgcaaccagataccctgttggattccatccaacacagttcgtagtaaaagcgaaaaagatcaaggaaaggctctaccccaatgtaggcctcgcaaagatgcacaaagatgctgaggaaggcgatggaattggggttcaaatggagaagagaaagaccatagaaattcaaaaccaggagaagaaattcggaaggtggagggagaaaaccgcagagaacataatcttcgatcacaaccatgcgacccaagatgggctgaggattagtacctcatgcttccctctccatggttccacagccaggaagagtgccatcctcctggagtttcttcaacgttgcactggtggaagccgatttgccgaggtccattgctgatcgaaggtcgccggaaaacgagcctaggttgacgaactagggtttcttgcggcggctgagaaggcaaagagttcttggaggtggtgcgtgtataacaggtttggcggacttcaaaatggactcccaaaattcctttaaataggcgcactaccgacggtgcgaattccagggaacagagagagatgcccaccggaaatttctggtcccgttacgcgcggcggttttttggacttcagtttaaaattcgctcgtgaccgttgggcttcaaatggcgtgctcgactacggtctatctccacggtcctcgcaccgggaatgacaacagtctcgacacccgaagtcgcaaatggttgcacgagttcattttaagcagaagtcggggactactgtcagggttacgggttaggcataccctttacccttcgatatacgttacatatcgatatggcatacccacgcgcatgcggatatttcctgtatatcctaaggaaacttttcacggaatctacagatgggaagaatcctactcgggcagaactgggtcgttggcgtatcgtatagggtctgatacctccgagttctatgaggagacctccacatctgcgatataaaaggggctcccggggagggtttaggatcgaatcttagacccaacacaacctccacagcctacgaagccgaagcttgcaaggagccaagtcatcgagagctagtcgaatcaactcgactacaatctcgccggatccgacaagttcccttgttctctttgtaacctatgttttttaccatataatcccacatcaactggattagggctattacctgtcaaggggcctgaaccagtataattcttgtcttttgtttgcttgatgtcgtactacgtagatccttgtaccaacgtaccccaataccctctatatccggtctacgggtatcacccgtcgacagtattaaccgccaccaactctactactttataggcatgttacttaatttatctcgtcatgtgttttagatggtcttttctttcaatagtctttatttttatcacaaattttagttgtttataaattttattcctaattaaaatattttttttctaatttcagaatttatttttttctaaaaaaattagttaataacgtattgtgttcttttaatgtttttattttttattttgaattttagttgtttcaaagttgtattcctacttgaactctgttttaatttttctatttttggatattattataattttatttgaaattttaattaatctcgtgttgggttcttatatggtttttctttaaatattgcttctttttaattccgaatttcagctaattttaaattgtaatcctacttgaactcttctttattttcttttgctaatttcagatttatttttatttttattctgaattttaattaatctcgtattgggttcttatatggaatcttcttttaatattacttatttttaattccgaatttcagctatttttaaattgtattcctaattggactctcttttccttttctaattttagattttattttatttttatttcaaattttaattaatatcgtattgggttcttatatggaaacttcttccaatattgcttatttttaattctgaatttcagctatttttaaattgtatttctacttggactctcctttccttttctaattttagattttattttatttttatttcgaattttgattaatctcgtattgggttcttatatggaaacttctttcaatattgcttatttttaaatccgaatttcagctatttttagattgtgcttctacttggactcttcttttctttttttttctttttctccgattaatgtgggaatttctagcccccacagcgaatgtggtgactcctttcaaagctgttttaataatataatagatagatagattttttgctgtgaatctggacaactgtttatccagatttatagctaaaaatgcttatattttgggacagatgtagtaattatatatgtattacatattaaataaattgattataaatgatttagaggtatttcctgctatacttgctctaaagataacaactcagataatgatgagctagtggcaagcgcaaaatggaagttaggaggacgaaaatatggttccaaacagaaaagccaaaggctaggatttattctaatagcgctttaagatacgtgcaggccgcaacaccggatcgaccaaaatccgcaacatgatatcggaatccgcctttgcgaagcgcggcggcggtgaggtggtgtgggcacgccaccgtcggcaacgacgaggcgagtagccgaaacggggaggaggaggaggaaacggaggcggagggaggcgcgcaggcgtctgcgccgatcaggtcacggcgccgctctggaccctccggtacgtctcgtctcctctgtcctttgcttttaatctctccgatcagggaaggccaacgcgtccacgctacatactaaccctcgcgtaatcgaaatcagtccaaagaggcgtcaattcctaatccaattcaaacgggtggagaggttaaacctagatcctactccaaattccgcaagccacagccgcacaatccagatgcagtttactgttcagagctggtctctcaaagtctcaacccctttttctgatttttctccatgatccccatcctatccacgccagttcatcgagcagtagcatatttctatctacttctactgtgtcctattaacaatttggcggcagagctgactattcctttatgttcttcatttgggttgcttggagttggagaagagattaccccaccgtttgttccatgctgctgtattttccaaaaatcatgctctcattggcttcccaccatttctgcgcctgatcctctccaaagtgcttccgactgcgagattgaaagagttagttattgcaaaggtaagacatgatgccatcgttgacaactgattgattataatctaggttcttgggggatctcacctgaaccggatgcgcttgatgcacttcttcccaccgggggatgtaaccactgtcgcgtaaaccccgcgctcgatctgctcgatcacaccgttggaatcggtaggagcagtggtggcatctgttccctcggtgcatctggtgctgccgttggaagttcttctgcaattctgatgcgtaaccgagtaattcgccatggaagcaattgaaggttgtgtgcattccctatccacctgcctgctgttgtggtgatctctgttgctcttcgactgttgaaattcgctggtgaatacatttttgtcaggtgggtctggtaattctgcttttagtgattttgcactggcgatgtggctaggcatgattctggagttgtctaatttctcaccagccaaaaggttctttgataaaaaatcatgctgcacaattgggcaccccacacaacttatttagaaaaaaaagccggtaaatctgtcaaatggagataggtcatcggttttatacctgatcgatcaaaaccttaattatgtctttagcagctttgcacttcgcagcctcatccttggcaattaaccaagtctcctcgacttttcgtttgtacagctgaactttcaggctcctttggcggcactgttttgcaagagtagttacctgcttatataaaacataatttccatctttatcactaaattatacgttgcataccagaacaaacattcagtgaaaacaaataatttaaacagatccacgaaacatgtttattacagagaatatggtatgtcagttacctgctcttgaagctgtttcacttcttccaataatatattttccatcaagtctaattccgcttttgaatcattagcagatttgagcaaagagctggcaggtttaggtgccattgtctcattcattacccgtacaatagaaccagagactgtctgtttattcaatgttgaacaataaggaatgctctctctcacacatctgaattgactggggcactctactaggccccatcttaatgtcctcacatgatctggcacagccaaattctgacttctctgatgggggctttgtgctgatgccattttctccataattgcatttgcttccttgaatatgcgcgccaattttggcgtatatgatcttatttctattggacatacctcatccttttggatcttctgttgtggatctaattttctatgctcctcaactttctgcatttgactgaaacatgcatcacaaacacggtaccttttgctcctatctggtgcaagagctgctctggaaaccttgttattgctgcaggaattgcagaacatggaaccacagttgtaacagttgtgcttcttcctcgtaaagccaaatgttagctggcagttgctgcacacagattggtccttgcttgagagtggcctatgtaaacaaattgccatagtgaagttgaaaccacaagctatactatgcacctgcttgtcttccaaggcctcgaccagagtcgggtagctcctgtcaacatagtcacctaaaccaagttgcccttctgttcctttgccccatgtaaacacctttccattcattgtcaaaactgctatatgtgaagagcctgatgatatctctctgacaaactctgtcttaagtggcccctcaattaaacaaatagatgtgtcctcagacagagggttccctaatcgtccgtgttccttgcttccaatggtaaaaacaacaccggttattgtaagcacaatggtttgtgcttttgcacaggatacctgagcaaaatcaaaatcattgagtggctcaacacaagttggtacaagtttcatctttttgtcagcatgacccagcttccctctatccgcatcaccccatgtgaacagcttcccactaggagcattgctcttgacagtgcccattctttctacaatagcagctgtgtgccatggtccacacgcaatggccttggctcgtacccctttcagggactccacttgtttgggccgagcaacggtcagcgtgtcaccatgtccaagaacaccaaaggttccatctccatatgcgaagagctggccagcagaggatatgatagccgtgtgccaatgaccacatgcaatcttcaagattgagatgccatccaaaggaccaaacaatttatgtgggaaccattggcttctttgatactgatcaccccacaaacccaagcagtgagtcccttcaccccattcataaagttctcctgaaattgaaactgcacaggtgtgctttgctccaaatgcaatagccttcactcgtgtagaggcaagagactcgataattttaggatctgatacactgacactcactttgtgccccaatctcccaccattatccacaccccaggagaagacctctccctgcttagtaactatcgctgcgtgtttctctccacaagcaacgctctgcacatcaataatatgtgtcgtgtttaataaccttggaagtgaaacattggcttttgatacatctccatgatctaaaacattgccaggaacttctccccagacaaagatgtccttcagagaagttgctccatatgcaacatgtaacccctcagatgatttttgtttaggcagttgggtaattatttgctcgttaagtttgtcagcaacttttatatccctgcaactgtgttttaccctattaaccacatcgggagtgaccttttccatgtagtagtctaggtctgaccatgtcctctgccttggagagaagaatggttctgagaaatccagattgctttgcaaaacatttttctgcatcagcctaggactgccatatattgagtgtaccttgatggagaaatcatgtagaaaaacatgtcatttcaactaaaaaggtgaaacacactttgtaactgagaacatagggcaacttatgaccaatcgtaggtcgtatcgctctacttagtttcatgatttgcaagaaaaaaaaagaggtgtcgcttatcatttatgcaaaagtctgtcaatgtggttgtcatttagctgtatcattattgttatatttggataagaactaattagttgaaatgaataatatttcaacacaactagcatgaccatcatttgaaatattacatatttacaatttcctgagcctatggatcaaatcgtgttacttagcataacttaggaaaaatcaaaacacacttgtagttgtggtaagttgcaaaattatcacatagaaatcacagcatgcacaagttatagaatgaacctgtttaaactttcttgtgtcatgcacagcaaatagcctactcctttgctgaatatagctaggagggctatttgtacagctgtttatccgacggctacttgttgagtcaatcaaaagtactggactgcatggaactgatagtaaggttgttaggcctatataccaacattcagcttgatccctatctttgcaaatctgcgaaatgtgatttagaaaaatgttacggaaggtaataatgtgaaggataaaatttacaaagtctaaacaacaggcctagtgagtaaaaataccaagtcaagtgaacattcaccattcttgtagaagactgacaatgagtgggattccttttctggccaatgcagacgtaaaagttttgtctgtaaaatactagaatcctcagaaaatgaacgtgttctatccttaatgatgtactatggacaaagaatagcaatgtgcttgagaaatgaaaaccacatactgtcttatgtccaagaactacacttgagacagagctcaagttcaaacgcttttccctgtctttggaataccacatgagcattttctcatcctgcaaaagaagcatgttaatgttatttagaggcacagcatcttgaattctaatgttttaaaaagataagacgttaatgtgcagtttactcaatctacttatctgaactggatacgttccatgggaactgggaagaagtagatattgcagacctaattttagaatatttaatattcaaacatcataccttgttgtgttcatagtgttacaatcttctctacattacggaaattgaattgctaatttcagaataaaggatggatggtgggagtgcagagagctagatttggagtaatctactgacgtagctgtatgtatggccataaatgttaatctcattgtgacatgtcatctgtttatcagcggtgggaaaacaaggaacatctttgaaaggttgcggaggaacatcgtgagatcttgatatgcagatagatgaaggagaagtggataactgggcggaattcatctaagagttctggtcatggctctgctcaacggaacatggtgaagaacttggaagccaaaacaaactaagtagcatcagttaatttacttggcatgagcttcatgcggacttaatttttatttgtttaattcaagtggctgaatagttattatacttcttccatcaaagttccgtgcattaagtaaataagcctgtaatggagtcattcatgttaaatgttcagaacattcagattaacacaactaaataaatatctcataggcactgaacatatgttttgctacatgtctctagtcgtcactaggttgcatgcgtaatccatgaaagttaatgaataaaatcgatctttagcatgctgctaagcataattacagtaacgaagctactcactgaagatagcctgaatgggcataacttgggcttccctctcttcccacatttcaggagatgtgcacccttcttcagagcaacaagcgcctgaaggaaagaaccagaaaattaaatcgcgtaatggaggaagatgtccttttcaggtttgatgtcttctgttataagtgaaccccaaaaggatacagacaagaaaatgaaatgacattatattaagcgcatttggaactttgggcggccacagaagcaaatgtcatgctcactcaacatcttggaaaaaaaatgacgtgcatatagcttactatatcctgaaaatgaaataatggtgtctaatactttctcaataagaatgcagtgtttattggctccttgaagacaaacaagaagagcaaatccatccaacttagcaaagatgcattgttggaattgtaggagagcaaaagaagaatcattggcataagcatgaatataccacaatgctttaaaagaagatgcaaaagaaaaacgcttcatgttgcatacctgctcgactcctctagctgcagggctcctcccctcaaagctcccagccattgcagccaggaaagacgcagcaaaagaaacggagagcgatgccttgcccctgagctgagctcaagttcaaacctcctttgatcaacagtgggagaaagcaaaagatggcagcaaagtgacagaaagaaagaaccacgcaaggaaagaagcaaagcaagagagaggacggacggacgggggcagagcttgaggacggacggaggagggagaagaagcagcaccgtcactgaaggcgacctgcgcaattcaggggccccggaaaaggaaacggtggcaattttattaactgctgggtttaaagatgagagaggcaggcagtcagtcttcgttcgacacaacctgcagaggtaaatcctgttctcccttttgattctgcgcccctcgctttccgtatattttctcttgggtagtgctagtgcggcatctctctgtagtttgtgacttcgagtgtaccgaacagcagtggcatttagctttcctctgttagcgtgagtaggcgcttcagaaatcttggatttcatgtcaaatctcaggatttgccacaactgcatgccacaagccccggaaaacctggtcactgccttccttttccctagcatctcttcatcagtcggtacattaaactacctcagttttgctgaaaatcttgcataattggatcatccgatctctgattaccatgatcagcatttctcaaagaatgcatcgaataacagaattactccactaccgtaacaaccttacattgtttaaaattcacgggcatccgatctgtctagggtggccagttaaccatccttggctccttgcccagctgtggtccagaaacgtggtactagtatcgtgatcatgagtttggacgttttagatagtaatgaggttggatttgcagaggcaagcatccacgcactgctgttaggattttgggacagcacatgatggtccgaaagaagagacgatggaggggggtagtgatgcagcacgtgtgcagcgtaggcaggcgctgcccccgttctggcctgcacaactgtttggtcactcctgtctgcaaatgatgccgtctcggtcgcttttgctgacttgatcttgctggggtacgttttttctctccctttttctccaacgagcagcgatcgtgacgtcttcgtagctcataatttcgtattctacctttcgtctccccagtactgtatgtatcagtatcactgcctacaaatgtactatgtctaccggtgctacgtgcatttatgcgctcacctttgctcacgacatgtctattcattgcgcatttatcctattgcagtcgtactgtgatcagttgtactgctggtgctgctttggtcgtgtgcatccccaaggattttctgcggtgtccactgatcaggtaggagttgaattcgtcaccttgttctcgcaaaggttagtgttagtgtttttgcaagggtagattgcttattaacaccagtggtcatggagccatggagatgcttaaggtgacgatgttgttacagctggaagtgaaaagatggatggtggggaagaaaaggtagagaaggcaagtaggcatgtgaaagcaccaacgagacaagcatgacgggccaagggaaaagataaaacttgtcctgcctcctcaacagcagtaaatgtgttgatttgttccccttgcatttcccgtgtagcgtcatggcattggcagtaactcgtggacgatttctctagcgattgttacccgctgttcatgctcaaaatggcaccataatcttatacacagccctactcttgttctgcagctatttgcacttgttctgcacctacggtctcaaaaaaggcatatttgtatgcctcctacacgggtaaaaacaggtgcagcaaatagtaccagtaagtccaaattaacccttttattactgtggatgagacaaaatgtaggagctagctgtctgctggcatgtggagtgactggaaggcatggcatgtgaaacttgtgaagccatacagtacgaagtaggtgaaaaacatacacatcccctcactgggtataaagtttgatttggcctaaattgaggccggtggttgcgctactcgtaggcacgtactacatacatcgggcacggtcccgaataattgcgtcaaatcggtcgctggtgattggcacaatggcacgtactaggagtacgtcttgctgagttcctgtcatgtgacagggttctgtgcaactcggtgttgttgtgatgccattagatggagaatttaggacgtaatgcctacgtgcattgcaccatttactttctgtaagtgcatgcacctcggcggaacctttatgagaggttctctctttggaacatgcaagagtgaattagtggacaataatgccaacattggttaatttagttagtccatgtagctcggacacatgccgcatccatggctgatggctccaccgctccatgtatcaaattggcttttcgtgcatgcgatgagttgctagtctcctcaactctctcgctcttagaaggattatattgcaattgtacgtttgtatccattggatgcatacacgcgcaggtgaaactttttttttttgaaattttgagcagatgaaagtgaagaacagcatgcaatgcaggggctgatccgtgatctttgtacggagttgtcaaaatgcgcctcaaagctgtccttggattatacacagatacacttactagctgtgtccacgcataaatacatacgatggcctacgcggctgtccatgtcctaccatcttaggttcacaatattgatctgttagccatgtaggagtaagactctgtttggtttccaggacttattccaagtctctgtcacatcggatgtttggatactaatttagagtattaaacatatactaattacaaaatccattccataagcttggactaattcgcgagacgaatcttttaagtctaattacgccatgattttgacaatgtgatgctacagtaaacttttgataattatggattaattaggcttaaaaaatcgtctcgcggattagctctcatttatgaaattagtttttttattagtctatgtttaatactctaaattagcgttcaaacatccgatgtgacatgggctaaaaagttttagtcccatctaaacacttcccgaggagtagggacctctcccagctcatgacatgcgtccttgcttggagtgtgtcctagcggtaataattctatgtcaaaagaagcaccgctggagtgatcagagaactgcacgctctcgctctttgaagcactgcatgcgtgatgcgtatgcgttcgtgttgggtcccttctaatgagtagtgatccatggtctaccggcaaagcctagtactaactcgcaccagcataatcttgatggtcttttattagataacaagctactaggatacatctttgatctctgcatcatcagtaattcatataaccataatctcgatctgtgcctagcatcatctttgattctttacatagaatccacattttaacgaatggcattcgagttattaaggcctacaagttcagatgggttgcatgctgggtttacaaaaccgcacgattatcatgcggttactatgcatggtaacattttcagtttttaaaaccatgatatgtctcgcggttaccacacagttttcacggtaaccgcgcagttaccacggtacgtaaccaccttaccatgggggtgtgataaccgcgccaataacaataagggaaaccctggttgcatgcagagtacagtagtttgagcagcagcatgcatgggaaaggaggcaaacaatgaggtggaaaaggagggacacggatgatggccgcggtttcccgggcacgggcacggccacgcgtgccggacggggcgtgaacagaagccgcgcccgtggtgccgggaaggaacagcaacagcctggcccggcatcgcccgtaaatggagagtttgggtacttgggtgggtcaccggcggctggaccctcgcatgtgcatgtggtgaagaaaatggagtttgtttgtgtggtctctgtacttgcttgtatggttcgtgcgtgtacatgccgagcaccctggttgctcggtgaaagctttaattggatcacgcgataattctcactttacggattgatttgtatataactactccatccgatttcttaattcttgattgatatttatcatgttttagacctgggttaggaggagaggagaaaaggcatcgggtgcatgagaaggaggcggagttctgattgccgtgaaaaaaaagacatacgtattagggaatgacctaatatcaaataattagaaggagtgaggctttaaactcagatcgtatagcccaccaccttgtgaagctagccggaaaacccctgggcgtttctcatttagatcaccaggataccagccaccttcatccacctagcagaaatgaatgcctggtacgagttagggaatccgctgttgtcttcttcctgatgcttcgccttctcaattgaccttctctatgtatgttttggcacgcgctggtgatggtgcatgtgggtagtgggcggcggtggtatcgggagaggaagactgcgacacctgatcttgaacaagctgtcgcctatcactgttcatggcactggcatgcatatcctccaatcctcgacccgtggaaaggtggtgcacgaccagtgtggcacacaggctgtgcacatccaactgtcgtcccacccaatagaccctgacgtcagtctccgtggctccctttgcaccgagctcctgccgtcagtcgttttcattgtcccaccgctaggtcttgcatcaacttaccgctccatccccatggcgcaagaagacctccttatggcccctggtcacctacaccaccatcgcttgtgctattcctcggctcgttatcgaggaggagcgacggcggtgcgcacctcgtgcgagaagcacactactaggaaaaccattttcgcaaaacgagacccttccatttttctaggcgggtatcattttcggaactaaatgtcctcctgtgaaaacggcaacgggggatgggatgctcgtccgcctgtgaagatgcattttggtagacagacgaaaatgcatcttcgcaggcttttgcttacaggtggaccggacggccggtccacttaggaaaaccgttttcatccgctggaaaaaatagttttcctagtagtggcagatacaaggatgggatcccgtacttttgcatttcctataggctaacacctttatcatctctaatcctagcttatagcaacacaattagtagatatgggatggatagctaggtagagagtctccacacaaacaaattttggttgcttgtgggggtgttcccgaggcttagagggataaccgaagtagtggcgaccggcggtggtgatggtgaggccagtgacaactttgtagattgggagagggcaggggatgagtttggtggcaggagaaaagggcgccaaccagttagggctggacgtggtagatgatggcaacgctcgttgctggaggctcggagcgatgattaaccttcttaatcacttcggtcattaatcatccaatatatgtcagatggcgactacaatgcagtgtaacgtaggaagactaattcattaacaaatattgtgtgttcatgtatcaccttatctgacgtgtcttgagtgatcaatgactaaagcgattgacaaggttagtcgtcattcgctatatcagctgtggtgcgggggaaaatctggttgcccaaacaaagctcgtcagagggaggctgtggttggcatccgaaggtccaagaggaattttgattgaaaaaaaaaaaaagagaagtgcacaggtccgagtgaagtccgagtcagacacctcacagtagggcagacgaacgtgggctgttttagacgcatttgtgcgtgtggcccggacacgcgaacattcgtgcattagcccccaacccgtgcatcctgcctgcctgcctgtgcacgttctcactaaagccatgggaccggcaagcgtcgcatcctctttaggccagtcacaatgggggtttcactggtgtgtcatgcacatttaataggggtaagactgaataaaaaatgattatttgcatgaaatggggatgagagagaaggaaagagtttcatcctggtgaaactcgtcagcgtcgtttccaagtcctcggtaacagagtgaaacccccgttgaggccgattcgtttcattcaccggatctcttgcgtccgcctccgccgtgcgacctctgcattctcccgcgccgcgccggattttgggtacaaatgatcccagcaacttgtatcaattaaatgctttgcttagtcttggaaacgtcaaagtgaaacccctccactgtggggattgtttcataaaagatttcatttgagagaagatggtataatattttgggtagccgtgcaatgacactagccattgtgactggccttatatagttgtacacactggtacagtggtacgtgcctacactgcctgtgctacgtactggctgccgggggtcggtgcaaccgtgggcggcgcgccaacctgtttcgaaaaagtcaccactagctcgaagcagagggaatcgatcagggtgttttttttttttgaaccatcagggtgtatcacttgcacatactccatcgtttcttcttatattaaaaaatttaccctggctatgaatataaacaaattagttttttctgataatactccactcagaattattcatccagaaactcaagcacgaaaaagacaacatacataccggacattagctctttctaaaacatatataataaacttgccaaataaaaatcaatagtttgactatgtcgagtatgagtacagattaccccctctgtctaaaaaaaataaatcaaactctaaattaggtatgattacatattacccctccgtctaaaaaaatcggtttgatttattttttttagccggagggggtaatctgtactcatacctcgacatagtcaaacttagggtttgatttttttttgacaggcagtagatgataaaacgaagaggaaagggaaggcagaagcagagcatagaggactccaggttcactgtggcactgtgccatactgtacaactgttatgcatggatcatatagttgaagttcagaacaacacgtcaagcaagtactgtaaaggcgttcacagtgcaacaccaaattttggtgagcctcacgtgtcacctagactaagaacaatattagctacttgttttcacagtgcaagttgtctatagtgggtcctactagtactaactttatcactttaccaccttttcctctccccctctctctcctcttctcctttccccacagcaagaattttttttatttataattttttttattaaaagttttacaaaaataattttccattttgaaaattgacggaaatagtcgcctaccgccctctgggagggcgatttttaaaaatcgccctcccagagggcggcgaaaatgacgtggcagacggccgttcgctctcgggcgacggccgtcaacgaaatttgcaggcggcccccttgccgccctccgcgagggcgattttgtactgtgcgggggcccgcctgcaaatgggcggcgagggggcatggaattttgcaggcggcccccttgccgccctgggggagggcgattttgtactgtgctctatatttttttatataaatatcaatagttatcaaatctttttatattgaaaactatacaagattaaaatctccaagattggtaaaatacaattttattattttttaggccatatttggaatgttaccgtacaaatattttgttaatgccaaaatataagcaagttttggcactaccaaatatttggtaaggtaaaattgcatttgatcatatttggtttgctgccaaaatgtaaaattgtagtgaagaatgttgtacataatctcaattctagattacgtattaccaattaataggcttccattttcgtgtgtggtgtggtagtgggaaagaagatatgaagaggttgccttcagattgtcaattatatagcgtcgttttcactgcaatatatgtgaactcaatgagatacattattcattagatgtgacaagacgatcacgcgtgggcgtgattcactttatgtcaacaggcagcgccgaaagttgatagtgataactcgagctgccgcttttcatgtgtgctgttgtggactgtgcgcgctactggatatggcactaccgtgaagcgccgaaagtgtgttgttgtgagcataagttgttcaagcaccatacgaatgaaaagaactacgtagacgagacaaacacaagtagtactgcagtagtaatagcaaaagtaagtactgctttacaagtttgtaagccaaaagaaacggtcacataaggactgaagaggtagaacactactgacgaggcctcttacccctgtccctcctaccctgcgccctaatgtgcccctgggagtacgtgagtcggtccgggggtacggcacggccaacccgtcctgcctgtacaggtgtgacctctggctgctcctgagtgtgcgcctctggagctcctccaagctgagaggagcctagtacgtcctggtggtctgcaccgtgcaagtcgtcgtcgtagaactggctagtaggaccagtcctaccggcgtgagacgaagaggccccagtaccgaagatcccggctgcaaatcctgctggacaaggaccatcagtttcgtataggtatttaacagtattaataaaaagtaaagtaccgtgtgggcgagggatcgacgctccgtgagaggaagagctgacgaacgcgcctgaagaggtggcgaacgcccctgcggagctcgcggaagcgccggtcgtgcctgcgaacgcgctcgaaggcatacgaggtcctgcgatgaggaaacgtgcagttaaaacatggtgacacattcgtgcaaaagctgaaacaaaaatgaactaatatctgggctgaactgtaccgtgcgaaaccggtgctgtaggtcgcactgctccgaagctaggggcgctcgaagacaaacgaggtcctgctccgacggtaggaccgcgaggccgtgggtgtaccggaccagctggaggtacgacgtccacggcgctgcgacaggagaagacgcgcatgaccgcacgcatcttctcctgcatccggtcgaaggtcgacctctgctcaacgtcagtcaagtgcaaacctctgttcaacctcacctggactgcggtgatatcggcactgatatcccgtgccgcatcagcctatgcaagatggaaataaaaaattcagtagttgtcctatattatgcaagataaatgacataattgttggaagtaatacaaattggacgtaccgccacgaagtagtctcggtcacggtgcgtgggatacgcgtccgtgacagcggcaacgtgcggctctggggcgtctggagtgaaggtcacacgcgcacgagtgcgaggaaggtaccagcgaaggtagtcacggtagttctcctccgtgtgtgggaagagctcgttgatcacctcctctgtagctaacacccagtcgtcaacgtactgctgtacacgtggagcccaaagtgcgcctgctagctgtccccgtcgagtcaacctgtgaagagaggtaaattgtatggctcgatgatgtaattatcataaaaatttagaaatgaacaatccgaactcacgagtggtcggcaggggggacggtcggctgcacgttgccgggaaacacctgcctaagtccgaactgtctcatcacacgctgcggccagtgaggctcaacgaaaatgtcgaacaccatcggcaggatggtgagccagtaagcctggtcgcgtgtgcacaaggacgaaagtcctagcggtgctctcgcagcgacggcctcttctgtgtacggctcccagatgacgtcgctcggctggagacggtcaaactcgaacacgaagtccgggtaaccacgtctcacctggacgtgagcgtaacgacgctgcaataaacatgatcggaattagacacgaagttgcactaaccccacgtcgacaccagtaagtccccatcgtgggaccgtcctctggccactgcgcgctgcgaccaaccccgtagggtgcgctgtccaccactggtcgccctatggcaaacctctcggctgcccaaagctgaagcaacataggacagccagcgatgatcgctcccgcgtcagtcttcgtgcacgcctcacagagggcacggtacgtggctgctagcacggcagaaccccagctccactgcggcacgtcctgtggctgagcatccgcgatggaccgtgcgtagtggaccagccggaagtccacagcgtgcccgtgggtgctagtgaacatcacccacccgaacaaccacaacaggtacgcctcaagggagcgtcggaccgagtaatcatcagcgtcagggtgcagaaggtccgcctacagttaagaatgaaatgttagtacaaaacactgatccggtcgcaaataagcacgtatgataataacaacttatttacttacagtgaactggagcaaccaagccttgctaggcccgactgtagagtacggaggaagggtggtggtcggtcctaggtgtggaaggcgcatcacctgctcgaagcgcgcagtgatatcctccttccacccaaaaacacc

SEQ ID NO: 7955 - DNA, 2435 bp, Oryza sativa
ccccggggtagatgggccgagagggattcggcccatcgaccccggggaggcaaaatagacttttgcggaggaatttgatttggaaggatttggattcgggattgaactcgacgatagatcggggatttgagatccgagatggcacggacactagacaacaagcaaggaaacaaatttcgcaaatagggtttttaagagatagttttcccgctaggcgccacgacggaacgggcgctacacctacctagcttgttgcatttgatccttcctctgttaattgttataccatgttcccttgtaaccacccagttgcgcctcggaaatcgtgcactctgcacgagtatcaacggtcgtcttcaaacttaaaatctgaaaaacatcttgggtaaaacatgggttttacaaaagacttggaaaacccgacacctgggtcggtgcttgcgaactaaatgaattttccaaaaccgcggaccagggaacgtaccgggtgtacggtttcccgctcttgcacttaaggaccgtttccttggaatttcatccgaacataagacaagtacgaccacatgggtggaatgggacacccctggctgagtaactagcttatcagggaagccttgatgccgagagacatgtggattcgccggggtggtgtcggggaggacccttgggcttcctggcacagtatggtctgggacctaacctgttgttggtctgggacccctctcgttggcatatggtaaacctgtgtcggctttggaaatgccttgtcatgaaagcttggaggtctcccgacgtggctgattcccacgggctgggtgatccgggttagtaatgtcgtgtgggtaaagtgtaccccctctgcagaggttattaaactgttcgaacagccgtgcccacagtcatgggcggatgtgaggtgattcctagcgtagttttgtttgactactgcttgtgaaattgctgttgtggaaaggggttcgatgtttgaaaaatctgcagctgacgggatcagctaggcccgggtggccgtttgaaagttgttggcccgggtggccgtttgagagttgttggccgggtgccaatcttgatcaattctaaagactgatacattgcacaaactccgactggacgagacgcactgtctcatccgtgtcgtttgagaagcactcacttagttgttttcagaaaggagttcaaataaaatcaattgtaaaaacaacagcctttctttgaagcctgcattaaacacttatttcccatggcttgctgagtactcccgtactcacccttgctctatataaataatcccccccagttgctgaagaagttgaagcggaacctgctgatgaggagttcttccaggagcaagccggctacgatgagttttagggtttcggcctagttcccaagtcgcgcctgtattggttggtccaagtcctggcttccgtttcccttttgtaatgcagttgtgagctcgggatctgtccgcagtccaacatgactgtacctctactctataataaagagacctctgttgctgtgatattccgtctccctgtgataccagcactgtttccagggactggtatcgattaacaggttaatttagagcgtcacgggctagttccggtcgggactagttcggggcgtgacagtaggtccgccaatctgccttgcagacgggacaaagagattaagtgcgatcctatcaatgcataatatttttcaagcaacataattaaattcaaatataggctcaaggtgttcaaaggtggcttgccttgcttgagatcttgagcttgatcctcgaaatcctcgcactgcgggtcttcgggctccgaaactacacgcaaaacgggacaactcaacaaacggagaaaataaagccctattaatgacctctaagcgtgccattagatagatctcgagatttgaggaattttggaagttgatcggagtcaaacggatttacggttgggaagatattgaatttctaagattattggatttttggtctaaaggaaaaaggatttatttaaatcctttttgaaaaagaaaagaaaagaaaagaaggagggggaaaattagacttccctcgggcggcgagggcgcggcccgagagaaaagaggcggctcggccgagctaaatgggccggccggcccaaaaggcggcccaaagcgcgcgcgcgggcggggaggggagagagagccggtgggccgggtccatcccgcgtggtcccgggtgggacccgcttgtcggcgactcggctcaccgtgcggagcgagcacgcggcgcgcgctagggttcggggagggagacgcggtgcacgcgcgcggttcgcggaggatgcggtgcggcgggcccccgcgcagcctcacggctcaccgcggaccatgcgcacggggggggggggggggggaaacggagggagcgg

SEQ ID NO: 7956 - DNA, 7464 bp, Oryza sativa
  unsure (1)..(7464): unsure at all n locations
gcacttcaatagtcgccagggcaaccggccggtggggcaggcgggaatccggcggccggcgacaggtgatgaggcggcggcggcgcagcacggcctcccgcgcccgccctccctcgccgccggggaggagctgggcancggcggcggccctatccctgcccggagccgccgccgccgccgaggccgagcggcgcagagtcgtctatggcagtggctcccagcggctgtgggcgcgggggtatgcggcgaaggaggtggtattcggcgtcggagcccgggcctcccttctcaagcgttgcagccgccgccacctcccttctctcgtgtcgtcgccgtcgtccatccatgcatctcccacccccactatctctcgccctctcataaccctctcctaacccgagccgccgtcgccgcagccgcacgtcgtctcctccgctcgcgagctcctcttccagccggcgagagatcggagcacgtgggggcgcggccatgatgttggagacgaacaacctgctgctgtccctcgtcaggagatcttcaccgcctgcgccgtcacaccgccactgacttcctccggcgagcccaccggaggcagctcaccgtgttcctccgtcggcaacggtggtggcggcgtggggggaggccctcctgctcccatatcgttgccgccgccatctcgtcgcccgtcgctggccgccggagtcccacctcccgcctcccccactggcctcctcttcatccgatggttgccttgcccgatgagagaaaagaagaggagagaaaaaagaaaaagagggtaggggaataagaggtntgcatgtgggacacatgtgggtcccacgttgagtcagctgccacgtcggacaaaaccggagtcaaaaccgccgagggacttagtttgcactggttttgtaggttaggggacgcgttgtatccggttttatggtttaaggacgattttgtaattcgatgacaagttgagggaccttcggtgtactttttccttgttggggagagatgtgtctaagacgggaggaagaaatctactggaccgggccaaattgacagatactcaatggaatattggttgtctgtatacattcgaaaaacttacctccctcgacaatggaccgaatctaattctactgtaaaaacaggtatatattgtctccttcaactatcaaaatcagctcactttatctttacgagtggtttttatttgacgtagcacttgacttggtcttctaacatggtgctctaacatggtgcttaattagcaattcaaccggaaaaaacccatagggtccagtggtccacatatcgataatattgttgccatctcacacctctatttgctctcttccctctcaatagtggagggatctacagtggtaggcctccttggatcgtgatagtagcaacactagcatgaactcgaggaagagtagggggttatttgtggagtgcagagcaggccacacttcgtcgggtggagcaagcagcaagcgacgagcgatgagacggcgtggaggttggcccctatctcggcttccttctcaactccaaccattagaccctaccaccaagatagccttcatagctccatagatggagggtattcgagaacaatgaaggagaagacgttagcgatggtttcgggcttgcctagcgcgaggatgatgcggcaaagtagggcttcgtgggtttaccagctgtcaccaatgacttgtgctgttgccggcactagcacgttggtgagaaaaacagactcccgtcgaggtggtcgagcctgagctccaacacatccccaagccttgttgtctgcatggagccatcacaatcaccgtctcctacgacctcgggtcttttaaggagaaagggataagatggcaataatgtttttttttactgatatacgagtctcttttaattttgtcatggctaaattacttggcagatgaatcgaatcaatgtggcacgtcaaacaaaactatggactatgatttgacgtaagcatcatgtagcacataacatcttcaaaatcacttgtggtaaaatgagatgattttggtagctgaaaggctatatacatagttttgtcagcccatagttaagggaggtaaaatggacttttcttcatatccgttttattgctgcggcagtgcgggattacggaatggggtttgatgggagttgcgtcataatcatgaacttatcaatggcttaaaccgatttaaaattgtcgtaaaacatgggagcaccgagcacatccttctctcctgctttccatgatatttgaccgccacaaacaaattacaggcgatctaaaccgtccgttcaacctccaatacggatggcccgacgcgaccgacgccccacggcccacggcaccttctcgaccctgacgcgtggaccctctaggctactactactcatcaccgcgggccccgcgaaccagccccacacgacggacgccaccacgctcgcggtggactcggtccaccaagaccgcaggcacaggcgccggcggcgcacacaacaccggaccggagcaccggaggcgggatcaaggtgaaaggccacttgtttgtgtggactgtggactgtggtctgtacctccacggctccacctcactcgtcgcagctcgagagttcgcccaagtctccccccgatccgtgcagagatcctcgtgcgtccgaggtaagcacacccccccccacccccaactcccagttcctaagccctcgtagattcgccattccaactcagttttcgcgcacgaaatgttcgtcttctttcttcgtcctaggtgagctttattgcagattcgccggttcagtttcgtttgcggctagaaatgttcgtgttctggggcagtaggatgggtgtcgggtgcttgatccgtggttcatgaggagggttttggagtgtgagaagatccgagacaccgcactgaattactgatcccattctgtgcgtgtgagcgagggagagggagggagggagactgggagaggaggggttagttttaatgtagccgttgaatgattgtgcctgatttgttaggtgagcatggaggtgatgcatgataccactgggaagaaggaagtggttgtctgttatatgaacgcccctctaccgtacatgattgaagagaattacgggggatgcttctttgaagacgacgttgatcttgcacaggttctccaggaccaggttgggtgcgaccgcctgctaccttcttgtttgattgttcctatgctactgatttgtttcttgttttgttcctgttctccttgttgcatagaaatcttaacatcatgtgttccaccccatggaaaattgtgtgtttggacaacacaatgtacaatgttatggaaatgcagccaaacacttcatggattaggttgttaatttgtcttttgttttgttgtagtattattgaaagtagacctgaaaggtgaaacatctttggctctcgtggtgccataataatgtgtaaagaatagcctcttgatgacatttacattgtaaaacttctagctcatccctcattgttacatggtgctaattaccattatcacaaaatattttgtacagtactagttatttgtcgaaggtttttcagtaggattgtgatgtttctcttttatagtacaactgcacaagtcaacagtgcatgatacatatgaaaaatatgatcctcatttgcttgatatgcttgcaccttgttcaggaaatagtctatcaattaatacaaggaaattatggtactggttcatccaaaactcattcaaatcctagttctagttatagccatggatgtgaattgggtgaacggaaaccatcaggagttgcaagttatgaagcgcaactagttgttgatgaagctttagctcgagagctgcaacagatggaggaccaactagcaagtgcatcaattgatgaccataacataatagaacatggttagttgtttactggtactcttctatatagtacaggacaactggtgagtgtctttcctctcgtaaatgctaatacgtggttcaaaaatatctgttcaggaagaaagccaatagcttcttcaacatctagcggtggtaatgcttctgcaagcagacctcctcaggtagtgatggaggatggcattgatccagataacatgacttacgaggtgaattccttcaaaccattgttttgccagtattttctctactgtttcgtaaggggacgtgccattgtcaactggtcttctactccatgaactttcatttcaaagtacctgtatagtctatggtaactactgttgtgtcatagaaaattcaagtatacaaaaattggacgtctccattttacacacattgctctaaccatgtttactatataaaaattgtaaagttgttctttaacagcttattgcttttaacaaatgcaaataaatgggataattgaagctattttcttttattttgttgaattttgtttgtatttcaggaactgcaacaattaggggaagctataggtactgaaagcaaagggttgccggaagatgtgatagcgctcttgcctacttcaacatacaaaattaggatattctcaagaaaggaaaagcatgacgagtatgtccctgtcctgattagatatttcagtgaaaatgtgatgtgcagttatcaacaggttattaataaacattttctatgcaacactctcatttacttattattattgtagaaggatatttggttagtacttttctgatcttaagttgcatccttcatcattgtgctagcaaaggaagctcctagagtactcgttatctatggctgcatgttcatgttgagttatattgcttgagtatgaaagtatttttaatacccacttctttgaatgtttacaaaaacagatgtgtgatatgctgtatgacttacaagaaccgagataggctgactaaattgccctgtgagcatcagtaccatcaaacttgtgtcaccaaatggttgaagatcaacaaggtaggccaaccatgcttttcaatctttccaatgtttagtagtgataagtgtatatgtgtatttattgtagttaccgtgaatatgaccttgattactttgctcaccgtaaaattgttctgcttttcgaaattccatcttattacctggtcaggctagatttaggctgagttcaaatctacgggtttgtcacccgtcctccctagcatgcaaaatggagcggcggattagtgcatgatcaattaagtattagccaaaaaaacttgaaaaatggattatgaattttaagcaactttcctatagttcttttttttttgcaaagaacacactgttaagtagttcgggaagcatgcgcgtggaaaatgagggagtatagaagttgcaagaagggagtatagaacacacccttagatagaatgacaatagtaatgtactgacaagaagacttaaataggtaatgagatgggtaagttatgaggaaagctacccaagaaaagagcttgtaatctcgtgtgttcatagatttacaaaatttttgagaccatgtttgcatccagaatgtattgatactgatcagccttgtgacacatttgtcaggtatgccctgtttgcaacaaggaggtttatgggtcgggcaagtgaaacattacggattcatctttcatgaaaaaggaggcaaacatgacggattcatctcacgccagttcaacaggcttaagaagtatcattgttcactggctgtgcactcattagcatgcatcatggtggcaggaaaggcaatgcattgtattgctaatgatcggaagattgtcagcgagttaccgaggaatgtctcagcaagataaataagatagatgcttctgttctgtttttaagctttatggagtcttcgagtaactgagactcttatttcagctttcaggcctggtgctttacacacactgtattgtaacatatcataggatgtatatcagtatgtgtatactgaagattagttgcatgctagcatctctgtattgcttgtactcttatcttttatggtatcaaatttggctgctggagtcagacttgtatggtcttcttgatgaatggtcaatggtcaattccctgacttctgagccaaccagctggaactatggactgctatcgtctagccagagagtgtttggtcttgtttccaagtggccaatctatgcttggataattctttataatggaacattggactattctacatccattaacgaaatataaccttctaaacaggactaaatgatgttggcataaaggctttgtacaagggaagcagcttatgaagagacaaatttgtgggagcttctgaaatgagcatgaaaatgacaaattcgacgggaacaaggacacaaaatggcaaaagtcgccatgaaactgcatgcgtggtgctcgtcagagcggaaattcgacgcacacaacggcacaaacgcgataggatatcgttaaaccccaaaacttgaccatcacaggtggcgcgtcgaagtactcgtttgaccagacaactacacaagttcatctggattagctttgtttattaaagtgtaaatttcacttcgggccatcttttattaccgatgtttcgttttgtaccaccctttaagcaatattttcattttggactgggtaaacctgcctttgtttcactttggaccacccgactctcttctcaagcatataaacgatctcgattacatcgtcccctactcgtcaatgaactgccacagctatatgtaagactatttcttcgacatattataagttggatgtagatggataaaaaagtaagggtggtccaaagtgaaataaaggtaaaaatacccagttcaaagtgaaaacattagtcctaagatggtacaaagtgaaacatcgataataaaaggtggccaaagtaaaattaactctttattaaaccaatcctgacgctgctctgcccgaactgtcacgcccactgctggtttcagataggaatcctatcctgacgacgaagcttgtcattttccagacatcccctcgaatcatagcatataagcacatcataatcaattcatcaaactcgacagggatttgtagttgtttagaagggatttgagaggattttattagggtctgaaaagcaattgtttcggaatgagaagtacttaaccgacgaagtgagcagtactagtggactactaggcgtagtgtctacgaagtggataggtttgcaatgggctgggccccaagctaggttgctgactcggatccacgcccatgggccccgatggaaaatgtttcatattgctaggcccaaatcgcacgggggcccaaaggttagcgcagcctggtcccggctgattagacaccggcacatgggccccaagtagttaatcattgatgtgagattttctggttgttaagaggaaaatccggagagaagag

SEQ ID NO: 7957 - DNA, 5350 bp, Oryza sativa
tctcgttctctctctctccctcttctccgctctgtccgggtgccgcgccgcgtgcgcgtgagccgcgccgagccgagccctccctctccgctccctcgctgccgcttcccgcgcgccgttgttcgcgtgcgcgcgcccgcgtggacatcgcccgtgccgcgcctgcgccgtctgcgccgcccggccccgctgccctgccgcgcagctgctcggccccgcaagccagcacgcgtgcccaagccgtgccgctcaaatcgccgcgccgcccgttgcttcccgcgcgcgcgtgccgtggtggccgaccgcctggtcgccgccgccgtcagcctctgccgcgcctgccgcccgtgtcgtcgccccgctccaaaccaccccgccgtcatcgccgtcgtcatcgcccggcccccgccactccgcgcgcaagctgccaagggacggaggcagagctccttctccctctgccgcgtcgcccccgctccctcctccttttcccgaagaggcaagggggcaagcccccttttctctccctcttttcccctttttcctcctgccggcgtcatcctcctccctcctccctgtcgccgctttggccacgaccgccgagcgctagccctctcctttgaccgccctaagtcggttcccaaaccgacattgccatcctataaacccaagcttccccctttcctttcctctcccattcgcctccacgccattgccgccgcctcccgtgctctgttcgccgtcgccgttcgtcgttgcgcttgtcggaggagccggcacgagcaaggacgcggaaggggactccgagcgcgccctctccttcctcttccccggcccgaggccggagagattactcccgcgccgtcggcctctcgtcactgcgcccgcccgcacggtagagcatctccccgttctccctcctcgctccatctcctccccttagactcgggtagtagcacgagtagcctccccgtagctagccggcgccgccccgaccgttgccgccgctcgccgtgtgctcgccgccgtcgccgcccgagctcggaagcgccgctcgtcgccggcctcgctcggcgcagctccgcccaatccaacgctagcatcggattcccgtagccgcgtagatgctctcgccgccgggaatcggcccctcgtgacctcgtcgccgtttcccccttctcccgccgccggttgccgccgccgcaattcgccgccgtcgggcatcctccggcgaatccgagccgttggctcgtctccccttgtcctgtgcaaccacccggtgtgctcgctttcgcctgtatcgccgtggttcgctccaccgctcgccgctgtcgtccgccgtccgttccggccggcgtcgtcgtctacctcccgccggcccgcgtggcagccacgtaggcgccacgtcggcgtcagctcggccaaaaccgggtcgagtcgaccccggttagccgctccctccccgtgcgcgcggtccaccgcgagccatgaggctgcgcgtgggcccgccgcatccgcgtcctccgcgaaccgcgcgcatgcaccgcgtctctcccccatcctagcaccgcgccgcgtgctccctccgcacggtgagccgagccgctgacaagcgggtcccactcgggaccatgcgaggtgagcccggtccaccggctctctctctcctcccctcccgcgcgcgcgtgccttgggccgccttgggccggccggcccatttagctcggccgagccgccccttttctctcgggccgcgccctagccgcccgagggaagtctaattcccctccctcttttcttttcttttcttttctttttcaaaaaggatttaatcaaatccttttcctgtagaccaaaaatccaataatcttacaaaatcaatatcttcccaaccggcaatccgttagactccgttcaactaccaaaattactcaaatctcgagatctatctaatggcacgcttaggggtcattaatagggctttattttcgccgtttgttgagttgtcccgtttcgcgtgtagcttcggagcccgaagacccgcagtgcgaggatttcgaggatcaagctccagatctcgagcaaggcaagccacctttgaacatcttgagcctatattgaaatttaattatgttgcttgaaaaatattatgcattgataggatcgcacttaatctgttgtcccgtctgcaaggcagattggcggacctacctaatttgttgcatttgatccttcatttgataattgttatatcatgtccccttgtaaccatctagttgcgtctcgatattcgtgcaccctgtgcgagtatcgacggacgccttcaaacttaaaatctgaaaaacttcttgggtaaaacatgggttttacaaaagtcttggaaaacccgacacctgggtcggtgcttgtgaactaaatgaatttccaaaaccgtggaccggggaacgtaccgggtgtacggtttcccgctctcgcacttaaggaccgtttccttggaatttcatccgaacataagacaagtacgaccacatgggtggaatgggacacccctggctgagtaactagcttatcagggaagccttgatgccgagagacatgtggattcgccggggtggtgtcggggaggacccttgggcttcctggcacagtatggtctgggacctaacctgttgttggtctgggacccctctcgttggcatatggtaaacctgtgtcggctttggaaatgccttgtcatgaaagcttggaggtctcccgacgtggctgattcccacgggctgggtgatccgggttagtaatgtcgtgtgggtaaagtgtaccccctctgcagaggttattaaactgttcgaacagccgtgcccacagtcatgggcggatgtgaggtgattcctagcgtagttttgtttgactactgcttgtgaaattgctgttgtggaaaggggttcgatgtttgaaaaatctgcagctgacgggatcagctaggcccgggtggccgtttgaaagttgttggcccgggtggccgtttgagagttgttggccgggtgccaatcttgatcaattctaaagactgatacattgcacaaactccgactggacgagacgcactgtctcatccgtgtcgtttgagaagcactcacttagttgttttcagaaaggagttcaaataaaatcaattgtaaaaacaacagcctttctttgaagcctgcattaaacacttatttcccatggcttgctgagtactcccgtactcacccttgctctatataaataatcccccccagttgctgaagaagttgaagcggaacctgctgatgaggagttcttccaggagcaagccggctacgatgagttttagggtttcggcctagttcccaagtcgcgcctgtattggttggtccaagtcctggcttccgtttcccttttgtaatgcagttgtgagctcgggatctgtccgcagtccaacatgactgtacctctactctataataaagagacctctgttgctgtgatattccgtctccctgtgataccagcactgtttccagggactggtatcgattaacaggttaatttagagcgtcacgggctagttccggtcgggactagttcggggcgtgacagtaggtccgccaatctgccttgcagacgggacaaagagattaagtgcgatcctatcaatgcataatatttttcaagcaacataattaaattcaaatataggctcaaggtgttcaaaggtggcttgccttgcttgagatcttgagcttgatcctcgaaatcctcgcactgcgggtcttcgggctccgaaactacacgcaaaacgggacaactcaacaaacggagaaaataaagccctattaatgacctctaagcgtgccattagatagatctcgagatttgaggaattttggaagttgatcggagtcaaacggatttacggttgggaagatattgaatttctaagattattggatttttggtctaaaggaaaaaggatttatttaaatcctttttgaaaaagaaaagaaaagaaaagaaggagggggaaaattagacttccctcgggcggcgagggcgcggcccgagagaaaagaggcggctcggccgagctaaatgggccggccggcccaaaaggcggcccaaagcgcgcgcgcgggcggggaggggagagagagccggtgggccgggtccatcccgcgtggtcccgggtgggacccgcttgtcggcgactcggctcaccgtgcggagcgagcacgcggcgcgcgctagggttcggggagggagacgcggtgcacgcgcgcggttcgcggaggatgcggtgcggcgggcccccgcgcagcctcacggctcaccgcggaccatgcgcacggggggggggggggggggaaacggagggagcggctggccgggtcagccgatctggtcgcggccgaggtggcgcctacgtggcagccacgtgggccggcgggaggtagacgacgacgccggccagaacggacggcggacgacagcggcgagcggcggagcgaaccacggcgatacaggcgaaagcgagcacaccgggtggttgcgcgagacgaggggagacgagccaacggctcggattcgccggagggagtgcgtcggcggcggattgcggcggcggcaaccggcggggagggaagaggggaacggcgacgaggtcacgaggggccgattcccggcggcgagagcatccacgcggctacgggaatccgtcccttgtgccggattaggaggaaacgcatcgagggaggccggcgacgagaggcgcttccgagctcgggcggcgacggcggcgagcacacggcgagcgacggcagcagtcggggcggcgccggctagctacggggaggctactcgtgctactacccgagtctaaggggaggagatggaacgaggagggagaacggggagatgcgctaccgtgcgggacggggcgtagtgacgatgggccgacggcacgggagtgatctctccggcctcgggccggggaagaggaagaagagggcgcgcccggagtccccttccgcgcccttgctcgtgcgggctcctccgacacgcgcgacggcgaaaggcggcagcgaacagagcacgggaggcggcgacaatggagtggaggcgagagacgaaaacgagggagattggaggagggaggagcttgggtttataggggcggcaatgtcggtttgggagaggggaaccgacattggacggtcaagcctgcgagctggcgcccggctagcggccaatcacgacgacaggaggtgacgccggcgagagggaaaaagggagaaaaggaagggagaaagggagcttgtcccttgccact

SEQ ID NO: 7958 - DNA, 14604 bp, Oryza sativa
atttacttttaagggcaaaattcagagacattcacgatgttttttttaaaaaaaaatggtactcgttataagtaatacatgaaaattatggcatgacagtgacaaaatggtgtcaataattatgcaaatatattccagatgctgattgaagtggttaggacttaaaagtctttaggcccttttctcaacttggctgactctgtgtcagatttttggatgttttgcgtggcttgtcttccactaccacttccaattccagcaccgacgctgacgtcggcacaaaacaacgaaggcgtgtagacgcggaatataccagtacaaccgttttgtctcattttaaggcattgcagtcggtgctagcgtgcctaatgttcagctacactgtaactaattttgtaattttgacattattcacctggagttagtgtagacgaatgcatatggtacgctcagtgtgggccaccaaattttcagctgaatccagagtcaaacctcacaggcatagtagttgagttcagcactccagtagcatgtgcgagcaaacgtaaaggcagttcagacaatttgcgtctagccatgtaaacattccacggtagttctactgttctagggagagtaggcgtactatggtggtacactggtactccgtactaaaatgcctgatgacagcgcatgaagaatgctactgaccgtagaaaccagacctacgagtaatgtaagaattatatcagaatggtaatctactagtaaaaagtaatggcaaacaccgtgcattggaacaaaaaggattgacaccataattgtagcttctatttacccacctggaatactttggttgtcctttaatgtaaaaaactttgcagggtttccttctcagcacctcttttacacctaaacatcgagggctgaactccatatgtgaactattccacccaaagaatgaaatggaaaaagaaacttcaaatccacaaggcaaatggtaagccgattacgatatttgcccaatatgtcaattttttctaacactttatttcacgttattgctattccttttcttccccgagtgtccagtatgtctttacaacaaggaggagcttctcccggacgagcgggccatcttcgtgatcaacgatttggctgttccatctcataccgtcggtaatgctctttattttcaccaacatatcaacatcatctcttataatcactgtaccctcaggcctcagtattctgtccatttccagcagaatgttgtccatctggcatctgcaagagacgaaaactgcgtcagtccagtaccagggtaaacagtctccaagagtgactgttaacgatacctattagatttctcaaatacaggcataaagaataatgtgcagttactactgcataggagtacagatttatactccacggacaagaacagaagtcactgttgctgtgatggactgaattttactgcagcttatgattacctgtccttgtatagcgtgaacactgaatcggcatgaatgaggtcgtaggtccgagggtacgtggacatgccctcacacctgcagtaagcacggatagaagtcacacaccaacaaaaacatgagcacacacaccaacaaaacatgaccgtcatcatattcagtctcaaagagaggggcagtgcttgcagagttgcggtacaagaactcaccagtcttggtagcttccgatgagcccacgctcgtatataaccccaagagttgttgaattgccaacagttgggaccatattcatgacccacacagggtcatccaccaatgccgcagcgaagccgccaaagcgcgcattcatatcaagcaagttgcggtaccgtcctttctgtccaaattgacttatcacggacttgtagtgcccgaccctcttctgccatagtttggtgtcttccacgaacatttcatcagtgacaccctcaatgctaccactggcaattctgggtggcactgcagtgagcctctctggccatttcttcaactggccacccgcaatctcttttatgtcactaacctctgggagaggagttatgcaagcctccatcttatcgtacctataatcgatcacatgaatatgatttatcctgaactgtgaacgtgagttaacttcaagatggacaataaagatataattagtgttgtaattaccatgcagcatctggatttttatttgagcagaagggtggggacttgacgactttgcgggaggccttgcagtgaatgtggttagtaggtttctgccagatggcaatgtcaccaacctccttgagcgtgatcttcttccagcaaagactcttggccactgcctcaatcgcttgctgctctgcattcaggtcctccttggttctctgccaccccttccagtgcttcttccagttgattggaggtccagacaaaatccaataccctcctggccgcagaatgcgatccacctcagccaagtacagcccatctgcatttcaaattgcacctgagttatcaaaggattaacagagcattgccaacacatttaattttggacaaaatgttgccataccgtagagctgccagggaatgaggcagcgggagcaatgtgccatgtcaaaggcacgagctggataggtgagccggttggatgaaagaacaccgatcatcgccggcacaccacgttccagtgcaaattgaacctgtgcctcgtgagagtcacgtggcgcgaaggacatggccaggatgttgcgtgacagcaagtatgcgccccagctcgctacctgcaacaagcggcagagtgcaacacattaggaatccataactctaggcgtctggttataatatacaaagggtaacttgcccctctacacatgagaaaaactcagtttccacatatctagcaatacaaatagatcaaaatgacaactattggcacagcttgctgtagacgtgaaaattccattatgtgtgacattgtcactgtgtaaaaaggcactacatatcttccaagttttcaacgatattagtgcacagtgcacacaacagaacctctcctatccgcagccgacatggagaatttgatcaaagaatgcactatgcgcacggaatgctacaagcagtcaagtactagtaacttcagttcagtgcttcagttcagcctctaaacgaaacggtatgtcggattggtcacgttactctacagtctgacctgcctaatcacagaatgaaacgaacaaatgctcctctgatccgggtcggagcagaagctcgtttagggtcagacccgtttgcccgggcagaagggcccagaggagcagtgtgggactggaaacttccgacacgcgcaaagcaaaatcccattccggcgttgccgagatttccgcctcatgttctagtgcatcaacaaactggagtataactaaacccccaaattttgctacgaatgtacgaaacactacttaaaatcgagctaattatgcgcgaatgtcatctatcttaagcaaatagggtgtgcttatgtatgaagtggcctaccccacaaccggtgtcgagggcggtgcggatggatccatcgtggagggggatgatcttgccgatgtcgtcgatgtacgcgccggcgccgtgggggaacatggtgccgccgccggggaaccggaacttttcgccttcgacgcggatccagttctgcaccgccttctcgacggtgagctccttgtgcggcacgttggcgaaccacgcgacgtcgcggctggtcggccacgggaacgggttgcggtacccctggggcgccggcacgaggcaccggagccgctcgccctccgacgggcagtgccgctcccggtacacgagccggtcccgcgggaaccgcagcgagcgctcgacgtcctcgcacggcgtgtactcggagtacttggccgggcacgcctcgtacgtgcggtgcacctggcccgacgccacctccatcccctccgcggtatggtgcgccgcgaagtcgagcggcgcggacgacgaggagtcgccgccgccgccgccgccgccaaggagcgtcggggtgggggagacgcaggagacggaggcggtggtggcgatggagacggaggaggcgacgccgccggccggggaggcggagaagccgccgtggtgccagatgccgatgaggtaggacaccgtgcagagcaccgcgacggccgcgaggtggaacagggacgggcggcggccgcccgcggacggcatgtgcagcttcgtggcggtcgcgcccaccgccatggctggctggcggcttctgctgctcccgctgcgcgctctcctctctcccctcgcctcttgtgggattggggcgattcgcctttctgcaccactgccccccttgctggctgcttaaagcgcttgccgcctaggaaggattaggggcgtggggatcgattgattaggtggaggtgaagacggggggaggccgtgaaagggagccgcacatgcatccggttttggtttaatcgtgaagagagagcgtttattactccggagcggctggtttattactcttgggaggatgcaaatggttgcgctttgggaacacgacactacgccaccctacgctgctatcgctggcggcgcgtgtgctgcgtgtgcatatcgcggcgtggcagcagtttcagcaagcattaactcggtggtgttactgtatattttctgttgatacgatcctggttggcgctattaaaagtgtaaatgctgagtgcacgagcccactctgtaaggttccctctgaattgtagaagtgaaaaaaaagggaggaacaagaaaagtacagggattatgatagaaattcaacagcaagatgtatgaaaaatacataaataatcgtttgattatttataggaaaaatataaaaatcggatgaaagagatagattcaaagaaaattttccatgaggttgaagctattgctaagttttcttcaaaattttgataggattgtatattctatagaaatttcaaaggatacgataggattcactccattgtttcaaatgttttcatagaaaatattttctatagaattgaaatcctctaaaatttatatattctttctacaaatcaaatggccccttattcgacatttgctcgaaaaaaaagacaaaatatgtttatgacgatatattttcatccataaacaaccatcgtaagtgaaaagggaagaagttaacaaaactataatcgtacagttaatcactcaactgtaggtccatacatagtggtttaatagtttgctatcatgttcaagatttatgttatatctgcgaaaaaaccgtgaaaaacaaactaatcgatcaaaaataatctgtatgtcggtctcgtgtgtatggatcgttgttgacatgcagattattgatgctcttaccttgttttccatatccaagtttaaaaatgaagttattttgaacggagataagtagtataatgacatggcagtactagagcaagagtttgagcacaatttattccttttctttctagagacacatccaattatatactcctactacaagtaacgcaatgacactgaatttcttctataataatatgtataaataatggtttagatatttattgtctacccccgtcctataatatagcaacctaggactggataggatattttatagtacaacgaatctgaacacactcatgttcaggttgctgtattatgggacggagtgagtatagagaatatagagttttttttttcacatcatgtctaacagaatatagagaacccacattaaccatccgtttagctgtttcaaatagatttatataattactttttattctataaacaacacatacaaatagtgaagtagatggttattttaacttgtctattagactacatgttaattaacatacaacaatcttttctgtgttctctcttttctgtacaacatcgcaccattattcatgtcgtaagattgttttcatcaatcaattaatttgcccttgctcgtattattttttaaaaaaaaaaacgaaccgcacaagacagtgcgcgtttcatgtattgataaagcaggagaaaaatacaatctatagtcctggaagaccacagaccagaaaaaagaaaatacaaccacaccgtgcgtctacaacaagacccactgcaagagcgaaacagaaggtcttcgagacgacacctccaagaaggaaacgacaccaaaggtgccactgtcgtctgtcccgggaggccaggacaaggttttcacctgaagaaagtaattaggagagataagaaatacaaaaacaccccaagaggaaaacggcacccacaggcgttgttgttgccggcccggaggcagagctttcgcccaaaatttcgtccctcccaagaactaaactcctgcacgctctgtagccaccaccaacgaaaaccttcgacgcacggccaccgcaccggcgccacgccgccagtcgatcatcatggggaagctcgaacctcgacacacaccggctccatccacgcagatgggttggatggggagagggtgagagagaagaatggatgccctctccccccccactagcccgctcgacatggacaacttttgtcgacaaaggcgtcgtcacaagaggacataagtctggaaatgtgcccgtcgaaggatcgtggctcctccctgacagagaaaccgccaactcagccacgaatctgttgcccatgtcacctcgggccgccggaccgtttcgccggcgccttgccaccctccacaccgtgctgatgaccccctccgccacagtgcacccgccgtccaatggcgcggcactaggacgtccaacgaagcacgatgctcacgccccaaaaccggtggaggggaccggttcttgccggagggaagccagacgcccagcactcgccaaagttgccagcataggaaggttcgcgccgcacggagaccataaggtcaccatcgtcgccacatctccaccgtccaccgtggcctggcaagcgtgccgctcgtcgatggctgcccaccacagcttgggctccgccaacaccaccactcagtattgactttaaggaacctacagtagcttgtcatgcaatgatttataatatttgtcatcctattctaccacaatttggtagagtgatttttcataggtaaagaattaaaccaaccctgtaattcttttgtcgtggaggtttggattgcgtggaacatgggctagagcctaagcctttcgataaagtattatcctcctacccaaaccttgtttcttctaggtctagtagtaacctgtagtactaacaacgaagtattattttagaaggacattcatcccaaacacgtttagaggtgcagtaatttcgagcaggcggaatgttggtctctcagtcaattagggaaaatgcgcagaatcataatccactgctctgtgagcactctactcttcctcacaagaacaaacaagatcacaagtttcatcgatggatcaacaagatcgcatcgcctccgccgccttaaccgctgatatattgatctttctcagatgagtttcatcatacagaggagtttgtttatatatctctctctctcgttcggcaacaacgccagctcacaactgccagctatgcattagctattacatggcccaatccggcccaacgaatctagtatttgggatacggagtcttgcagcccgtttgcgcggcccaccatcttgcggttgctgttgctcgtccgaaacgtcagtagctgggctgctgacaagcccctccccttggaaactgacttgaccccaagtcagggcagctgggaacctttgcctgagattagcttcatcttcccaggtcgcttcatctgcagcagaatcagaccaacgaaccagcaactgaggaataatacggttacctttcttatggagcctagtatccagaacttggactggaaactgaatactggaagttggaccaggtagctgactctgaacaggatgcttgaacccacaagagcctttcaattgagagacatgaaagacaggatgaacagcacagtccaatggcaactgtaacttgtatgccacttgaccaaccttggcaatgatttggtatggcccataatacttaaaagatagtttgtgattagctctcttggcaactgaagattgcacataaggctgcaacttaaggaaaacccaatcacctacctaaaactcctgaaaactcctttttttatcagcttgatatttcataacctgtcgggctctattcagatgttgcttaagcagttgagccatcaacttcctttcagataaccattgagctaaatcaggtatactgcaagcatcttctctgatgccgaaatgagtaggaggatagccatacaaaacctcaaaaaggtgacttatacagtgaagaatgataagagcagttataccaaaactcagcaagatgtagccattcagaccatttagagggagtagcatggacaaaacagcgaaggaagatttccagacactagttaaccctctcggtctgtccatctgtttgaggatggtaggctgaactgagatgtaacttagtgcatgtcggagaatgaactcctccacaagggaaccgtgaggcccccctttgtgagttcggccgggggcagcggatgagattcgagggcttggtgagcggagctgtgtgatcttgagggggttagcccccccccccaagacgatgagacaaaagagatttatacaggttcgggccgctaagaagcgtaataccctactcctgtgcatgattgattgaatgtagaacacaagtgcttggggttgcgagacccaagcgccagttcgcccccctccctccccccctcccccctccaccactaggcctggacctccttttatacctcaagtggttaccacatggacccaacaacctaacctagctccggtggagaagtattataatctttgcattaaatgcatgtcttgtctctgtggttgggaagccaagcacacgtcgtcttgatgatggggcctatcaaatcttgccgcctgacacgaggggtacccctgtcagtcaccatttaatgggtgaagacttctgggctcctattacaccgggaaacaggagccttgttttgaccagagcgggaggaccgacttcggcttggataagaggataagaacctctcaccatcactatttgatgggacatgtcaggctgcacgccgcctgacacacgagcagcgcacaggcgcactagccagtctcatcggtcattcgaccggtcacagaccggttgagtgcactgcacgccgcattaaatgcggcatggcgcgaccgctcgggacgccataaatgcgggtaggtgggcacctggaggcggacacctaacccaccgtacgtggtgacctagagagggggtcgggggagcccgacccctagtcacgggagggggcggcccccgcccaacctcgggcccgatcccccctcgggggggagccacatggcgcctggggcggccttctccctctagtctcggccagggagtggccgccgccctacctcaggcctgaccctcctctggggagggccacgtggcattggagggcagcctcctccatccagtctctgggaaggagtggccgccgtcctacctcgggcctgactcccctcgggggagggccacgtggcatcggggggcagcctgctccgactagtctttggggaaggagtggccgccaccccacctcaggcctgactcccctcgggggagggccacgtggcatcggggggcagcctcctccctctaaacctgatacccccgggcccatatcaccgacagtgcctgacctgatgaacaattgctcccacaatgtactggtaaaaattttatctctgtctgaaattatagcttgtggcaacccatgcagcttataaacattaagcatgaagactttggcaacatccatggcagaaaaaggatgagatagggtcataaagtgggcatacttagagaacttgtcaaccactaccaaaatacagtcctgcttgttagaacgaggcaaaccttcaataaaatccatggatataatctgccaagctccatcaggaacgggtaaaggttgcagcagtcctggatatttagctctgtctggcttggattgcaaacagattgaacaagcattcaactgttgttggatggtatccttcatatgaggccaagagaaaagagatttgattctgtggtaggtaacaggaaatcctaagtgtccccccatgggactgtcatgcaaggcagagatgatttgctgttgcattgaagaattattgccaacccacactcttcccttgtgtttcaagagccccttgtgcagcttatactgagggtgagaagcaggattaacggccaattctgtcagaagcttaactgaaacaggatcttggtcatatccctagattatgtcttgcaaccacacaggagaacattcagatagagccaagaattctgacacttcggcaggaacattccttgaaagggcatcagcagctacattgtgcttgccctttctatagacaattttatattgcaacccaagcaatttagtgaaagccttatgttgccagggagtgttaagcctttgttcagcaaggtgcatgagactatggtggtctgtcaagatcaggaactcttggaattgtaagtaagggcgccaatgatcaactaccatcataatagccaaacattctttttcataggtggaaaggccttgtgttcttggtcctagaggcttgctcacataagctattgggtgctgattttgggaaaggactgctccaatgcctaggtcactggcatcggtttccaaagtgaaaggttgctggaaatcagggagagctaacacaggagcagaaaccaaagattgtttgagcaattggaatgcttgttctacttctgcagtccaattgaaaggagcatccttctttagcaattgtgtaagaggtttgctaatagcaccaaaattcttaataaatttcctataatagcctgccaatcccaggaatcctctcagctttttaatagtagtaggtctgacccaatcgacaatactctggattttagaaggatcttttgcaactccagccccactgataatatggcccaaataggatatatgttcctgggcaaatgcacatttactgagtttaaccttccactgatgattagataacagctgcaggacttgtctcaaatgagtaagatgagtaggcagatcaggactgtatatgaggatgtcatcaaaaaacactagggcacatttcctcaacactggactcaaggtgtcattcatagcaccttggaaagtgccaggggctcctgtaaggccaaaagacatcaccttatattcatagtgtccactgtgggtttgaaaagctgttttgtgctcctccccttcagccattctgatttgatgataaccagctcgaagatctaacttggaaaaatatctagcaccagccaactcatctaagagctcatcaataactggcatggggtaagttcctttctgagtgatattgttaagctgtctgtaatcaatacagactctccaagaaccaaccttctttttaaccaagagtgcaggtgaagaaaatgcactgctgctgtgctgaatgactccattttggagcatttcttgaacctgtctctctatttcatccttatgtccaggtgtatgcctataaggtctgataaacactggtttggagtttgggaataagggtatcctgtgatcacaataccgtttaggaggtagcccttttggttcttgaaaaacttcttggaactcagtcagtaagggctgcacaatctcaggaatagagggagatagctgattagtagatttatccaattgaacaaggtacatgattccaccagacttagccaatccatgtaactggcccggagttatagggagacagctgagagtactagacagtgttccctacaacctgaccattgagtcattcaactgaaattctagccacttgtgtacccaatccaccctcattgggctaaaccgttcaagccaatccatttcaagtatcacatcgtaggcacccaatgctaaaagtctaaagttgctcttgaaatgtattccttgagttaaccaatcacagtcaattatgtgcagtgagcaagtgaggaacccaccatcagcaaccttaactctagctagtactggcatagccttaacccctgataatttgagaccaatctgttgatacacaaacgagtgagtactgccagaatctatcagcataagaacttcaatgccctgaacccatcctcttaacctgattgagtgattggagtcagtaccattaatagcttgctatgatatagccattaaggtgtcagattcaggtggttctgaaacagcctgctcagactgagatgaaccttgtaagacgtccagcaactcttggaccacatgtaactgaatggaggaagcacatttgtgatctctgccccacttctccccatagacaaaacaaagtcccttggatctcctataagacttgagagctgacaatctatcatattcccttgaatgattgcttaattcagttcctctcctatcatttgaaatgattggaggccctcctttagtggttggtggcagaggcaatggcatagcacctttgactgactgtttctggtatccatcagattttttagattcttttggcttatcaccctccaatgcttcttcctgtaaaagagcaagagtacaagcaacattcaaatctccaagtctttgaagcagaatagcagacctaatcgcatgccttagcccctcaacaaatttagtgacaaagtagactggtttcaaagatgggtcataagccatcatttgatgcatgatgcaatcaaactgctctacataatcagctactgatcctgtttgacaaattttaatccattgtctaataagggcttgctgcctatctttgttaaacctagtacaaattttttcacatagttcagaccaagtaaccccttctagttgagacctaactgcttgcagccaaaaggcagcattaccagtgaaattgagtgttgctaccttaacccaattacccggatgtatgccatagacatcaaaataagcctcacaattagacttccacatgattgggttatctccatcaaattttgggcaagtcatgggggctaccccaccagtcataccaactgacaaagcagactgaaacgaattcatggcagaagcatccaaatggaaaggaattggagagacattgtgagacgcatacgtaccattggccgggattggctttggggtaaaaccctcagcctcctcacgattcaaaatttgaacgcggtggccatctagaccggttgagccatttggtcgaacacctggtgagtccagggttcccgctggagttgtttgctctgttttgttggctgaagagctctccagttgatttacttgcatttgcagcagatccacggtggattggagtacatccaccttcttctccacagctgggatccaagattccaccgcctccttgaacaaccgcatctcctacgcctgcctcttctccccttcctccctcttgcgctcagttttctccatcttctttagaaggagatcaagttttgcttcgttctccatgattttagcggtctacttcgtcacaaaacgtggtttctccagggcttcagatcttgtctcacctcaccccgaattcggccaactcgagcaaggcaagttaccttttcacggatctacccgagggtaatccaatccttgcccaagaatttcacggccaaatcaagggaaaaagaggattgacgaagctctgataccaagttgtgagcactctactcttcctcacaagaacgaacaagatcacaagtttcatcgatggatcaacaagatcgcatcacctccgccgccttcgccgccgatatattgatctttctcatatgagtttcatcatacagaggagtttgtttatatatctctctcgttcggcaacaacgccagctcacaactgccagctatgcattagctattacatggcccaatccggcccaatgaatctagtatttgggatacggagtcttgcaacccgtttgcgcggcccaccatcttgcggttgctgttgctcgtccgaaacgtcagtagctgggctgctgacatgctcacgtgtaaataccaataatgcaaactcctatcaaatcatggttaattcgcaaaattttatttttactatacctcactctcagaaatcaaatgacacttgtaaaaattaaaccttcggaattcaaatcattaatttttctttcaaaccgaataaaccctaaatttaccgggggaaaataagcccgggcccacgccagccgccacccatacggtgcacgggcagacaacctgcaaccgaccaaccggactcgcacggccgatagatcaacctcgaaccagaccgcgcgcggcaggtctctcgctggcacgtgggccagggaagaggtggaggagccgaggaagagcctgcacgacagcacgagtaaagtacagcgcaac

SEQ ID NO: 7959 - DNA, 19995 bp, Oryza sativa
cccccccccccccccccccctcccgcggcgcgcgcgggtgttgtcgtgaccacccccacggtggtcgacggtgaatggacggtcctgccgcctggatgatgcctcgcgcctggccgcccgcagtaaacgccacacatgctgcgcggtgcctactcccctcccgtaccccgtactcctgatgccaactatgcaccgtcttttgactcggacataacgcatatagtatgttactgtactactgctgctgctgtctcgtggtacaccggtgcgaccgcctccatcctgtagcactagcacaaagagcagtggctacccagggcaacagggtactggactagtggaggagtggggttaatacagtcagcaaaggctgtattaggcccttcttgaccgctcgatgagttgaaaaccgggcacgtaacctgttcacaactgtccatcaggaggcgtgcctgtccctcactagaatcattgttgtagcatgggaagcggtaggatcttatcctcgagaccttgacggcgtgacgaatgcctaatctgatccgactgaagtctggatattcaaatcttgtgagcttcttattgtaacaataggataaacggccaagttgcggtgtggtatagagtacggcatcttaacaaatgctagtcggcgagatcaatgtcagcatgctccaatcaattggcggagatttttgtgggccgtacctttgtgtgagactgaagcaaccaacagaatggactactctgtgttcggataccccttttcccaaccatttttcatcgttttttcacgcgcacgttttttaaacagttaaacggtgtattttttgcaaaaaaattttatacgaaagttgcttaaaaaaattaatctatttttttaaaaaaatagcaaatacttaattaatcacgtgctaatggaccactccgttttccgtgatcactgttcttggtgggaacttgtcctagcgaatacttagggcttgtttagttcccaaacaaaacttttcacactgtcatatcgaatgttaggacacgtgcatagagtattaaatgtagataaaaaacaattgcacagctcgttgggaaattgcgagacgaatcttttaagcctaattgcgtcatggtttgacaatatggtgctacagtaaacatttgctaataacgtattaattaggtttaataaattcgtctcacagtttactgatgaaatttgtaatttattttgttattatactacgcttaatattttaaatatatatcagtaaatctgatgtaacatgcagtggtaaaattttttaccaaataaccaggcccttactaaaactatcaaaggcaaagcaacgacaaaagcaatactaattaggaggtgacacgccaacatctcgtcaaagaaccgagctgtatcaatttttcgcgccatcaacattatggttttcctctgtttatttataagctagcattggcacttttcaagtgctactatactgctatacatggttggataagtatagtacaactagtatatacttttataaataaaagaggaaacatatattcggtcattcgggtgccattgttcttttcaggatatataccatcctagggcaaggccaatgtatgatgtatatacacatattaaggtgggacccatgaatagttagcatttcttatggtatgatgcacaatgtatatggtctttaacatgggtctcactataaaataaaaaaattaagatggctgccaacttctttgagatagtagtagggagagagaggatgtgtaggagaaaaaaatacttgtttattcactatggctagttgtaagcttgagttgcatcataagaatttttttcctattgctaacttacacaatacacaatgtataaggtgtgtctcgagaatatatttattccttaaggttaactttttagcacattttggttgcccttaacacatactccacataagggggacgtaattggcaatatgtacatatggagtgtgggaatcggctgttttgacttgttagctagccgtattaagagtacttaatagcagttggtccatcgcccaagctgatccagttaatcgctaatctctatgctcccctctgataaggatgccatatgtctgacactcgttttctagtacggggtaccaggaaaactctgttcagagtatggtttggaggcacatgggttggccaggttggtctgcggcacccaccagccaaaatcagtagtaccactactcagttcttggatctggagaattttctttactggaagatggtgtgcactgtaacttcagaactccggcatccagcggttacaagtgtaccactgtagtactgtagtgctagtagttctagcgctgctagcatgggggcaactcagccaactgccatgacaactttccactcgaaaagacgaggaaactaacccacatgccaaagcatgcacgtggttcatagagccctaaaacagagtaatcctggtttattttagtggcccctttttgcagcaaaccgacggcctccctcatgcttcttctctatagcttgggcaaagtgtagttaccagtagtagaagtcctctctgtcccgctctctctgtttctgtaacgataatactataaaatggcaggagtcatccgtgatcgatgccacgacttggtttagtccgagccacatgccaaatacaacggtctaatctaggagtagtagtacttagcatcatcagctggaggaatggaaaaattggaccaagacatagtgggtcgggctgcttcaaagtatgcaaccaatcaccaaagtatggcgatcgatatgtatcattatctacacgaaggtcaaaccgttgcacagctcgcgaagttcagaagacatcaagacaacttgcgatcgatatatgtatcggcggcttcgagacgagccgtgcgtgtgtagcgtgcatggacgccgtctgttccaggcagcagctagctagcggatgaggcatggctcccgcgagacggcgagaagacgatctgaccggtggtcgctgtgccaaccacagcgaggctgcggcgcattgccatgccgccatcgtcagaactcagaagttcccttttctaccgtgctatgggatcgagtacccaccagtctgctacacgacatgcgtgtggagccgtggtgtatggagtaggcgctagcatagcaggagcagcatcaggccgggggagacggagacaaacaaatgcttccccacgcaggacggaacgaagcctgtgcgtaccttcattgcccggcaaagaacagaacatccgaagttctcaacatgggatatattgctatcttgcttggtcttcggtggattcgtatcatcgtatgcgctgcaacggcagatcaacaatccatctacacaccgtccaccattgcggtggagatataaacacactgtagaacatttcgggtgaagaaggccaaaagtggtgctaaagctacaataaaattcagtgtgaaatctgaagccatgggaggcccaaaaccccctgtctcagccaatatcgtgcagtccgtttgttcagtttggtgcctgggaagtgggaacagagggaagcagagagtgtgaacgtgaaattcagaatcgggtgaagctgcattctacaatgggcctttaaatttaactggaccaaaggcctcgtgggctttaaattcaaaaggaggcttaagctcggggttaagggcctttaaatttaactggaccaaaggtcgctgttataagctggccttcaaaaggcccactaatcattagttgttgggggaaaaagtgcaccgaaggtccctcaacttgtcatcgaattacaaaatcgtcctccaaccacaaaaccggatacaacgcatcctccaacttacaaaaccagtacaaattaggtccctcggcgggtttgactcctgttttgtcggacgtggcagctgactcggcgtggggtctacgcgggtcccacatgttagcctcttcttcccctcccctctttttcttttttctctcctcttcttttctctcatcgggcaaggcaaccatcggatgaagaggaggccagtgggggaggcgggaggtgggactccggcggccagcgacgggcgacgagatggcggcggcaacgatatgggagcaggagggcctccccccacgccgccaccaccgttgccgacggaggaacacggtgagctgcctccggtgggctcgccggaggaagtcagtggcggtgtgacggcgcaggcggtgaagatctcctgacgagggacagcagcaggttgttcgtctccaacatcatggccgcgccccctacgtgctccgatctctcgccggctggaagaggagctcgcgagcggaggagacgacgtgcggctgcggcgacggcggctcgggttaggagagggttatgagagggcgagagatagtgggggtgggagatgcatggatggacgacggcgacgacacgagagaagggaggtggcggcggctgcaacgcttgagaagggaggcccgggctccgacgccgaataccacctccttcgccgcatacccccgcgcccacagccgctgggagccactgccatagacgactctgcgccgctcggcctcggcggcggcggcggctccgggcagggatagggccgccgccgttgcccagctcctccccggcggcgagggagggcgggcgcgggaggccgtgctgcgccgccgccgcctcatcacctgtcgccggccgccggattcccgcctgccccaccggccggttgccctggcgactattgaagtgcggagcaaatggagagaaaagaagaggagagaggaagagtggggaggggaagaaggggctgacatgtgggtcccacgttgagtcagctgccacgtcggacaaaaccggagtcaaaaccgccgagggacttagtttgcactggttttgtaggttaggggacgcgttgtatccggttttatggtttaaggacgattttgtaattcgatgacaagttgagggaccttcggtgtactttttccttgttggggagagatgtgtctaagacgggaggaagaaatctactggaccgggccaaattgacagatactcaatggaatattggttgtctgtatacattcgaaaaacttacctccctcgacaatggaccgaatctaattctactgtaaaaacaggtatatattgtctccttcaactatcaaaatcagctcactttatctttacgagtggtttttatttgacgtagcacttgacttggtcttctaacatggtgctctaacatggtgcttaattagcaattcaaccggaaaaaacccatagggtccagtggtccacatatcgataatattgttgccatctcacacctctatttgctctcttccctctcaatagtggagggatctacagtggtaggcctccttggatcgtgatagtagcaacactagcatgaactcgaggaagagtagggggttatttgtggagtgcagagcaggccacacttcgtcgggtggagcaagcagcaagcgacgagcgatgagacggcgtggaggttggcccctatctcggcttccttctcaactccaaccattagaccctaccaccaagatagccttcatagctccatagatggagggtattcgagaacaatgaaggagaagacgttagcgatggtttcgggcttgcctagcgcgaggatgatgcggcaaagtagggcttcgtgggtttaccagctgtcaccaatgacttgtgctgttgccggcactagcacgttggtgagaaaaacagactcccgtcgaggtggtcgagcctgagctccaacacatccccaagccttgttgtctgcatggagccatcacaatcaccgtctcctacgacctcgggtcttttaaggagaaagggataagatggcaataatgtttttttttactgatatacgagtctcttttaattttgtcatggctaaattacttggcagatgaatcgaatcaatgtggcacgtcaaacaaaactatggactatgatttgacgtaagcatcatgtagcacataacatcttcaaaatcacttgtggtaaaatgagatgattttggtagctgaaaggctatatacatagttttgtcagcccatagttaagggaggtaaaatggacttttcttcatatccgttttattgctgcggcagtgcgggattacggaatggggtttgatgggagttgcgtcataatcatgaacttatcaatggcttaaaccgatttaaaattgtcgtaaaacatgggagcaccgagcacatccttctctcctgctttccatgatatttgaccgccacaaacaaattacaggcgatctaaaccgtccgttcaacctccaatacggatggcccgacgcgaccgacgccccacggcccacggcaccttctcgaccctgacgcgtggaccctctaggctactactactcatcaccgcgggccccgcgaaccagccccacacgacggacgccaccacgctcgcggtggactcggtccaccaagaccgcaggcacaggcgccggcggcgcacacaacaccggaccggagcaccggaggcgggatcaaggtgaaaggccacttgtttgtgtggactgtggactgtggtctgtacctccacggctccacctcactcgtcgcagctcgagagttcgcccaagtctccccccgatccgtgcagagatcctcgtgcgtccgaggtaagcacacccccccccacccccaactcccagttcctaagccctcgtagattcgccattccaactcagttttcgcgcacgaaatgttcgtcttctttcttcgtcctaggtgagctttattgcagattcgccggttcagtttcgtttgcggctagaaatgttcgtgttctggggcagtaggatgggtgtcgggtgcttgatccgtggttcatgaggagggttttggagtgtgagaagatccgagacaccgcactgaattactgatcccattctgtgcgtgtgagcgagggagagggagggagggagactgggagaggaggggttagttttaatgtagccgttgaatgattgtgcctgatttgttaggtgagcatggaggtgatgcatgataccactgggaagaaggaagtggttgtctgttatatgaacgcccctctaccgtacatgattgaagagaattacgggggatgcttctttgaagacgacgttgatcttgcacaggttctccaggaccaggttgggtgcgaccgcctgctaccttcttgtttgattgttcctatgctactgatttgtttcttgttttgttcctgttctccttgttgcatagaaatcttaacatcatgtgttccaccccatggaaaattgtgtgtttggacaacacaatgtacaatgttatggaaatgcagccaaacacttcatggattaggttgttaatttgtcttttgttttgttgtagtattattgaaagtagacctgaaaggtgaaacatctttggctctcgtggtgccataataatgtgtaaagaatagcctcttgatgacatttacattgtaaaacttctagctcatccctcattgttacatggtgctaattaccattatcacaaaatattttgtacagtactagttatttgtcgaaggtttttcagtaggattgtgatgtttctcttttatagtacaactgcacaagtcaacagtgcatgatacatatgaaaaatatgatcctcatttgcttgatatgcttgcaccttgttcaggaaatagtctatcaattaatacaaggaaattatggtactggttcatccaaaactcattcaaatcctagttctagttatagccatggatgtgaattgggtgaacggaaaccatcaggagttgcaagttatgaagcgcaactagttgttgatgaagctttagctcgagagctgcaacagatggaggaccaactagcaagtgcatcaattgatgaccataacataatagaacatggttagttgtttactggtactcttctatatagtacaggacaactggtgagtgtctttcctctcgtaaatgctaatacgtggttcaaaaatatctgttcaggaagaaagccaatagcttcttcaacatctagcggtggtaatgcttctgcaagcagacctcctcaggtagtgatggaggatggcattgatccagataacatgacttacgaggtgaattccttcaaaccattgttttgccagtattttctctactgtttcgtaaggggacgtgccattgtcaactggtcttctactccatgaactttcatttcaaagtacctgtatagtctatggtaactactgttgtgtcatagaaaattcaagtatacaaaaattggacgtctccattttacacacattgctctaaccatgtttactatataaaaattgtaaagttgttctttaacagcttattgcttttaacaaatgcaaataaatgggataattgaagctattttcttttattttgttgaattttgtttgtatttcaggaactgcaacaattaggggaagctataggtactgaaagcaaagggttgccggaagatgtgatagcgctcttgcctacttcaacatacaaaattaggatattctcaagaaaggaaaagcatgacgagtatgtccctgtcctgattagatatttcagtgaaaatgtgatgtgcagttatcaacaggttattaataaacattttctatgcaacactctcatttacttattattattgtagaaggatatttggttagtacttttctgatcttaagttgcatccttcatcattgtgctagcaaaggaagctcctagagtactcgttatctatggctgcatgttcatgttgagttatattgcttgagtatgaaagtatttttaatacccacttctttgaatgtttacaaaaacagatgtgtgatatgctgtatgacttacaagaaccgagataggctgactaaattgccctgtgagcatcagtaccatcaaacttgtgtcaccaaatggttgaagatcaacaaggtaggccaaccatgcttttcaatctttccaatgtttagtagtgataagtgtatatgtgtatttattgtagttaccgtgaatatgaccttgattactttgctcaccgtaaaattgttctgcttttcgaaattccatcttattacctggtcaggctagatttaggctgagttcaaatctacgggtttgtcacccgtcctccctagcatgcaaaatggagcggcggattagtgcatgatcaattaagtattagccaaaaaaacttgaaaaatggattatgaattttaagcaactttcctatagttcttttttttttgcaaagaacacactgttaagtagttcgggaagcatgcgcgtggaaaatgagggagtatagaagttgcaagaagggagtatagaacacacccttagatagaatgacaatagtaatgtactgacaagaagacttaaataggtaatgagatgggtaagttatgaggaaagctacccaagaaaagagcttgtaatctcgtgtgttcatagatttacaaaatttttgagaccatgtttgcatccagaatgtattgatactgatcagccttgtgacacatttgtcaggtatgccctgtttgcaacaaggaggtttatgggtcgggcaagtgaaacattacggattcatctttcatgaaaaaggaggcaaacatgacggattcatctcacgccagttcaacaggcttaagaagtatcattgttcactggctgtgcactcattagcatgcatcatggtggcaggaaaggcaatgcattgtattgctaatgatcggaagattgtcagcgagttaccgaggaatgtctcagcaagataaataagatagatgcttctgttctgtttttaagctttatggagtcttcgagtaactgagactcttatttcagctttcaggcctggtgctttacacacactgtattgtaacatatcataggatgtatatcagtatgtgtatactgaagattagttgcatgctagcatctctgtattgcttgtactcttatcttttatggtatcaaatttggctgctggagtcagacttgtatggtcttcttgatgaatggtcattggtcaattccctgacttctgagccaaccagctggaactatggactgctatcgtctagccagagagtgtttggtcttgtttccaagtggccaatctatgcttggataattctttataatggaacattggactattctacatccattaacgaaatataaccttctaaacaggactaaatgatgttggcataaaggctttgtacaagggaagcagcttatgaagagacaaatttgtgggagcttctgaaatgagcatgaaaatgacaaattcgacgggaacaaggacacaaaatggcaaaagtcgccatgaaactgcatgcgtggtgctcgtcagagcggaaattcgacgcacacaacggcacaaacgcgataggatatcgttaaaccccaaaacttgaccatcacaggtggcgcgtcgaagtactcgtttgaccagacaactacacaagttcatctggattagctttgtttattaaagtgtaaatttcacttcgggccatcttttattaccgatgtttcgttttgtaccaccctttaagcaatattttcattttggactgggtaaacctgcctttgtttcactttggaccaccgactctcttctcaagcatataaacgatctcgattacatcgtcccctactcgtcaatgaactgccacagctatatgtaagactatttcttcgacatattataagttggatgtagatggataaaaaagtaagggtggtccaaagtgaaataaaggtaaaaatacccagttcaaagtgaaaacattagtcctaagatggtacaaagtgaaacatcgataataaaaggtggccaaagtaaaattaactctttattaaaccaatcctgacgctgctctgcccgaactgtcacgcccactgctggtttcagataggaatcctatcctgacgacgaagcttgtcattttccagacatcccctcgaatcatagcatataagcacatcataatcaattcatcaaactcgacagggatttgtagttgtttagaagggatttgagaggattttattagggtctgaaaagcaattgtttcggaatgagaagtacttaaccgacgaagtgagcagtactagtggactactaggcgtagtgtctacgaagtggataggtttgcaatgggctgggccccaagctaggttgctgactcggatccacgcccatgggccccgatggaaaatgtttcatattgctaggcccaaatcgcacgggggcccaaaggttagcgcagcctggtcccggctgattagacaccggcacatgggccccaggtagttaatcattgatgtgagattttctggttgttaagaggaaaatccggagagaagagagaggtccctgtcacacacgctggctaatactcctcccatctcctaacaccagaaaacgtatacatttaatttccatttcttgttcatcgtgaataatggaccagacaaaatcaatggctggacaacgtttcagatactagataagaacaaggcctcgatgctgcttatgtactaatactacaacatgttgatacttgatacaagtatataatcagtggtccagtgcacacctgtatttattttgtaccatcagaaaacaacggagtttatccgtgggagaaaaataaaagaaaggggtacacaagtctgcatgcaccaaacattttgatggcaacttggcaaccggtggaaacttggcagaatgccgccaattgtggccggcatgatgatacttcacgcgtgtacgttgctcggtgctccaaaccttatcggttcccacggcgaagaatgcccgtagtctcgtcatacactcgtactcccgcggagataaacactctctgtagttagctgaatattttgtgccatgtgtcgccacaaccctgaatcctgatttgataaagatgacaagaaaacgatacaatctccctgtgctgatgctgcgctgcatggatcgaaaagggcaacctctctgtactgatagggatcgatacggcatcgatccagccgaagatatttagcacctccatttcgcgcaattatcagtgacaaccgacaactctattgattatatttttcttttccaaggaaatcttagggtgtgtttgaggagaaggggattgaaggattgggtagatacgtaaaacgagatgagctattagctcacgattaattaagtattaactattttaaattttaaaaataaattaatatgattttttaaagcaacttttctatagaatttttttttaaaaaacaccatttagtagtttaaaaaatgtgtacgcggaaaacgaaacaaacaaactcactctctaccctctcgaacgctgccttagtatctttgccctttctgaccacaaaagggagggtgctttagtgcgagtagaaaactgcagttcatgcaggtgaagatgacgacgtggatatcttcatctttctcgatcggttgttgctttcggagtttcagtacttgtccatcgatgtttcttacccgttttctcatccttcgatgatagttcaatcttcaaccgatatagtagtatatctgatctaatctactccaaaagggctgaatacttatctgatctaccggcagagcacgcgattatttacgttgggaaggagttttccaagaaagagaacaatttaacgatcagagcacattagtcattagacattttcaagctgtcaaacatggtgcggtggtcagtgtagccagtataaaatggacatgaaaactttgtttttttttttttgcgttacatgaagatttttatctctcctaatgcattgcgcattagcagccaactgggaatatttcatatgaaaaaaacacctgtcagaatcacataaggacacgaaatatatactgcaccaccgaaactgattgcattgctacacacctaacctgaaagacctgttccccaactccaggcacattcagaaggctttcataaagaagaaatagaaaacaaattaccgtaaatccaatctgaatcacaggcggtatctaaacagtagcacttacagaacaatatcaaacttgaccttaacttattttgtctgaaactagcaacccaaaaggcgcatatattttacacagtcatcaccaggtcagcaaacagaacctcctagtagctcttatgtcttcaggcttccgctataacttgagaagactggccctccaaagccttctcttttctcctccaattcgacaaatttgacgctattccgcattttattcagatccattccccctcgttcgcagctttccgcgtgaaggtacgagcattttagagcaggtcagggatttttttttattttttttacgcttgatttgatgcctaaaatggccaagaatctgggccttgattcggagacgagtttctgattaattcgaattggctgctccggataaggtgaccggttgtttagctccggaagtccggatgaagtattcctcgctgcaaatcggttgaattgaagcggaattagcggttgtccaaccgctaacgcccggacagagaagaaaaggtatccgcttgggaaggctaatccggaagcaatcgcggcgatccgtcgtcgttgaatcgcttcgagagttttggcatttcttcagcgtggcatgggggcgggggcgtcgagcatgatgggaccggaggggtacggccggggatgggggcagacgtcgctgggcgacatgccggagagctgcgtcgcggcggtgctgctctacctcgacccgccggagatctgcaaggtcgcccgcctcaaccgggcgttccggggcgccgcatccgcggactgcgtctgggcggccaagctccccgccaactaccggtacctcgccgccctcgccgccgctgccgacgacgacagcggcggcgacggcgccacggaggggaatggcagtcgctgctcctccgcagccatgatcaagaaggagatatacgcacgcctgtgccggcccaccccattcgatgggggcaccaaggtaagctaatttatcctctgtaataatgactctcattgagaactgagtttagcacctgccttatatcctgtgctttctgctcttgttgttggcaatacatctatgttcttatttaggttgaagagaggacatcgaggttcttattgataggaataatagcattccttatgtggaagagagggacatcgagtagaaagtagatttgattgtgaattaacaattagtaattgttgagtgagatttgttactttatggtgatattagaattaggatgacttgattgttgagaatctcaaacatcttatttgatatatcggagcgctagtaggatagatcggagcactagtagtaaaatatgaaataatcatatggaagttgaggaattttttttcatgtgtatttggtttgccttgcttgtctatgttggatgatgcttgttcttgcttttcttgtatgtcgtgtttcaatgatctaattgaaaaatatatttgtgtgtaggaattttggatggagaagaacaagggtggtctttgcatatccatttcctcaaaggctatggcaatcacaggcatagatgataggagatattggagtcacctctccacagaggagtccaggtacttccctcatggcttaaaacctcggtgtgaagttcctttagaagttaagattaaattccatgaaactattagtttcgagacctattcaagttttggttttcataggatatttgactagaaagaatgggaataatatcgaatacctctcactgcatggtttattttcctaaatatcctactgtatggaggtcagaaaatttcacttagctctggatacgtgcttattggtgtattggaaactctcgataattatgactctcaccatgctctctttaacttagtgtcaactgctctttatctttgttatcatggccataaatttatttcccctttgtcggaaaatctttcttatgctgatacatgctttcatctcgcacctgtccaacaagagaactcctcttctttttctcaattcaaaaagagcttgttttccataaggtccatcaaagtaataagtacaaacaaactgagaaggctaatctgttagcaagcttattgtctaaactgctagtaacaccctgtgccggttcattcaaaaaacaagaaaaaaaaaagaaactgaactgctagtaacagctcacatctttgctagctattccgcttgagggtatgcttggcatgtgttggtgcttggcaaggtgctagggtccaatagctgaaaactggagccttattttctgtaggcagtgtactctaccaaatatacagagctcgtgcgtacataaggccccaaatggcgcatgattcatttttgttgatcaatcgtgctgatatatgtcatcctttgggtcatttctgttgtagaaaattcatgttgtacaaaatcatctagcagttccgtactaccattgtctccagtccgataatttctgatgcaaattgtatcttcaaaatttaggtccttctatttcattcatcacctatacggtttgatgccaaatgatttctttgataattttgcatagttagtcctctcagatacctccactgggtatatctttttagtcttcactgatgttgccaaataacaagtgactaaaccaatatatttttcaccatacagattccaccatgtcgcgtatcttcagcaaatatggtggcttgaggtggctggggaaattgatttctgcttccctgctggttcatacagtcttttctttcggctccagttgggccgaccgcacaagtacatgggccgccgagtctatggctatgagtcaatccacggctggaacattaaaccgacaaggtttcagctttcaacttcagatgatcagcaagctacgtcgcaatattatctgaatgagccaggaaactggatcctttaccatgtcggggactttgtcgtatcaagttcagatcagttaaccaaccttaagttctccatgatgcagattgattgtacccatacaaaaggcggtctatgcgttgattctgtttttatatatcccaagggtcatcgacatgaggactgcacaatctgcaagtaaattttggaaagccactggatcccgttctcctttttccaggtcattcctgtccaaaagctcaatgtatatatccaaacttcccacagaaaaaatttttgtatgggcgtgaagtcttgatcgatattctttgtagtgttagctaaatcagcaggaagattatagatgtaggtagtgagttaggcatgagtgcttctgtgcttggagttttatctgtagaaagagcagttccatttgttcatcatttgtgtagtgatgtttaggtgataaagtctttcgccgatgttttttgagatttgtacaatttccccctttcttgtacagattatgtcgtatttttacttgtaaataatatgtcagattaaaatgtttatagtttgttctactacttattctacttaactgtgtcttggtggataatttgaggctttgaactgaacatactggtttgctggaatattttattagggggaaagaaggtaagagaaaacaaggacattagttcactttagtctctcaatttatcatcaagtctgaaattcatccatcaactgaaataccaggtataacttatcccctaattcacaatacaatgtcaactttgatccctcgaaagttggtactatagtagccggttttggctgatgtggtgagtggggcccacgtgggccccatatgtttgcgggtaaccgttgtctgcgtcattgtcctcctaccttgcagcatcatcatcacctctctttgggtagatgcgccatcagatttgttggcatctacataagatgatgtggcgtcggacctgcgtgatggtctttcccataaatatgaggtcgcggttacggcctgcgtgtacggggagtcaaggggaaaaccacggctttggttgatggactctgacgatgacgacaacggctctggtggggggccaacggctgtagtgccgcagagtttccaccaccactccataagcgcccgatacaagcttaggatttggcgtcggcaatcctcttggcgatcttgcggaggcagtagttggagctatcatggaatgggttcgacgagttgatgcacttcggccacgatatcccccccccctccccgccgccgccattgtgccctgtgctcaggcttcgagattcggtggaaccctaaaagaaaaggattagcttcgcgtgcgattagggattgagaagctacggtgatggcaatggcgacgatggcaaggtgatgtggtgggcttttccctccttcgcgagctcttcgtgccgggccaccatggccctttcctcgctggccaccccgctccacgcttgagaatatgagagatgggaaagagagggaagaggatggagaagagttggctgctgacacgtgggcacatgtggttcccacaaaccacgtcagccaaaaccgtccattatattgtcgagggaccaaagttgagacggtgttgtgagttgggagatgagctatacctgatatttctgtttagggatgagtttcagacttggtgagtggtgacaacttgagagacctaaagtgaacttattcagaaaacaatagaaaagcgtttcaagaggaaccctatgggcctttgggtgctgggctatgctcagttgggatctagcgggccaactcttgcgtcggaggagtcttgttcactaagaagtgtaatgggcctagcggctctgggtttccaagcttagagttgttgtcgaacacaaaagttgcgcgtagtttttgcttttctacactctaatccttttcttgtctaaataaaagaataaactttgaataatctggcccctttacctcttggacgtatatatagcacatcaagctgcaaacctaaccgttctacaagagattatgctatgcgctttataagtgcgtaagattatcaggttgacaaggccattgaagctgggaaagcgaaagcaaggctcgttagtggtaactcgatcagcacaaggaaattaaagacaagtatggaagcatctcagtggccaaaacaaccttagatgcagtagttttctggcaagcaaagctagctttacactgacgcgggatttacgtggtcgacggcatcgcgctcgtgttgtcgtggggaaacgggaactcgccgagattaccgggccatcagaacgtgcggcaataataatcagacttcgtcttccgcctgatagagtaggactcgtttgtcctggagcggcacacttttctttttctttttgccaagctagctagtgctgcctcctcttgtgcaatgcctttttacaccgggtgccagatgggaacgtacgtgaccatgggacacgactggtagtagctagctacctgtatcattaggagggaggagtagttgttacccaccgagctagctagggagaggagggcgaacctgctcgctctcagtgctgagctcaatcagcaaccgtgttttgactgaactggtatgcaccttgaatgcatttttggcggcaatgatgcatggcagtgcgatgatggctttgctgtgttgaagtcgttggaacactatgatggggtgccctggcacagggcatgccatgccaatgccattgccaggggcagggggctgatactgatatactgggctggctggctggctggctctgacggccccggcgcctccctgtctctggccggcctcacgagcggtggacgttaaatcgccccctgcctctgcctcccctctactgggtggtccaatctcatccattgtgctgtgcttgtgttcagtgcaggttgcttcatgtttggtcttcctgtactctgggccacagtggtctaagtacgcgccggtcgatcgacgtgtcgaccggtgagagcatgcatgcatgagtgcaccagcgatcgacgggattgcactccgcgacagtgctatatacgcatgcagcgggggagaaaaagaaaaggcgcgcgcggtcagtgatgcgacgtagcctggcgtccaccgatctcgtcgcgcgcgcgcgcgcagacatggccggccctggcgccgcaacagtgaccccctcctgatcggtgcaggccgtgtgcctagctagtgtgtgggcatgcatgcagagacggcactgtggcgtggcgtcctccagcgtaatcgatctcacgcgcgactaacgcccctcgcgcgtttcgattccttctccctaataatcatggattgcactctcgcggagcgagagcgagtttaatttcttttaccaccgccccttgtacttgcagccttttgctgccgccggccggccggtcaaggtttgaaagtcgtctagagagcgcgcgatcgatcgagcccgcattgtcattgacccaagaaaaaataaaaccgatccatccgccgcgccatgcacgtcaaagcgagtcgctgtcaccgcgctcgattcgcgcagcaagttgcaccggcgttggccacacgtcgtgcgcgcgtatcacatacgtagtacgtactcctatcctagctagctacgtcgctcgctggacggagccgacatggcgagcacggcgcccatgtcgtcggcacgtcgtttgctgcatgcgcgcgcaggcggccgcgggtcgtcgctagctagctgatcgatcagtcgatctgcaggcgcggctcgagaggcttccttgggttattgaggggcacggtgggcaggaggccagcgcgcagcatactacatggcacggatagggctaagggcagggagcaaacaggccggtac

SEQ ID NO: 7960 - DNA, 7948 bp, Oryza sativa
aggccgccaccgggggagatgggccgagagggattcggcccatcgaacccgggggaggcaaactagacttttgcggagggatttgatttggaaggatttggattcggaattgaactcgacgatagatcggggattgagatcttgagatggcacggacactagacaacaagcaaagaaacaaatttcgcaattagggtttttaggagataattttcccgctaggcgccacgacggaacgggcgctacaaatatcaatcagcaataatcattattaaaaagttggttacaaatgaatgggaagaacaatatataagacgtcatcttttctatgcggtttatagaagatatataaagtacaaaagtccaagagtcctagggtgaaaaatcttgaagtctactaggaaactacttcaaatataatatgcagtactccttttttttaatagatgacttttaaatacgtgtttgaccattcgtcttattaaaaaaagcaaatgtataaggtataaattatacttaaagtagtttaagtgataagacaactcataacaaagtacattataattatgtaaattttttgaataagacgaattgtcaaatgtgtgacaaaaaaaaatctcttaaaagacggaggtaatattgacttggtgaaaaccagatcacgtaaaaacgcccttgttttagcacattatcattgcggcaaagcaaaatcaaggccgagtttagttccaaaatttttcttcgaactttcaacttttacatcacatcaaaactttcctacacacacaaactttcaacttttccgttacatcgttccaattttaacgtgaactaaacacaccccaaatacaaatacccattctaataagattctgtatagattcctatgcatcccacttggccaatttccaaagcgatacaaagtacgtgctttgcataattttttatacaactacgatgatgagctcattactcatactcaaaactaaaaagttcaacggcgagtgtgaatgtgtggctcagagcgaggtggaataaacataacatgtactagctacttcgtaccaagggaatgggagacagatcctgtgagagtgtgagatgcgtctcatcgtccatgcctctacttgtgcttccgctgccaataattctgttcagtgtttgggcgaatatttccagttcatttcgcgcagcagtgagccgtggtggacagcattgatacagcaccgaagtctgaaattccttcccttttcaagttgcatctgccagtagactttctcgtttcagaagcctcgtgagaggatagattaacagagtgttctgtagcatgagctagctgggcgtggcaggtcacgataatcgcagcgccccctaattccagtgtctaaatttatttaagcagatcgttcttcgcgtggtgtgttaatttaacttcagccgcaaaagggttgaaaaaaccgagcgcttagatccgtgcgcgcgggtgcgacttgaaaagcgaagacctgatctgctactcgatctcaaccaccgaatgattgtaagcaaaaacgcgcgaactgaaaagggcctcgacgacatgagatgcagagaagctagctctccttctgaactaaggaaaagatccagagagagaatatatatttggagcaaatcaatgccaggatctcaatgttttataattcatgcagctaggagcgtatgccactgtgtgatggagctaatttgtaggctacagcagcacaactgcacaagtgaacccagtaggcgtttcctcgttggattttgtcaagctactgttggattcatttttggacgatggagatatgttactgttggattcattcacatgcatgccttgttcacaaatccgtcgagaattttggctggtctcgcatcttggcaatttgcaagcaactcgtattcttgagttgtgtagctaaggaatttcaagcaggtaaactgcatgcatgcatttggccactccaaatgagggataggaagcacttctgaacaaatgatgaaagagatgatttcaactgcctgccagcaacaggaacgtggaattatttcattttctcccatacgtatggatcagagagagggagtaggctgttggtgttggagcccccaccgacagaagaatacaatcctcgtcagcaacgctgaaaacacgtcctgctgaagtagaccaagtacattaataattcccccccccccccaaagatagattaaaatgcagttcatcagcgaactttgcaaaccagagtttttggctagtccattaataagtacaaatgtacaatacaattttcttgatctcgcaacgagttcacacaaatcttccttcggaacagagcatgtcaaccatgaattttcggtgagtcggtttagtgaaccaatggatgacacctgctagacatgcacaacagtgacactgtgacagtgatgccacaaacgcgcagtcatcacacccatgtagcagaggtagatgtgttcatccaccatggcatatctggatttttcacattttagtccttttaaaaaacttatcctccaaataaactcctaaaaaaacttattctataaatgattcttttcgcggcgccaatgtcgttggcgccgtgattcaacatgacgacgccaatgacgttggcgccgtcccccccccacccctggatgaaagttaagtcacaaagaagaccagtttgtaaatttttttaaaaggacttatttgtaataaaaaaggacccatttgtaaaaaaataaagtgaattgcatgttggtcttgttattatgaccaaagtttcaatttggaccatggcacatcccaacattttcagtttaaaccagagtcttttaccttggattgcagattagaccaccctatccatttccacatcccgttgtttccactcagccactgcttgctcctaaatcaagttgctgcctgctgccgatcgtctacttcggcactgacattgggtcaagccagcagatgagcacaacaccattaacctgaggtattgagagccgcggggaatggcgttgaagagatgagctctatctatgttgcccctaagcttgagctcgagctccatcagtggccacctttgccagctgcgtgcttgagctctacctccaccttccatgccccatgctcgagctccacttgcaccgctgtggcgcctcaacagccctgccctgaagctactcttttttctcccatgtgttgtgctcattgctcttgcaacaatagtggtagcaggatccggtctagtgcttgatctagtcatcaagctcctaatctagatgcttaagatcgagaaaaacaacagatgggcaactagactgcaaggcagactggaaacggaaagtggagggagcgatagtggggatgggaatgaccggtctggaggaggaagagagaaggggaagagggagagacaccaggtatagctgacatgtgggcctctagaccaaattgcatgctcaagtaactatgtctggttgaaagtgaaaatggttgataacacctagttcattgtgaaacatgggtaagaaaacatagtccaacatgcaattcactcaaaaaaatatttacaaatagatcctcggcgccagcgtcattggcactgaggacctatttgtaaatattttttatttataaataggtcccttttcaaaaaattacaatttagtcctcgacgccaatgtcattggcgccaccccccttcacatttgtaacttaactttcatcggggggctagggagacggcgccaacgtcattggcaccgtcatattggaccacggcgccaatgacattggcgccgcgaaaaggatgatttttagaataagtttttttaggtgcctatttgaagaataagtttttttaaaatggtcaaaatgtgaaaaatctagggcatatgccattcttttacgtgtgatattaccgtggatatatgtatgtttctatatttcaattgggacggcacgtaaatttccatttctcaaaagaaaaagataaggtgacaaactatgcttgtctttaccaacagaggggaacaactccaaagtctgcaaatattcccttggtccattattacccccatgcaagtggataactatactagcagcaggatgttaaactagtgacactagacaaggagaactcaggcccaaagctgataaacaaaatggccagcacgtacttccctgatctttgcttcgatcgcatggcacaagctgataaaacaattcgccatcaatcgccgtctgacattgtttcatctctcgccgcggttcctgatctccggccggtcagaggcagaaaggatctcacctttggatatggcaggggctgggggtcaaatgtgcagtttactataaccgggaatcgtttgggtttatagaccccaaatcctgcggatgcagatacaggctccaacctgtaaccacggcgtcgcgattaggatggctcaactgaaacggccacgtttcttagcatttcgtaggaacacgcactgttcccgcgttaaggtgacgcgcgcgtgatgaatccgggcgtctcgccgcgttgcagcatttgcctacgtgatttttgtatgccggcgttcggtgtgcattatctagtgacattcggcctccgaccctgctggatttggcgataacgaatagacatacgccgctgctgttcatgaattgtctaaaaccgtggaaaattcatatttcggtgagtatatattgtcggccgccatgtccgaaccattacgacgtgtttaattctgccatgatatattatattaggtatattccatatcttttcttaaaaatagatggttgatattgtacagatcctattctaaaacgatatgatactatgcgggtatcagatctagtaattacgaacaccaagtctaataccatgtggataccatgcctaatacccatggtagtgggtgcattatttgtagatggaccaatcaccccattcaccattggagatggcattggcttgggtttgggtttcttgtggaaagtcataaaagagatgcttgtggaagtagtcacatagaaacatcgaggtgcactctgccgcttctgagtatgcggtggagtagtgcatcttgccagcgttggtgacggaagtgttagcttagccactaccattgttgtctgtacttgagagggtacaatcttagacggctcctgcacggggcacaacgtgttgctcgatgcaatgtgaacttgtacgagcagtcaatggagaatgcgcacgctgaaggtgacgttgccgtcgagctccctgatggctttgccctcatacttgctatcgtgttcttgcatgtgatgactataaaggacaacaattatataactaacagaaaaaccattctggtaagcacaactgaactacataaactatcttctaggtgaaacctatagtagtataggatgaaaccaaggagttgtggcattgtcgcgactgttacatccttcagcctccacaaaggtttacactgctagataaaaccggcgatctcttcaattgtctctacggaaacaacataattccagatttatggttgaattgttgattttctagaagctctactggactaaacaaaagattgccacaaagttatacttcaaatctaaggagcactaacatcaatcttgttgactaaggttgcataagcggttggcgctcaacccgaatagagaccatgtcatggttactactctctccgttacaggttataagatgttttgattttggttaaagtcaaactgcttcaagtttgaccaagtttatagaaaaaaatagtaatattttcgaccaagataaatttattttaaaaatatatttaattattaatttaataaaactaatttggtaatgtaaatattactatatttcactataaatttagttaaatttgaaacagtttggctttgaccaaagtcaaaacatcttaaaacctgaaacggagggagtattatgaaagaaggaaatagaagacaccctccaaatctagtatacattaatcgtcaaaggatccagatggtggcgatgcatttaacatgtataaatgacggtggacaacatggaaagcagcaatcaacatgttggcaacagtgaccttcagatagcagtagttgagagccaagccatcttgaagggtttgccagtaaactagcccttcggctctccagtttagttgtttgccgacgctggatccttgagactccattggtacatttatgtcacgccccgaactagtaccgaccggaactggcccgtgacgctccaaattaacctgttaatcgataccagtcctaggaaacagtgctggtatcacaggaagacagaatatcacagcaacagaggtctctttattatagagtaggagtacagtcatgttgggctgcggacagatcccgagctcacaactgcattacaaaaggaaagcggaagccaagacttgggccaaacaacacaggcacgacttgagaactaggccgaaaccctaaaactcatcgtagccggcttgctcctggaagaactcctcatcagcaggatccgcttcatcttcttcagcaactggggggggggggttatttatatagagcaagggtgagtacgggagtactcagcaagccatgggaaataagtgtttaatgcaggcttcaaggaaaggctgttgttgttgcaattgattttatttgaactcttttctgaaaacaactaagtgagtgcttctcaaacgacacggttgagacagtgcgtctcgtccggtcggagtatgtgcaatgtatcagtctttaaaattgatcaagattggcacccggccaacagctttcaaacggccacccggaccaacaactttcaaacggccacccgggcctacaactttcaaacggccacccgggcctagctgatcccatcagctgcagattttccaaacatcgatcccctttccacaacagcaatttcacaaacagtaggcaaacaaaactacgctaggaatctcctcacatccacccatgaccgtgggcacggctgttcgaacagtttgttaacctctgcagagggggtacactttacccacacgacattactaacccggatcacccaacccgtggggatcagccacgtcgggagacctccaagctttcatgacaaggcatttcgaaagccgacacaggtttaccatatgccgacgagaggggtcccagaccgacaacaggttaggtcccagaccatactgtgctaggaagcccaggggtcctccccgacaccaccccgacgaatccacatgtctctcggcatcaaggctcccctgataagctagttactcagccaggggtgtcccattccacccatgtggtcgtacttgtcttatgttcggatgaaattccaaggaaacggtccttaagtgcaagagcgggaaaccgtacacccggtacgttccctggtccgcggttttggaaaattcatttagttcgcaagcaccgacccaggtgtcgggttttccaagtcttttgtaaaacccatgttttacccaagatgtttttcagattttaagtttgaagacgaccgttgatactcgtgcagagtgcacgatttccgaggcgcaactgggtggttacaagggaacatggtataacaattaacagaggaaggatcaaatgcaacaagctaggtaggtgtagcgcccgttccgtcgtggcgcctagcgggaaaactatctcttaaaaaccctatttgcgaaatttgtttccttgcttgttgtctagtgtccgtgccatctcggatctcaaatccccgatctatcgtcgagttcaatcccgaatccaaatccttccaaatcaaattcctccgcaaaagtctattttgcctccccggggtcgatgggccgaatccctctcggcccatctcccccg

SEQ ID NO: 7961 - DNA, 21556 bp, Oryza sativa
tccacaccgccccgccgtcatcgccgtcgtcatcgcctcggcctcgccactccgcgcgcaagccgccaagggacggaggcagagcccctcctccctctgccgcgtcgcccccgctcccctcctccttttctcaaagaagcaaggggcgagccccctttctctccctcctttttccccttttcctcccgctggcgttatcctccctccgccctgtcgccgattggacgcgagcgccgagcgccagctcgcgccttgaccgcccaagtcggttccaaaccgacattgccgcccttaaagcccaggcgccctccctctcttctcctcccatcgccattgttgccaccgccttccgagctctgtctcgcctccgccgttcatcgccaagcgccgggagagccggtgcgttcgaggacgcggaaggggactccgggcgctcgtcttcctcctcttccccggcccgaggccggagagattactcccgcgccgtcggcctctcgtcacagcgcccctcctcatctcggtagtgcctccctccgttcttcctcctcgctccatctcccccccttagttttcggtggtagcacgagtagcctccccgtagctagccggcgccgccccgaccattgctgtcgctcgccgtgtgctcgccgccgtcgccgcccgagctccgtagcacccgctcgtcgccagcctcgctcggcgtagctctgcccaatccgacgctagcaacggattcccgtagccgcgtagatgctctcaccgccgggaattggcccctcgtgacctcgtcgccgtttcccccttttctctccgccggttaccgccgccgaaatccgccgccgatgggctccctccggcgaatccaagccgttggctcgctccctctcattctccctcgtcatcccggtgtacgccccgtcgcccctcatcgtcgcaaggcgtcccggagaaaccgccgccgcccgccgtccattcgtggccgacgccttcgtcttcctccggccagcccgcgtggcagccacgtaggcgccacgtaggtgccacgtcggcgccagctcggtcgagatcgggtcgggccgaccccggtcagcccctcccgtgcgcgcgttccaccgcgagccgtgaggctgcgcgtgggcccgccgcatcctttccactgcgaaccgcgcgcgtgcaccgcgtccctcccccacctacgcgcgtgcgccgtgtgctcgctccgcacggtgaaccgtgtcaccgacaagcgggtcccacccgggaccgcgcgcggtgagcccggtccactggctctctctctcctccctcccgcgcgcgcgcccgacttgggctggccggcccatttagctcggccggaccgctccaattctcttgggccgcgccctagccgcccgagaaaagtctattttccctccctcttttcttttcttttcttttctttttcaaaaaggatttaattaaatcctttttcctttagaccaaaaatccaataatcttagaaattcaatatcttcccaacctaaatccgtttgactccgttcaacttccaaaactcctcaaatctcgagatctatctaatggcacgcttaggggtcattaatagggctttattttcgccgtttgttgagttgtcccgtttcgcgtgtagcttcggagcccgaagacccgcagtgcgaggatttcgaggatcaagctccagatctcgagcaaggcaagccacctttgaacatcttgagcctatatttgaaatttaattatgttgcttgaaaaatattatgcattgataggatcgcacttaatctgttgtcccgtctgcaaggcagattggcggacctacctaatttgttgcatttgatccttcatttgataattgttatatcatgtccccttgtaaccatctagttgcgtctcgatattcgtgcaccctgtgcgagtatcgacggacgccttcaaacttaaaatctgaaaaacttcttgggtaaaacatgggttttacaaaagtcttggaaaacccgacacctgggtcggtgcttgtgaactaaatgaatttccaaaaccgtggaccggggaacgtaccgggtgtacggtttcccgctctcgcacttaaggaccgtttccttggaatttcatccgaacataagacaagtacgaccacatgggtggaatgggacacccctggctgagtaactagcttatcagggaagccttgatgccgagagacatgtggattcgccggggtggtgtcggggaggacccttgggcttcctggcacagtatggtctgggacctaacctgttgttggtctgggacccctctcgttggcatatggtaaacctgtgtcggctttggaaatgccttgtcatgaaagcttggaggtctcccgacgtggctgattcccacgggctgggtgatccgggttagtaatgtcgtgtgggtaaagtgtaccccctctgcagaggttattaaactgttcgaacagccgtgcccacagtcatgggcggatgtgaggtgattcctagcgtagttttgtttgactactgcttgtgaaattgctgttgtggaaaggggttcgatgtttgaaaaatctgcagctgacgggatcagctaggcccgggtggccgtttgaaagttgttggcccgggtggccgtttgagagttgttggccgggtgccaatcttgatcaattctaaagactgatacattgcacaaactccgactggacgagacgcactgtctcatccgtgtcgtttgagaagcactcacttagttgttttcagaaaggagttcaaataaaatcaattgtaaaaacaacagcctttctttgaagcctgcattaaacacttatttcccatggcttgctgagtactcccgtactcacccttgctctatataaataatcccccccagttgctgaagaagttgaagcggaacctgctgatgaggagttcttccaggagcaagccggctacgatgagttttagggtttcggcctagttcccaagtcgcgcctgtattggttggtccaagtcctggcttccgtttcccttttgtaatgcagttgtgagctcgggatctgtccgcagtccaacatgactgtacctctactctataataaagagacctctgttgctgtgatattccgtctccctgtgataccagcactgtttccagggactggtatcgattaacaggttaatttagagcgtcacgggctagttccggtcgggactagttcggggcgtgacagtaggtccgccaatctgccttgcagacgggacaaagagattaagtgcgatcctatcaatgcataatatttttcaagcaacataattaaattcaaatataggctcaaggtgttcaaaggtggcttgccttgcttgagatcttgagcttgatcctcgaaatcctcgcactgcgggtcttcgggctccgaaactacacgcaaaacgggacaactcaacaaacggagaaaataaagccctattaatgacctctaagcgtgccattagatagatctcgagatttgaggaattttggaagttgatcggagtcaaacggatttacggttgggaagatattgaatttctaagattattggatttttggtctaaaggaaaaaggatttatttaaatcctttttgaaaaagaaaagaaaagaaagaaggagggggaaaattagacttccctcgggcggcgagggcgcggcccgagagaaaagaggcggctcggccgagctaaatgggccggccggcccaaaaggcggcccaaagcgcgcgcgcgggcggggaggggagagagagccggtgggccgggtccatcccgcgtggtcccgggtgggacccgcttgtcggcgactcggctcaccgtgcggagcgagcacgcggcgcgcgctagggttcggggagggagacgcggtgcacgcgcgcggttcgcggaggatgcggtgcggcgggcccccgcgcagcctcacggctcaccgcggaccatgcgcacggggggggggggggggggaaacggagggagcggctggccgggtcagccgatctggtcgcggccgaggtggcgcctacgtggcagccacgtgggccggcgggaggtagacgacgacgccggccagaacggacggcggacgacagcggcgagcggcggagcgaaccacggcgatacaggcgaaagcgagcacaccgggtggttgcgcgagacgaggggagacgagccaacggctcggattcgccggagggagtgcgtcggcggcggattgcggcggcggcaaccggcggggagggaagaggggaacggcgacgaggtcacgaggggccgattcccggcggcgagagcatccacgcggctacgggaatccgtcccttgtgccggattaggaggaaacgcatcgagggaggccggcgacgagaggcgcttccgagctcgggcggcgacggcggcgagcacacggcgagcgacggcagcagtcggggcggcgccggctagctacggggaggctactcgtgctactacccgagtctaaggggaggagatggaacgaggagggagaacggggagatgcgctaccgtgcgggacggggcgtagtgacgatgggccgacggcacgggagtgatctctccggcctcgggccggggaagaggaagaagagggcgcgcccggagtccccttccgcgcccttgctcgtgcgggctcctccgacacgcgcgacggcgaaaggcggcagcgaacagagcacgggaggcggcgacaatggagtggaggcgagagacgaaaacgagggagattggaggagggaggagcttgggtttataggggcggcaatgtcggtttgggagaggggaaccgacattggacggtcaagcctgcgagctggcgcccggctagcggccaatcacgacgacaggaggtgacgccggcgagagggaaaaagggagaaaaggaagggagaaagggagcttgtcccttgccactttgggaaaaggaggagggagcgggggcgacgtggcagagggaggaggggctctgcctccgtcccttggaagctagcgtgcagagtggcggggtcgggttgatgacgacggcgatgacggcggggtggtttggagcggggcgacgacacgggcggtaggcgcggcagaggctgacggcggcggcgaccaggcggtcggccaccacggcgcgcgcgcgcgggaagcaacgggcggcgcggcgatttgagcggcacggcttgggcacgcgtgctggctcgcggggccgagcagctgcgcggcagggcagcggggccgggcggcgcagacggcgcaggcgcggcacgggcgatgtccacgcgggcgcgcgcacgcgaacaacggcgcgcgggaagcggcagcgagggagcggagagggagggctcggctcggcgcggctcacgcgcacgcgcgcgcggcacgcggacagagcggagaagagggagagagagagaacagagagagagacagagccgcctccctcggggtagatgggccgagagaaattcggcccatcgaacccgagggaggtaaaatagacttttgcggaggaattgatttgggaaggatttggattcgggattgaactcggcgatagatcggggatttgagatctgagatggcacggacactagacaacaagcaaagaaacaaatttcacaattaggatttttaagagataattttcccgctaggcgccacgacggaacgggcgctacaatttagcatgagcactagcttcactagatatccactatgtccaattaatgctcactgctattgaatccacctttccgaggcccaaccaccaacggagccgatgactctgagcacctctaccaaccattttgttgcctccaagcagtagcggacgcatatatcagttcaaaaccacagtgggtcgaatgatgctaaacaatcaatgagtgtaagactctgtttagatgggctaaaactttaagagcaatagaacaaaacacatatcatatttatatttcaatcgcatactgtctcaatcattgtttgcgacatgcatacgttgtgaagagacggactaatatgttatacgttcacaccttgttatacctaattttgatggtccatgactactgtaagggggtagggggtctcgagggtgtggcgacacaggtcgtagctgtgttggtcgacccaccctgactaatgggtagattggtccctgcctctaagatcctcctccctacatgtgctgcatgtgaggctccaaatatggaccactggctcctgtacaacacacaacatcgctccgccttcatcacaaggacaaaggcgttgaattccagctatccctcaagctatacaaatggaaataatcctactagggcatggtttagttcccaacttgttctttaaacttacaactttttcatcacatcaaaacttttctacacacacaaacttccaacttttccgtcacatcgttccaatttcaatcaaacttctaattttggcgtgaattaaacacaccctaggaagagatccaaccatgggagggacccaactaaactaaaactagcctattagataagtttttttttgaggtggggggatttgatagtgaggtcaataaaagtatatacatgtttggtggaacgatttcatttataattttgtactgggacggatttcattccgtacacgatctcaattagtaaaaaaagaatcttcaaaaggcctcatgatataaattagaaattaaattatgatctcgtctataaataaatcactccacaaatatatatacaacgccaacttttagaaaaaaaaactggttggaatatgattacatattttaggccttcttgaaacataattttttatacaatgtttataggaaatagtttagttcccatagtccaaaggacgtctcacatgcaaatgcatcccccccccctttcatgtgctgagcaagctcctcgcacgcattaaacacaataatttattttgtaattctcttataatttttcatggctattttaaaagcatgcagaaatgattaataatggttgaagcagcagagatttaaattgctgaagcttgccagcaaatctcccaagtcatcccaaacttcctggagatccaacgtaagcaacgtgtcagaaaactcaaacatatgcatggtctaaaatattacttcaacatcggtattgttgagaagcatgtgcaaattcagtaaaacacggccaccaacatgatatacttgtcaattcaactaaggtttattttcgccatattctccagtcaaatggtcgaatgcctgctctaagcatgagtgttacactcatgcaactggtcaaagtgttcgcactagcactcaacgtacatatactctgtacgccacctgcacgacacggccaacacagtcatgtgcgcttaggctgaagatttgtacaaatgcatgtatagacgataaatgcagaaatggaattcaatcaaagtgtaattaggatatcagcaacgacatcgcccaagaaatttctctataagtatatatatcaccatatttatgtggttgggttcttcctgggagatggattttcaaaaaaaaaaaaaaatcataactggcatacaagagaaaccagtggacatcctcttgaggaacaaaattacttttccgtgctggttcttaaggggccatcatcgtttccgtttctacccagagaagtacgttcttccggcaacaactataacacattgtcatcaaatttcattcaaaacaattcgtcgatttccttgaattggaagtgagattaatggagatgctagctcgacacgaatcaccttttggtccttattgaagttgaagtgctcgcctccaagagctataggtgcatcacataaagtcatgaactgcgtacatacgcagggagtctgagtggctgaacaagacaacaagcatgagcatttcctgacagaagatcttcgagtggatgataagttttgactgtaaagttcagatggagctagctagctagctactctagctgcttgcactcacaatctcacatggtactggtaggaggaggcaatagcgatatgataatacgaatgcctctttgactaccagttggaccagcaacaggctacgacccttttctttttctcatcaggcaccatggatctccatcggttaaagttacttggagactgagcgatgcaagtctcgcaaaactcaccagagagacaagcaacaatatgcacaagatggattctaatcgatctctcgggtgcatgatgactagtagttgtacgaactggaactgctcaactgcatcgaccacctaaaagcaacacgattgtcgttaaaccaggctgggctattaggctactccaacagagcgcgacagcgcatgacatactgagctgtcaagttttggaacttacggcttcaagagcgacaggtgtttcctgcatcaagctttgatgcttggtagatatagagcaacatgcctgtagacctgcagatgttgcaactcatgtgacatggacaagtagctgggctctaggcagcatctgctctcctgtggattactactaccctacgtaccaccctattaggcgacactggatacattgccatcgatctctatgtatacgttgccgccgaatgcgacgaagctgccaggctacgcgtgcaactctcatcactgtgaagttgcattcattcaggcttgcaggaagctcgtgcagtggcaatatgcaggcataactgtatgtatggcagaaaaaaaagcttttactcagggaaatgagacatgctatgccagcagagactgtctgtgtaactagctacatcctcatggctgacagtgtgaaaacatttcgatgcgttattccggccaggttgtccaactatcaaaacacgcgacaagttgtgcaaatcgtggcgtatatagtacaatactattctctctgtgggacatccacctagccagataagtatcagtatgactgtatgtgcaggttggaggagtggccaatgcaccctcacgcacacgaagggacgttgtacactagctcgtttactgtacgagcaagttctcatgccacgctagacaagcacatgcatgctttcccctcgatcccgaacggcgggatacttgcttgggtctgctgcgagattcgtcaaagtaaacctcggatgcatgcgtgtacgagtacgatggaatctgattttgtacgtaccaaccgcagaaaacaaatgcaatctgtgggcgcccttgcatgccatggccccacggcctaagcaaaccgctggattttgagcagtagagaaagctgtgtgctcgttgcattcgagtttttcttggtctcccgtcgcaagatggatttagaactttttagacgatcaggcgagccgtgccgcctgaaactacctgggcttgactgtgccgagtgcccagaagatgtgtttcctgccctgtcccgctgcatcagccgtatcgcggtgcaaggtttcgccgggcgcgcgcggcgcggcgtcgactggtcgaggcgcatgcgcaaacccagcaaaatttgggcgggtggtggacacggcatccgcacaccgcgcggtcacacgcgcgacctgcaagtcagttggcccatgacaccctgtgcttccgcgacgcgctcgatcgggaggtcgggagcaggatggtgtgtcgcgcgagaaggtttgcttccacaattgagcccacgaggcacgcgggtagagttcttttcgtggggcgccgttcgcgtgtgacacgcacgcacggagtcccacagggagaggggtacaaactggaccgaaactcgcaaggggatgaacaaaaaaaaacagggcctagtaggcctggagcaaagaagaaaaaggttcaatgagcctggagctgttgtatgtcaactgcgaaaaagaaaaagggcctagtgcagttttattgtccaatgcacaaaaagaagtggatgttgctgcccaggatcgaactggagaccttcagtgtgtaagactgacgtgataaccactacaccacagcaaccgacttgtttgcaagtatcacaaacgactacaagtaattgaaggctactgtaacgtttcatctctcagatttcgcattattgaaggttactgtaggtgctttatgtttttataagaaagaatagtgtcctaggacgctttatctaagacgaagaaaagcatgcgaagcttaaatagaacaatattttgaatccaaacttgaaaatataaatagaaagagaaggaccatgatgaatatatgaaatattccctccgtttttttaatagatgacgccgttgactttttcgcacatgtttaaccattcgtcttattcaaaaaatttatgcaaatgtataagatataaatcacacttaaagtactatgagtgataaaacaactcataacacaataaattataattacataaattttttgaataaaacgaatgtttaaacatgtgcgaaaaagtcaacagcgtcatctattaaaaaacggaggtagtacattaataaccaagggctgcatagttgcatagggtccgaatgctagataaaggaggtgctctagcttcagatgccttagattttccaccctttgttccaataatactttttgacacagtctgaaactgaagacacacgagctgtttatttcatagttacaatatagatatcatacgcaacaagttattgggttcacaatttctttattattacaacagtggaatatccaataggtatattaagtctgaggaactagttggatgtgatagccttgagggaacatgatctctgatatgcgcagtacttcccctccttcaatctccgtccaactaaacggagagttcacccggcaaaagaaaagaaacagagttcaacatgtatgtcagtgagtttttctaagactatatcagtgagcatagcaggcaacaaacgaacatcaacatgcgtatgtacctatactcggtcaccaagatgtggaggaagagtgcaatgaaaagcttgctaaactctgccccgagacacagcctgacgcctcctccaaatggcatgtaatttttcagcatcgagcttctcttctcctcctgtatttgccatttgcttcagtgagtcagatagaaacattgtggtaaaacacaacacaagtgaagaccaatttaacaacaattcatccttgaatactaatagatcaatattgaaatgtgtcttccactaaccctccacctccatggatcaaatttaagtggatcctcgaacaattttgggtttaggtgaactgccatggggcttatcatgactaaccacccggatggaattgtatatcctgtgtaaaaaccaaatattataataaccatttgtatggcctgatgtgattctcatgagtaaatactatgctatatgcacaatatattatcttattgtttgtgttagaagtttacctttcacttgcacatctgttaatgttttcctgaaaactccaggtgtgacgttactaattcgagtaatttcattcataaccttcaggtaaaacaagctcaaatgagttaacaaaagcaattgccgaaatcatcactatggcaccaatgatgcttcaaacataagcggacaacaacgtgaaatcacctgagtactgaatttcaaggacctgtactcctcccatgtgaacccggaattcacaccttctcgcttctttagaattgtcccgtgctcctcctagaatgatgtgttaattttagaattcatccaatatttcattatttgtctcgaacataaactacccgcattaaaaaaaatacagaccttgagctcttcaacaacttttggattgtcggttaggtacttaaaagctacagtcaaggttgatgacagtgttgcaaagctcgtaaacaagagcgcagcaagtgcgtctatagcaaagttttcatcgatcattggcttttcgctctgtagctcttcaacaatgaggtctacaaggtcaccatacttctttccaggtgcacttagcctctctttcattatatcagtaagtgtgttccgcacatttctcctacccttcattagggaacaaaaaaatcaggacaactgaaacaagtaatctagaagaccagtgtcctagttaatattcaggacatgtatttctaatgaagtagatgagtataccctgattaagctatttggacaagtaggaaagaaacccgcgcagatacacaggaaacttatttattattcataaaaagaatgttaaagaagtcatatctcaccgtatttactataagaactttaaattatcttataacaataaaagaaaaaatatctctaccataaaatagaccataaacattgatatcttaaatgataataacatttcttatattcaaacattttgtcctggttatatgtaaactcacatattaccactacttattacttgttttcaaagcaggatgcatttttaatagatgaaactatatatgtaaaaaaaaaacacctagtacatcattaatatagaaaaaaatatctctcacctatgtctaaatctttgtgcaaatatttaaaaatacaacaactaccaattaatgggataaacccattaaaatgtgtataaataccgctctaacggatgaaaccgagggctttttttctctgatgccttgaaacatgagtctcgcatcaatggagttgtacccctcgagattagcgtggattataattttaacgcctaactcaccattggcacactgataaaagattgcattgttaagtaccctggttacatcttattggggccactcaacttaagcatatgcatgcccttactatacttacgtcggcgtagaaaatttcaatgcaatcccccctggcccccggcccccggcccccgcccacacacacacacataatgcatttgtcatccacctagtaaactctaatacattgattgttttaaaaatagaaaatgaagaaaaatgaaaaatgccttatatttgaaaagtgagggactacataaattcaaattgtgaatagctggttcttggatggttttgttggtattgattctgtaactataattttgtagatgagtttgctacctgggtctaaattcagtgcccgtttgattacacgcgtgttgtgtttcatccaaatcttcttgtgacttgtgagatgggtcgctgtaatggatcgactgcatgtgctgtcacgcttgatgtggagaatgctgaacatgatttataattttgcagggtaggctaagatacattttttttgccgggtattccttttttttctggcgttttctctctcccacatacacgagatctagagggatatgaggaattagttccatagatctaatctaatgcatggttgaataagatggatccaccaatttaagtgtaaatcaatggtttagatattttttagaacttttctaatttattagacacgcgtgacgtcttagtagcgtttgtaggagtttcacatgatggcatgagagcatttatagtaaatttaatggacttttagtatataatagaggatacaaatacctgcatggatcggtagaatgatgtccctggaaaatatattgggaaggaaaccatcccctgaaagaagtcctgaaagttctttctcaattctcttgagttggtgacatcgagtccgatcaacttcttggcaactaggtcaaagatcatctgcaaaatacaattcatagtaaaacaataggaccattttgtgagacagttaaccggagataatctaattacagtgcgcactttgcgttcttaattatctaccatttattcatattagacatctatagatccaacaacattagaaatgccttaaccgaaacatatatccatgtagcgtcgcatagttttgcataaatgcagttgttaacttacgtctgacacgccgtcctgtacctcgacgctgggtttcccagtccatgatgcgaagctctccctcatagagttttctagctcaggaaggagtgattctttcaggttttcaaggccaaagagcttggccgcgacaccccggataaacttgtgaatggttccgttgtatgtggtgaggctcttcttgccaaagatattaattgcagtttctggataccaactttggaacaatttaccctcttgttgaaatatgaatcggttcacctctgggtcaagggaaatgatcactggccgtccaactaagctagtcttgaatagaggcccatacctgatgatcaagcgcaaaaccagcatggcatagaacttagatttgttcatatttatagaaagtgtgttgttcgtatcaacaacgtgcatatgtttgttgcatatttaagtagaacactggtactaaaaagttatcactaacctctccagtctttgcttgtagtagcttggcatgtctattgatgggcttgctctgaagaactggaaggtctcaccaataatagggaagcccatggagccaggaggaagcctcccaatgcatggaggattcatccatttgtatacccagtgagctaaccatcctatgatgagtgtgacaccacatagagctgcatatgaatacgatcctagcaagagctcagacttttccatgtcctagctaactagtgagcaagtatggaacaaggcttctagcttgcactgctgcccacgcagaggggaggtatctagatctttatatagcaattgtcacgtgtactattagttgactagtagaattttacttcatgcaagttgcaggtatctatgaagaaaatatattccttcccatggattgattgctctcctttagtgattggataattgagattgctctatacataatatgtcattgatcgagtttgtcaatgatttctactccatgccgttagacagaatactttttcacgagagcctcattacggtgccctctactagtaataaaaaacaatatgaaccgttgtagcgcccgttccgtcgtggcgcctagcgggaaaactatctcttaaaaactctatttgcgaaatctgtttctttgcttgttttctagtgtccgtgccatctcagatctcaaatccccgatctatcgccgagttcaatcccgaatccaaatccttcccaaatcaattcctccgcaaaagtctattttgcctccccgggttcgatgggccgaatctctctcggcccatctccccctccctccccggcgctctctctctctctctctctccctccctcctccgctctgcccgcgcgccgcgcgcgcgtgtgcgagagccgcgccgagcgccactccctcgctctgcccgcgcgtacgcgagagccgcgtggtcgccgcccgtgccgcgcctgcgccgtctgcgccgcccggccccgctgccctgccacgcagccgctcggccccgcgagccagcgcgcgtgcccgagccgcgccgcccgttgtttcccgcgcgcgcgtgccgtggtggccgaccgcctggtcgccgccaccgtcagcctctgccgcgcctgccgcccgtgtcgtcgccccgctccaaaccgccccgccgtcatcgccgtcgtcatcgcccggcccccgccactccgcgcgcaagctgccaagggacggaggcagagctccttctccctctgccgcgtcgcccccgctccctcctccttttcccgaagaggcaagggggcaagcccccttttctctccctcttttcccctttttcctcctgccggcgtcatcctcctccctcctccctgtcgccgctttggccacgaccgccgagcgctagccctctcctttgaccgccctaagtcggttcccaaaccgacattgccatcctataaacccaagcttccccctttcctttcctctcccattcgcctccacgccattgccgccgcctcccgtgctctgttcgccgtcgccgttgtcgttgcgcttgtcggaggagccggcacgagcaaggacgcggaaggggactccgagcgcgccctctccttcctcttccccggcccgaggccggagagattactcccgcgccgtcggcctctcgtcactgcgcccgcccgcacggtagagcatctccccgttctccctcctcgctccatctcctccccttagactcgggtagtagcacgagtagcctccccgtagctagccggcgccgccccgaccgttgccgccgctcgccgtgtgctcgccgccgtcgccgcccgagctcggaagcgccgctcgtcgccggcctcgctcggcgcagctccgcccaatccaacgctagcatcggattcccgtagccgcgtagatgctctcgccgccgggaatcggcccctcgtgacctcgtcgccgtttcccccttctcccgccgccggttgccgccgccgcaattcgccgccgtcgggcatcctccggcgaatccgagccgttggctcgtctccccttgtcctgtgcaaccacccggtgtgctcgctttcgcctgtatcgccgtggttcgctccaccgctcgccgctgtcgtccgccgtccgttccggccggcgtcgtcgtctacctcccgccggcccgcgtggcagccacgtaggcgccacgtcggcgtcagctcggccaaaaccgggtcgagtcgaccccggttagccgctccctccccgtgcgcgcggtccaccgcgagccatgaggctgcgcgtgggcccgccgcatccgcgtcctccgcgaaccgcgcgcatgcaccgcgtctctcccccatcctagcaccgcgccgcgtgctccctccgcacggtgagccgagccgctgacaagcgggtcccactcgggaccatgcgaggtgagcccggtccaccggctctctctctcctcccctcccgcgcgcgcgtgccttgggccgccttgggccggccggcccatttagctcggccgagccgccccttttctctcgggccgcgccctagccgcccgagggaagtctaattcccctccctcttttcttttcttttcttttctttttcaaaaaggatttaattaaatccttttcctgtagaccaaaaatccaataatcttagaaattcaatatcttcccaaccgtaaatccgtttgactccgttcaacttccaaaattcctcaaatctcgagatctatctaatggcacgcttagaggtcattaatagggctttatttttgccgtttgttgagttgtcccgttttgcgcgtagtttcggagcccgaagacccgcagtgcgaggatttcgaggatcaagctccagatctcgagcaaggcaagccacctttgaacatcttgagtctatatttgattttaattatgttgcttgaaaaatattatgcattgataggatcgcacttaatctgtttgtcccgtctgcaaggcagattggcggacctacctagtttgttgcatttgatccttcctttgttaattgttataccatgttcccttgtaaccacccagttgcgcctcggaaatcgtgcactatgcagagtatcgacggtcgccttcaaacttaaaatctgaaaaacttcttgggtaaaacttgggttttacaaaagacttggaaaacccgacacctgggtcggtacttgcgaactaaatgaattttccaaaaccgcggaccgggaaacgtaccgggtgtacggtttcccgctcttgcacttaaggaccgtttccttggaatttcatccaaacataagaccagtacgaccacatgggtggaatgggacacccctggctgagtaactagcttatcaggggagccttgatgccgagagacatgtggattcaccggggtggtgtcggggaggacccctgggcttcctggcacagtatggtctgggacctaacctgttgtcggtctgggacccctctcgtcggcatatggtaaacctgtgtcggctttcgaaatgccttgtcatgaaagcttggaggtctcccgacgtggctgatccccacgggttgggtgatccgggttagtaatgtcgtgtgggtaaagtgtaccccctctgcagaggttaacaaactgttcgaacagccgtgcccacggtcatgggtggatgtgaggagattcctagcgtagttttgtttgcctactgtttgtgaaattgctgttgtggaaaggggatcgatgtttggaaaatctgcagctgatgggatcagctaggcccgggtggccgtttgaaagttgtaggcccgggtggccgtttgaaagttgttggtccgggtggccgtttgaaagctgttggccgggtgccaatcttgatcaattttaaagactgatacattgcacatactccgaccggacgagacgcactgtctcaaccgtgtcgtttgagaagcactcacttagttgttttcagaaaagagttcaaataaaatcaattgcaaaaacaacagcctttccttgaagcctgcattaaacacttatttcccatggcttgctaagtactcctatactcacccttgctctatataaataatcccccccagttgctgaagaagatgtagcggatcccgctgacgaggagttcttccaggagcaagccggctacgatgagttttagggtttcggcctagttcccaagtcgcgcctgtgttgtttggtccaagtcctggcttccgcttcccttttgtaatgcagttgtgagctcgggatctgtctgcagcccgacttgattgtactcctactctataataaagagacctctgttgctgtgatattctgtcttcctgtgataccagcactgtttcctggtactggtatcgattaacaggttaatttggagcgtcacgggctagttccggtcggtactagttcggggcgtgacaaccgttgatctcatttgatcgaagggttcagatctatttatactactaccccagttaacggtagtacaaacgtggagggacattattgtcaaaaataataggtgggtataatcgccatttaacagtgagtatacttttttcctcctttttagctttttcgatgaaatatgagtgatgttggcgcaataaatggtcatagatggaattaaccgggaaaaaacataaatgacaaagtaacctctagtcatcgtgttagtaaattgctaatctatcctaataatactagtagtataacaggtagagagcatctgagcatcgctatttccaaaaacgtgcaaaatatatttatagacataaaggggtggtgatgactcctttttgaagagaaggggttaggggtggcaactaattggcccaacccttacaatatacgagtaggagtcggtaaaagaattctggctaaggataacctggttcattaggggttggaaaagctgaaatgcattctacttttggtatgaaatccattacctggtagagtcgatgtttttttttctactaaggaatttattgatggttaggatgacagcaattctgcgggtgttttgcaaaatttcaaccattattatttgatgcaacctatataagatggctgtatttattcttccccaattaacttgattttttttctaggggttgttttaattagtgtaggcttcgcaaataaatatgtaggtaggtagataagattgggaatacaccgattgctacaaacgaggccatgtttaggtcaggagtgaaaagtttttgcatgtcacatcagatatacagacatatatttgaagtattaaacgtagtctaataacaaaataaattacagatttcgcctgtaaactgcgagacgaatttattaagcttaattaatccgtcattagcaaatatttactgtagcaccacattgtcaaatcatgacgcaattaggctttaaaaatttgtctcataatttacacgcaatctgtgtaattagtttttttctatatttaatactccatgcatttgtccaaacattcaatgtgacgggatgaaaagtttttgtttgggaactaaacagagcctaaatcagcatgaagaatacaagtatcgaaaaggaatgcatagtcaactatgaattcgagtttcatgcagtgtgactttttagaatttagaatgtctcattttccttaattaccagctcgattttgatattttcttttcatgagaaatcacgatatttatgcttttccttaccaattataatatgtgtatagattgacctttgattcagttcgagctaaaattattattgtttaatcttttttggggagagggggactattttcatagcttcttttccaagggtacaagcgcacaataacttgcacaaaagctatcacattaaagaaaaattccttgacgtcgtctagacagccctggctgaatcctcccagacttttctcccagacttttggtgcaagcgcgctctctagacgcatgtcctcttgtgttagcgtcctagcttacgcaagttggccatgtcggagggtctagaggggagagcggttccatccttctctctcacctctctctctctcaatcccaaagatgttgctagagttagggtttggtttcagttgttagggataggttcgggcgacctcggctgtagttcatttgttggcctagcggcggccggtcacgcttagcgatggctggtttggtgctagccttctcccgggtttgtgtttgatgtcgtcggtgcgtggagaaatctttgtattttttttcctggttacgacctcccagggttgtaatcttatattttttccctgctctatcaatatgaacgttcgcactgtctggtgcgagtcgttcaaaaaaattccttgatgattgttgcaaaggatgctttgcccttgtaaatgatgccttatttgcccgcggtgagtcactgacatgttattaagagtgagggccaaataaggggttgagttaacttttaggggtgaataaagattttattccttcaagtaacatttttctgggtgaaaaccatatctttcttagattggcgatggcggtatccttgatgtcgtgacctccatggtggcatcgttttcggagtctcgtccctgtgatgctgtcgtaggcctagcggcgattagccatacttagcgggggtcatttttggtgctaggctccactctcagttgtttgtgcttgtgtggttagcacgcggtgtttggtcatgcactttggtgcattgtggtgttttttcttgtaacttttctccttcttaatatattcgaatagcctccttcagccttcttggtgaaaaaaaagcaacattttttcagcattttggcattcaatcgttcaaattaactgcaatcaggagcagatctagcgtgggtgctcgagggactcgagtcccctagtccccaacccctacccggctaaatcactattgataaaaggagagatgggaggaggaggaagaacagagaggggaggaagagtaagggacattgaaggaggaagaaaaagataagtctctctccaattttgttctagatctgcccctaactctgattgaattattgacttgagagttcggaaatagacatgcaacggtaccactgttttcgaaggatgcattcacctaacaacccgtttgaattgg

SEQ ID NO: 7962 - DNA, 40153 bp, Oryza sativa
tttccttgtaactcaaaagaacttgaatttttttttaggagcagagtattatgtgatcaaaatgggatcaggaatgcctaatctgaggccatgtatgcacaaacaggtttgcagctgggttggtcagtgttttcaagggagtggacggcaacgctcattgcagctggtgccactacctcacctgcgtgccgacatccagctggaaatgcgacaaatgaacaggagatcagtgacgcattagcatgccatgcctcccacttgtcactgcaggggagagaatgccaccctgctaagagggaacaatcgagatacaatagatattgtttctgtttgagaccacactgtaaaatttttacgctatatagaacttcaatattgtccattcttacctatattcttctgtgaagtgttgatcagaaatctgcttgtatatgctgaaccatgtaaccctctgctctcttacctggtcaagtagccagttcctgtcttaaaaaaaaaggcctgtcccatttgcaagttaagactaaaaaaaaaatcagcatgtcccatcagcaagttaagactcaaagacagatcacttgaagaatgaatcatttcactagctcaatgaattcttgtgataaatatgcgtgaaagatgaaacatatatactccctccgtccctaaaaaaccaaccaacttctggtggacgtagacagccataacttggttttttttaagggatggagggagtacttgacaattaaattgtataaggatttaacgcaatcccttatgcgacttgcaataatagttgatcttgcgggatgataaatggatgcagcaaccagcgatagagcaaactgaacaaccattttcacaatacatacattctataacatcaatcagaagtatgcagggagagccacaaaatgtcaagaattacaccacacttctatgcacctaactcatcgctgaagaacaaaaatagatttcagaaaagaaagaccaccttgattaatctattttcttgctaacctgataggtactgaacacccgtcacccatccccaaaagctcaaaatcaggggactgagattgtaaaggaagtgttcaaaacacgggtagaaattgaattataactaagttaatggtagcttccaaaatgttttagtagccacaagaattttctctgtaccacctgattcaggctcactgtcatgcacctgaacagtccaccgaatcgactgagcaacctgcgctgccttgtcaatcacatctggggagtctcgtacaacagcaattccttctggacgcagaatgcgatccatctccaacatgacatcaaacaggtcacatctaagaaagaaatggaatcaggtagagctctttttacagttaagtcggcatatggtacacgtcccatcaaaacaaagataaaggtcagtaaacgtgttgcatactgtattgtgtgggactggggagcgacaaatttacttttagaaactttcaatcctctaaacgatattaatagttaaaaactcctgcataattcaactactaattcatttacatgataaatcataaaatgtgctaagaacaggcaataagggctgatggagatatatactgcttgggccgaacatcttaaattggtgatgataattttaacatgatgtttcttggttatcattctactctgacttttcagcaatgaattagaccactccaaaagatgtagggagaacagaacaagttaagaatacaagatcatgagacaatgatagctaagtttatgggtggtgtacctgctcttgccagaaattgggtctcttatcaaagagttgattctatcagcatgaatgagatcataggtacgaggataagttgagaaaggctcacacctggaaccaaaggcatatcataataattatattaatcagcatgcaagcattaaactattaatctattccatgaacaaatcctcaatatattgattcgacagacgaatacatgtttcttggggaaaaggtcttgaaaatttatggatagtgcaacaataaatattgcaggaaagtaccataaaagccacagaatgcatgagatctattaagatatacaaatatccaatatatccaatgaatatcaatactactcaaaactcaaacaaacagttcattgtgagtggtagaacaggtctgagcatatgtaaattgcctgatatctttggtatttaacttacaaacaaaaatgaatttgaaagaagttgcaaaataactacaatcaataagctgcaaaggagtatgaacatgctctttttaaaaaaaaaatagatgaacatagtagtttatattgagaaaagttgggattacaataaaacatatcagcagaaagatattgcaaatttctgtaatagtaagtccttaccagtcatgataaactccaataaggcccctgtcatatattactccaagtgtcaatggtttttgagcaggaacaacattcataacccatacaggatcagagacagcagcagctgccaatcctccaaggtatgcattcatgtccatcacattacgaattttggcagtcccaagcttcacgcccagtgatttcttataaaatgatacccttttgacccacttctgagtatctagttcaaacaagtttgctccgttgtccattagagaggctctagcagaaggtttggataacctatctggccacttcagaatggaaccaacagctatttcatctgccaaagaaactttactgacacatttcttcaacttgaaatacctgcatggtaaaccatacaagcaaacatatgaaaaatgtacaagagactttctcgtatgcttttttttttaaaaaaagtacatatatttgtaggcacaacaaatataattggcgcagacaagtattaccatgcttgatctggatcatcatcagtgctacacaagtcaatgttaaatccattttggttaggtagacatgaagcttcagtaggtttcttccaaattgcagtgttaccatctacagtgatcaacttgtaacaaaaagccagtgccatttcttgaagttcagcccattctttctcttgcttcttccactggactgggggtcctgatataatcaagtaacctcctggcctaagtagacggtcgacttcaatcaaatagctcccatctgccagtatatacaggtaagagacagcatttccacgaaccatatcaaacactgaagaaatggtttacttactgtaggccataaaaggtatcaaacaccgggagcaatgaacgaaatcaaaagactgtgcaggaaatggaaggcgcctcgtgcccagcatcaaaagaaatgcaggaattcctctctccagagcaaattgtatttgagatttatgtgaatctcttggggcaaaagagagtgtcaagatattctctttaagcaaaaacccaccaaaactagccaccttcagagaggaaagatcttaataccataccatttctttaaaagtaaaacataaattgattcatgtgaagatttagcttattaccccacatcccatatcaagacccgtcctcaggagaccactttttagcggaacatactgggcaagcttttcaatatattgttcagctccatcgggaaacatagttccgcctccaggaaaaataaagtatgagccttcctgcttcatccacccctgatgaccttttctttctgcaatcttaccataaggcatattatcatgccatatctgcatagagaataattaaatgaaataagtctccaactctccatagaaagttggaacgattagtctacatcctgttgagacatgcaatcagaacaaaattactcttcatttaatttataccatccagtccaattacgcattattagtgggtaaggtcaatctaaattttccaggggctagacatgaaactttgaagcaattgatctgatggaccaaatgccaacattttctgcttgccaaaaattacttctaagcaaacgaaacacaactaaccaacacctgttgtacaaatgtagtgacctatacatcattcagtaaactccacaagttgcaatcgtgtatctgcaaacccatatggaacatgcatataatcagaaagccacgtgcatctaaccattgacagcataagatgcagaagccggtcatacactagcaccaagctgcaattccataaccaacagaagcaaccataagcacacctaaccgcacacggatcagatcaaattaccccctcacgcttctccaaaatacatggaaaccgagtcagtaagcttagaccacagtaggcagtcacttcaggtgctatttttctactatggcttagtggaagcaagcgccaatgcggcaatgcctacagcacacgcaccttgtggaggctctcgggccagggcactgggacgcggtagccccgcggaggcgggacgaggcacacgggcgcctcgccgcgcgcggggcagtggcgctcgcggtagtagttcatctcgcggctgaggcgggagctgcggcggggatcctcgcaggggaggaggtccacctccgaggctgcgcatggtggcaccgtcgcgccggcgagtgcggaggaggatgcggagaggggctcgccgcggcgcggcgtgaagacgagcgcgaggaagatgaccacggcgaggaggaacaccgcccagacggcgtcgaggaacgaccactgccactgcccgccgccgccgccgccgccgccggagagggcgccccggcggtgcgggcgcaaggagctgaggaggcccatggcgaggcgaggaggcgtcggcgtcggcgtcggcggcggcggcggcggcggcggcggcggcggcggcgagggtgctagctagttcgatcggatcgggccattgaggttgttttgattcgatttcgagtgttttttgtgctttgcgtattttctccattcggtgatttcacgggaggttggcccgtgagatctgtaactgcagagatggcattgggcaaactttagcaggttctccttttctttcattagtttatcaaaaccatcatacaaattttagtcatttcggatttttgtactttttcaataaaatctcagggttttgaatcacaaaattcttaaaatacacagaaacaggataaaaaaatagattgtctcaaccgatattacatgatttcaacatagattagcactagagataatgttttggatggttcgatggaatcgaaacatacaattttgtatactatataggagttagaggaagaaaaattaacttgctaaataaaagtaacggttttgctatcctatatttacccccttttttaaaggtgggagggaggggggatcacctatagtgataagattcatgtcaggtttctcctcctatagatgtggtgatcgaaaacggtccaactagtaagggtataaggtttggcattggggtcaatatcggagggggtgagaatagaaaagaggggagatgtttgcgggttgagaaggattgttgtggaaagcagtagcctggtacgcgggatgcgatgcagctgtgacattgctgaagccatagagatcaatagctatgcaacgagttgttgttggcaacaggagtcataggttcctaatgagttaggaagtgcacgtgaaaacaacgagacagggcactcgttactatcctgcttagggtggagaatggttgggggcgagaggcaagcatgtgagccagcgcacgccgttgggaggatgaagagggaggaaaaataatagggttaccgatcacgcacaaaatttatcgtgatttcgaccattcaaaaaataacgagatgatggtggagtttttatcaaatgtggatatgcaatttcaaaaataaaagaagatgtattagtgatgtctaccctttgagtaaaatatacgctaatcatctagtacatgttttaatgtgatcaagcggagtatatatctctactacttaaaaataagaggtgcttccatcgtccgtaaaaaaaaccgagaaaaaaaccgggtcaaaaaagaaaaaaactaaattggtccgatccaaaaaccgggtgaaaaaaccgaaaaagaaaagaaaaaccaaatgtaaaaaaaacggggcaaaaaaagaaaaataaacaaaatctgtccgatcaaaaaaccagaagaaaaaataaaaaagagtccaactcccgtcaaaacaaaataaatagcgaaaatatataaaaaaaaagtcgactccttctcagaaaaaaaagtccgactctagatccgattcccccttaaaaatagaaaacaaaacacaccacttctcttggtctcggtttgagtccagattccagggagactcctgtcagtttcaatctataccgtgatattccatacatcttggcgaaaaaaaattgatgtgccgggttaaagatctgtttgcaaaaacggaacctaccagtcgagagcattccatttttatatgattttaatttttgggtttgtacttctctatttgagtccctgtaatttttatatttacatttgagtccctgtaatttttatatttacatttgagtccctataatcttgcaataagatactataatcttgcaataagatatatgaggtcgttttttagaaaaaataataaaagggagagaacaagggcataaaggtgcataaaaagaaaaaagaaaaacttcaaaaaaagaaaaaaaaaggaaaaaaaaagaaaaacaacaacaataaaattttgtttcccctaagtggcaaaaaaaaccgtagatccgattcctttaaaaacggaaaaataaagtttgattcctgtacaggcgaaaaaaaatctgaaaaaacatctaaaaaagttttgtccgattccctaagaaagtggcgaaaaaattggttcgtacaaaataaaaaatgcatgcgagaaaaaagggaaagggtgaaacaaattccgatttctaatcagtatatatctcttctctatctctaatctaatctaactatttaaaaagagaaaatgcacgagaaaaataaaaacagttcaaaaaaaatgcgtgagaaaaagcacagacgatgctaaaaaggttttccatcttcaataaaaaaacgtgtgagaaatattatttccatcgtcggtaattttttaaaaaaaaacatgcaaggaaaaaactgtaagaaaaaatgcgccatttctaaaaaatgatttgaaaaaaccgcgcaagaaaaaaacaccgtctattaaaaaacaaatcgctttgaaaaaactgtcagaaaaaaagctaaattgatggatgcttgagtcggataagatacatcgattttttgccatctattacacggcttttatttcgtcatatattgtcctgtattggaaaaaaaaagcaaaaaatgaacattaaaaaacaagcaaaaaacgcgtgagaaaaaaaaagcaaaaaagagagaaaaatatgagaatagaaaagcaaaaaagagagaaaaatatggttttcgtcgtcagtaaaaaaaataaaaaaaatatgctaggaagaaactgttagaaagaacattgccatttctgaaaaatggtttgagaaaatcacacaacaaaaaatacaccgtttataaaaaaacaagccgctcattaaaatacaaacattatctttgacatgattatacatgaaaaacgtatattattattagaatttattcacccgttgcaacgcacgggcatttttgctattataataaaagaaacgccaaataatcgttgtggttcgtagtcggtccatatatgctcagtgaggcccatatatcctatttctggcccagcttgactacgtgactgggcattacaactgccacatgggccctcggcccttcgtcccgtcgaattcataacgctaaaggcccattaaccacctgttttctctcgctcctcttccctagaaaaacacatgcgtgcactggtgcacacagggcgacttctgcatgttgtacgcacgttatgttgaccgagtaagacataggtcaaccgtattgactggagtagtataggagtagtagaattattgccacgagtaccccatgtagaacgaatcttgtgtttgactagtgccacatgtatgtctgacatctccatgactccatccacactcgcgttgaccgcctagccgtgttccgtgtgacaacatttagttttgctgggaccagattatggcaataatggagacatggagtacattctgttgtggatgccgcgatgctgaatcacttgtgtcagcccgaaaacttgtttatgacgaacacccctgagataaaaggagtaaaaaggactaccatttggtctggatagtacagtaatgcactattgccgtgtactacaccaactcgttttacatgataaatcggcagaaagctgtccggcattgtcctaccaagtcccaggcaaagtgtggacgagtagaccttcaagcttcagcaccgtattctagtcacggccatcacgtgacattgtgaacgctttgaatagccacccgtaatactactactcaaggtaatacgatcactagtatactgcaaattgtgccaacgacaactgtcgtcgacacatgcatcgaatagtttagaacctgttttgtaccatgaattttacagatctcttctggcgattaaaaaaaaaagggctgttgcttgcgaagtccgcatgcgagacgacaaggaggactcgaacgaggattttgaagtaaaaagggtgtaagttaactgtctcatcttttcgcttatacttatacttatttaataaaatttaaatctttaactttaaatttaatgttaactagcatggtggcaaacacagtttgcgcggctagcatcattatattttctctcatctaataacatatatgttttctcattatattattcaaatatattaaaatgacaacataattttaaattttgcgataactttacaaaactactaatgtgtaatattcatattgtattttatatacgtgttagttattaattttttttaatatcaaattttagttatttgtaaattaaatatattcctatataactatagactcgtcttttaatattttttttaattccaaattttttgtaaattgtatttctatatagactctatgctcttgttccaatattatttatttttatttcttaatttttattatttctaattgtatttctatgtggactctaaactcatctttcaatattctttaatttttaatttcgaatttcagttacttctaaattgtatttctatattgacttaaaactcttcttcctatgattttcttaattttaaattttagttatttgtaaattgtatttttatacggactctaaactatacttttaattttattatgtttattccaaattttagttagttttaaattcctatatggactatatactctactttccttattttttaattccgaatttttatattttttaattgtatttctacacggactctatactctacttctaatattccttatttttaatttcgaatttctattatttcctaattgtatttctatatggactctatactctaattctaatattccttatttttaattccgaatttcagttatttcctaattgtatttctatatggactctatactctacttctaatattccttatttttaatttcgaatttcagttatttcctaattgtatttctatatggactctatactctacttctaatattccttatttttaattccgaatttcagttatttctaaattgtatttctatatggactctagtctcgtcttttaatattccttatttttaattccgaatttcagctatttctaaattgtatttctatatggactctagtctcctcttctaatattccttattttttaattccgaatttcaactatttctaaattgtatttctatatggactctgtattttctttttctttgattaatgtgagaatttctaggccatgagagcgaacgtggaggctcctttttctattcctttaataatataatagctttttagggttttttccatcaaagggcttgttcagattgatgccatttcaaaccatatcatttttggcaaagttatcaaatatgtgtatccatttagtttcttaccaaactcgataaataaatatgaaatcctgctaaaacttggtaatattgtcaaattgtccaaattttagtattaccaatatttagtaaaatttattttggatacaatctgaacataaccaaagtttatttttcagactttgcttttacatggctaagaacatgtatataaaaattttatttttattttccgtttgtaaatatagtttagcttattcccgtgataagccaagcaacggggccgtagatgaacttaccctcgccacatcaaatcaaaccatggaaatattggcatcttgaggctgccggctactgtagatggtcgacaagtcaattccatcacgttaggattccctcgccgtaccacctgggatttatatatatacgtcgtcgtacgtagcacatgtcaataggataagataaaaaggcggttactagcatgtcctacaaactgttgacgtacacgtactggtactacccttcctcctccgtacaaaatccatccatctgccctggtagatggattaggctatgtgggtgggtgccgtcgcttcctactctagtcaggtgttagctagagccagccgatcatgtgccgggtgtacgtgctagaccgcccggccccctcgcggcctacgtgccgtgccgccctgggcggcgccgagcggccacagttctcttccgcgtcgctttccgctggtgcattgcatccacgatcgccactcgcttcgcccgtggacgtacgtacgtccgttgatttggccccggggatgacgcaggctacttgctggacggcgagtccaccaccggtttccgtcgggccggctcgggcggccggactcgtgttgtgagtcaataattgtagtacttgccggctcgcggctctactgaatcgactgtttgacacacagatcagatcaacgagtggcgtagttagaggacgtacgcaaaaggacaagataaaaaggggaataacagagccagccgcagagggcagaaaagaaaacgcgccaaggcacgctaatgcaattggcgcccagcaagtggatgccgtgcccatgggtaaaattggcaaggcggatcgatcccattcatagagagcacagaacaccaccacaaggaaggcccttctcaagacaggcactcaaaactaaaccggaagaaattgcgcccactgccctgcgcagcgcatgcataacgcagtgtgtggcagacacatggaacgagacgcatgacgcagaggcaatggccactttcttggcatctggcatgcgacaaagcaccgcatcgcaggcgcagcatcctttgggttctctcctacgcctccccctcgcacatgctgccctggcgctctccccgcacggagcacagacacacaatgcgcatcgaggccaaaacccggtgtgctgcgtcgaagcaaccgggccgttcggctcccgcgcgctcgcggaaggagcgggacacgcgcgggcgacaacaacggcgagctgggcaaaaggacccgcgtggcgccgtgggcagtgtcgcgtagcccagggcatggacgtgtgtacgcgcgatccaccgatcggtcggggtagattcgatctctcccagatcgccctcgctgcggctgcatgccttcatggcgtcgcatgcatgcatccacaccgaattcctcgaagcgttccgctaatccgggcgggcgcgctagacgggatggcgctgcctgccgtggcccatgtgcacacgggttcgcgatctcggtcgcacgttcagggcgcaaaacggcacgctctggagacccatgctgctcaccgacgtttgcctgctccacagtgctgtagttttgtgatttttcctctagaagcttcacttcatttcctttctcatctactatacatatacattggtggaatgggccctattgggctgaaatacacacgcctacactcaacactccctctcaagatgggcgataaatatctatcatgcccatcttgccacacgaagaagtgcactctctagcacctaatgccttcgttaaactatcagctacttgttcaccagagtttacaaagcctaagtttaaggttccctcatccattctctctttaataaagaagcgatctatttccacatgcttcgttcgatcatgctggactggattgttagcaatatttatggctgatttgttgtcacaccacaacttcatggaagtgcttgtcgacagcttcaattcagccaaaatatttttcaaccataacaattcactcaagctcatcgacattgacttgtattccgcctcagcagtcgagcgagacacaactgattgtttcttgctcctccaagataccaaattgccaccaataaatatacagtagcctgatgttgacctcctatcatcaagacaactgccccaatctgcatcacaatatccctccacatctaggtgtccattcttcttgaaccatatgcctttacctgggcttgccttcaaatatctcaaaattctatacacaacatccatgtgaccacttctaggatcatgcatgtatcggctcaccacactcacagcataagttatatcaggtcttgtgtgacacaaatatatcaaccttcccacaagtctttgatatctctctttattaactggatctccagattcagcacataacttatgattttgttcaattggtgtagaagctggccgacatccaagcatacctgtatcactgagcagatccaatacatactttcgctatgaaagaactattcctctaggagatcttgcaatttcaatacccaaaaaatattttaattggcccagatccttgacctcaaactccttgcttagattttctttcaacctagatatcttcaagcaatcatctccagtgataatcatgtcatcaacatacacaacaagaatagttttaagacctctattatggcgatagaaaactgtgtggtctccattgcactgtttataacccataccacacattgcacgtctaaaacgatcaaaccatgctcttggtgattgtttaaggccatataaagattttttcagtctcaacactttaccttcagtttgtgaggtagcaaatccaggtggaatttccatatacacctcctcttgaagatctccatgtaagaatgcattcttgacatctaactgatgcaatggccaatcaaaattagctgcacaagagataagagttcttaccgtgcttatctttgctactggtgcaaaagtttcatcataatcaattccatatgtttgactatatcccttagccacaagccttgccttgtatctttccacatttccatcaggattttgctttactgtataaacccatttacagttaaccactttcttccctttagggaatggtacaaggtcccatgttttgttcttttcaagagcctctagctcctctagcatagcttgatgccaccttgggtcttgctttgcttccctccaatcatttggaatttccactgaatttagtgatgtcacaaaggccttatatgtggatgacaaagaagcataagagacataattggctatgttattcttatcatcattcacaccttgagcttcaaaaccatacctttgtggaggtttacctgcattgcttcttaccccctttcttatagcaataggaagattagtttcttctccccctgtttcaaactcctctccttccgtatccgatgaaatctgtatagtatcacactgatcagatggtttatcccatccataggagactcatgttgccccattgtttgcgcctccaaagaccttgttttcctcctagtataaacttgtagattttcttcttcacgtggccttctccaattttgctcatgaatgggttcactaacaggatatgggattgagccaaccacaaatttcatgcttcttgattgtgtgtcttcttcagtacctgatgagccattctccccctcttgtccatcctcatcaataattggattgtcaagatcaacaaacaaggaactcaaatctgttctttctccatagaacggaacagactctctaaaagtaacatccatactaacaaaagttcgccgctcagatggactccaacatttatatcccttttgcccagaagagtaacctataaaaatacacttgacggctcgaggatccaattttccaacggatggtctatgatctctgacaaaacaagtacacccaaacacttttggaggaacaatgaattcattcttcccaaacaccatttcatatggagtcttcatcccaagtattcgtgatggcatgcgattgatgagatatgttgctgttatgactgcctcactccatagaaactttggtacattcatcgtatacatgagtgaacgagttacctccagaatatgtcgatttttcctctcagctactccgttctgtggaggtgtgtcagcacaagaagtttgatgtactattccttctgctgagagaaaactcctaaattcatcattcacatattctcccccattatcgctcctaataactttaacacaagtgtttaattgattcctaacccaagcatagaaattcttgaaacatttcaatacttcactcttgtgtctcatgagatatatccaagtcattcgtgagtggcaatcaataaaggtgacaaagtactttgctccacttaccgaagcaataggagaagtccatacatcagagtgaaccaacacaaatggcaaaatgcttcgaagtcctctgcttatgtatgtggttcgtgtatgttttccatactcgcatgcatcacacattaatttgcttttgtccaccttactcatctcatcaggaaataccttagacatagtatcaaaggacatatgtcccaattgacaatgttttagaatcaatttagcctcctcttcacttgtgctagctaacaaagcactacatagtgctttgtccgtccctcttctatccagataccacaacccattatgcctaacgccggttccaagctttcttccaattcttctctcctcaattagacaattctctcagtcaatagtaattcgacaatccatatgatcaaccaacgagcttacggatactaggttaacaggaaaagagggagcatataaaactgacgacaatgtaattgatggagtacatttgactgttcccactcccctcacatgtcgtaaagttccgtcggcagtttgaattgtttctttaaatgatgactgaaatggagtatatgatgtaaactcactcgacattcctgtaacatgtctagatgctccggagtctaatatccaagttgagttaggtacctgcataggatgtgcgagattaacaaagttgccaagcactgttgttttctccttcactttctgaattcttccccttatttcttcaacttcttcagccaatttctcaagtatttgctcaattccttaaatttcccccatggcagatcaaccaaatcttctaggatactagccaaatcaattaataggagtaacaacactactcctcagtttctcaccaaaaacagaacagcagcagtagcactacttcctcccagcagcactacttttcagtttcccccaaatcagcacaacagcagcagcaagccaagctctcgtactcagtttcttccccaaatcagaacaacagcaacagcaaaccaagcttccgcttcacctccaaatcctcaccttctcaagtagcagcagcaccagcaacagcaccaccaaagtcaccaccactggaatggacaacaatagccaatagcaccaaatccttctctgttgatcctacagccaacagctgcgcgtctctcagccgctgtgctccctacagcttgtgctacaccaaatccttgcgcagctcaaccagcgagtgtgcgccctgctcctccttcacgctgctcgcgtcgagaacctctgcagcagccgtcgccgcctccgccgtcgacactgccgctccgcctccgctgtccgacgtcgccgctccgcctcagccgtcgacgtcgccgcagaacccctctggtcacagcgccgccgccgactagggttcacgtcggcgaggtcaccggtgacccaactctgataccatgtagatttgtgatttttcctctagaagcttcacttcatttcctttctcatctactatacatatacattggtggaatgggccctattaggctgaaatacacacgcctacattcaacaagtgcccgccgcaacacagcgagtcggcgatacccatacaaaaacgtggcggtgtaaacaatatgcgacactgttccctcctcgtgcgctctgatgctgccactggaattcgctagtgtcattaggcatttaggcttaccatgtgagcgaacgaactgtaataaactttgaccgaattcataaacaggaattgtgggggtactgctgctacttcaaaataagtattcccaacaaccagattaggaatggactagtagtggatgacaccaacgcaataatcaacgaatgtgatcactgatcacaccatcattacgagccagtagggtatcatatatcaagattccagtgtcaaataaacaacaggtccagagaaaggtgacaatagacgaaaaggggcgtcacgaatcactgaacagtctttgccttcattgcaaggcgccaaggcctcgaacgtcaaaggaaggagaccgatggttggagccttggagctttcattatgcttctcctccatcatagcactacaacgagtcaagtaaacatacagcatttcctatatatcatccatgcatgccagattatgcgtggtccccgtcgtctgccgttgctcataagcatcagtcttcgtactaaactactactcgtgcgttgtgtctcatttctatccaccgtgcatggatgcttggaattatttgtacaaaccaccaaatccagagtaattaggaggtacggaaatttatttctggcgcagggcaagcacatccagccccagagacagcttcgaggatggtaccatgtaccattaactatgctagtgtatacaagcatagctaagattactgtagaagatggcaacgaaaatgttggagttgtgaccaccctcaacaactctcgcaggccggacgagcaaggccacaggcagagtttgcaacaggagcatctctataatgctttggtttttgtttggtactgcagtacatttgtctctcaggatggtgcagcgcttcgtaacttttttttttcttcagctactgtgatcattgatcaaaatcttcagcttgttacgtgacattaatctcgccggctggatggatcaatatgctaccagtacggggtgcacattgaccccatctggagatcagataaccggacattttcttcccaccaatcgctatctccctttccacaagaacatggttctgacccagacatcaaccgctaatctttattacagatcgtactactaaccgatatgctactactctaccagtatgttctaaacctgtctcgtgtgaagcaaatgctataggagactaaaattaaggatagacgaacctggtcagggaccaatcctttgacacgggattagcattagcggtaggccctgatcgagctagattctctgccagtttggcctccatttgtgcttctatgaactatgatcagccgagccgaaagccggaataggagtatatgtgggcgcaaggaaggaggaggaatgcaaaattaattgcgtgttggtgccttgccgtcctccgggggccatgcatccatccgttcccgacggaatggcgactatttttggcattgaaaggagcaaatacagcgacgaaacgtcgcctcaccggcgcggcatgcacgcccaccgacacaactgcaccacccatctcggaacgccaagcacaaaacccccctccctgctcgcctcccaaaacgctcgcaaaggcttcgaaaccatactctactcggctaattccaggtggtgacagtttggaattttggcggtgtcatttcgtcatcgacacgcagttgatagtacctgtggctgcggttaacgatgacttgaatttgcttaagcaagtttcccttttcacggagcatctcgtaattgtgcaatggaccaatggttaatggttatcgtttactaagagcatccgcaatggttatttataggctctatacaagagatccatgtcagcatatttttctacttgaaagagattaaatgaagagagagagcaaagctatctactaacctgaagatagtctatagagaaaaacgaggcaatggattagagagctatagatatccatgtagacatactattgatgtggattactattaatttagtttattactgagatgtatatgttttatatagagtatcttattttaccattgcaggtgctctaatacaccggtggttagtacgggccaaaggcaactgattgcaccagcctatcacaggcgtgaacagatccaatggctagaggacagctacggccattaaaacaagtctcacagctcaccaggtaggtccgaggcttggacaaacatgccaaatggaccaccaatggacaatgcaggctacctttcgctaatatgcagacgaaatggtgaataggatgatcagcttgtggtactaaccatcatttttcttaccatggcatgtagaagtactagcgatgagcaacgcaccaaattgcccaatcatattgcacccacggccagaggcgacagtagctacagcatacagaacagtgtgcacttgcgcgccgacagttatagtactaattctagctatagtagtaaatcaattcatgggtccagttgtagccagcagatttctagagcaagaaatgggtaattagctgctgatctcctatgccgtaattagtgggctaatatgtatggattcattcacccgcttctgctctcgtgtgttgtttagcttgcaagatgcattatcgctaatcaatacaacgaggtcagattaaaacccgtgcaggagtatcagagcgtacggagtacggagtagatcgacaccctgtcaccataggagtattaccgaagcacaagactggaattgtcaggaaggttaaggacgcatagatacttcaccaaacagctaccagcaacttacacttcataactagttaaaaacaagaaagaaaatctgtgacggtaacagcacccataaaaagctcaagcctaacaacgaccaattgctaaattcactcggtccttgctaaacacagtttgacacacttgtcgctttcattcacttgtcccggttgatcgcgagaatccggcatatgatcagtacttgacgggcatgcctagccgatccaacctgcccgatccagggtaggccttgttggtgaacttgctatgcaaggaggccgttgtcctctgtgccaccggcgcgcacgatccgggtccgaacgcgtgcgccgacgccttccggagggagctggacttctcgtactgcggcctctgcttcggcgcgctctgggagcgtgccttggcgcggaacgactcggtgttcgccatgtagttcgggtagtcggagtagccgccgaacaggctgcgcgagcactcgctcttggtcggcgtgaacgccctgctccgcgagctccccggccgcgacgtcgccgagaagaactgcgggctgtcgcagagctcggcgatgtcgacggccatgagcagcgggctgagcgcctcggccatgcccaccgacggcgggctgggcacggactgctgcgcggtcgtggagtccttggacggagactccggcatggtcgcgtagctccggctcttctgctcggatgtcatggacgagcatgacgagtggtggtgatggctgccgctgcgcctccgtgaggcgtgccgcccaggcttgccggtgtccacctcgagaatcttggcgttcttctcgtcatccaaataccgttcctccacccacttgtcaagccagttcctcccgcaagattctgacctctcccgggtcagtctctcacttcccggcgtcttcgacgagctcccctgcaacacaaatcgccatgccattaatctccaaggctgtcgcaatgtactacacataaaaatctgaacaaacaaacggagcaataccttcagagaaccagaacggccgtgcttaggcacgccctcgtgagtcgcctggtcgtacttctccggcgtcggtggcccctgcaatgcccaaccaccaccaagaaccatcatgagaagacgtcaacgacattaaaattgaaaaatacagaattgtgacataacattttttttaatctgaagtatctacaggtgaaaatacaggaatcatacagaatttttacttacgggatgggccgagacatgctgggagcggatagcgcgacacgcgcgcgcccgcctctggactcggacgagagcgtgcatgcaccggagcgtctccgccgcctgccgccgcacgatgttgccgcggacgagggcctgcagcttcaccaaccctcgcaacgccttcagtgcccgtctcgcctacgtacgcacgcgcgcaacgacaatcagagaggttaatcagcaggggacccccggtaacaacgggagcatgcaccgcaggccggaggttgacatgccaaccaccaccgccattactagagctgcttccaagaacagtaactcggtggtaacaaaatgcaaacggcagtgttcttgatgtgcaaaatggagttaaagcgccggagcccatgccttgcttggataaaagaagtctagggactaaggggcagtaaagacgcaggaatggcagagcagaagcacaaagaggcttctcttggctggagatgacaccacggcgtgttttttcctcacaagagtacatttgctaccggaaatttcttttggcgaagcgaaaaagaaagatgagatttttggaagaaagtgttctcctttttttggctttaaaattaaaagtggagtttccaccaacttaattctaaaacgtgaagttatcagaaaagattaggaactgacgagtcgagatgagaagctttaccaggtagccgcggaacgcggcctggatccgaacagccgcatactcctcccgcttggcggcggccggcgcgcatcgtccgctgctcgtcagccgcaccacggctgcggccgcctgggcagcggcgacggcagcctcggccaccgccgccgtcgccgccgccaccgcaatggcccgcttgctctgctcgtcgtccccctcatccgacgccgtgtacgcccgccgtggcgtcaccgccctctgcaccgccgccgacggcggtggcggcggcggcggatgggccggggacttctcacggaacgacttcccgaacccccagcgcttcttctccctcgccggcttcgggtcgccggagccggagttgggcttcttgccgccgccgagcagcccgcgcagccacctggacgcccaccccatctcctaggccttcagctcggccgttcccatggcttaacctcggctccgcttccagcacttcgccggagcggcaaaatggaagagcgggagatgaaaccgaaacagtgaaacgcgcgcacgcttacaccgagaaaagaagaagcggagcaaggtcggagaggaagagcctagtggaaggttagaggggattgtcttatagaggaagcacaagaggtggggccatttttgcaaatagtttatccgttttaggggccgcttgtgctaatatttttcggcgaagcgatcgtaaaactgtaaaatgtccttgttttgagggaggtatggggaaagtggtaggtgttgatcttctgctccgccggccgcctagccgtttgactatttattgttttgatcagacggccattccgggctccggcaaaataaaacatgcaacttctttataactttgttttactagctttccagctattacttctcttcttacgggtcacaaattattattagagacacatttctcttaagctcataaataatgcttttttcatcctaaaatagaccccctcttttcagatttatagttataggaaatattccatctcattctaggttcttatattttgggacggatggagtaagagattttgaatagatatgacatattctacacattcatatttgtattagttggatacgtcccatccattcaagattctttatattttgagaaaaaaaagaaaatatgttttagaataatctctataaaagttttttaataaataggagtactttttacttgactgagtaaatcaggatgtgtacttcaattgtttacttagctcaactaatatagtatttgatatgtaagtgttttgcgtgttcaaaaccaaaacctattacgactttacgagtttatgtccctctactaattctttttcctgtgctaatggaactatagattcgatgtaaagaaggcgggaaaaaaaggaatatgtttaaatacaaatactaattgcaacggttagttgtattagcgccttgccttaaaattgaaattatgctaacgtcaaaagtggacatcgtctagataccattccataaaacaagtttcactaatttgtcactttcgaatgacggttacacgctagagtgctaactcggatgaaattgtccataggcttctcttgtcgtgacctattcctttccaactcgatatacttgctagtgatgatgacaaaaacaagaggagcctcatcacgctcgccctctatgcctacttgcaacccactgcaatggtcatcttgcttaacctccagtatattgctcttatgccatttccttcttgctctacaaccactgagccactatggtgggtgtgtcaacgtaggatagtcactaatcccctatagcttatctccaccagcaaccttcccatgatgtctgtctccaccgtggaccctagtggctccaaccctcgatatacattggggctcgagaaggttgcaacgatgtttaggttggagaaggccggtggtgcaagagtgaagagatatcgtcgtcatcacctgttggccatggcatgtcaccgccgtagttatttttctcgccacgtcggaggtttaaattaaagcagaggcaatgatatctcgtctattcaaaggacaaatatcgtttcattattgatgcacacatcgcttaagaaatcacattttaattgagttcatttgcgaaacgacatttaaacgaagctcactttcaatgatgtggcgtaattctaaatttctcgtcacaacgacatacacatccgaacaccaccactatacttgctattacaacaaatccagaaatcctttatgaaattcgtccattgtcccggacgagggttttccttggtgctatatttattgctcgctcattgtacggcagagtgaccattgcacaattcagactcttcttctcataagatccctgcaacattactgggaatactagcagtactgttcttccctgggggaagtcagatcgtcggggcagacatttcttcgacgccccgctgacagcagggaccaccgcaacagcagcaacccgccacctccgtgacgacgacgccctactcgtgcctcccagcgcatccgcagacacagccatccatcgtcatcctctccctcggcgccgttggatcgaatgcgacccttccttcccacaatccgcgcgacgcgcgtctcgcaagagaaggcgtccccctgtcccgcggtagtagtactgggcacgctgtccacggagctgtgcggttgtctcatgtgtgcggtgcacctggttgcctacgcacggctggctacccgggcctaccccccacactgtttttttctgtttgcaaagctgacgaaagggggagctcgctggctcgtagtactaccgcgcgggacgtgacggggccaaaagcgcacccaagcctagcaggaaaacctgttgttttgtgctctgtagcctggcctgtcacggaggggggtggcgtgagcacaagaaaggctaatcctacctcgcctcgccagattcacaggacggtcacgtggccggaccggcgggtcgacggattggtgcttgcgcggccttgcgctgcgcgctcggtagagtgtggggccgaagccgaacgggggaatcgccagtaggttgccaggattccaggacgctgttgcagcctttgcagcgacgaggtgcgtccaagatatgggcctattacattgttgggcattagcagcagcccaaatccatcatccatggaagcagcggttctccctgttatatgggcctgaatggtccagtatgatttccgcccgccatgaaaaggaataagttcactttgagtcccttaactagtgaccgaatcaaattcatatacttgaaccacaataccggatatcttgacccctcgactattaaaaccggtgcaatttaactcctatggtggttttgaagggtgatttgctgatgtagcgccaacatggcagcgttgacctagtctttatccaacgtggcgttaacgtggcacttatgtggtattagaatttttttaaaaaatatgtgggacccatttgtcattcacgaaaataattgtgggggcccacatgtcatcctctttctttgcttcctttcttcctcctccccccctctgaataggcacatttgtaatgcacggatcaaattaacccttaattatttgtcacttatagtctatgacacatggattcttatgtgtctataacatatggatccaatgaaaaatcattgattatcacatttaagagtggtaaatttaattatcttttattttacggtgatgtctaaccctgatatgaaacaaggctttaaggtggtgtttggatccatggactaaattttagtccctgtcacatcggatatttggatactgatttagagtattaaacatagactatttgcaaaactaattacataaatgagagctaattcacgagacaaattttttaaagcctaattaatttataattagagaatgtttattgtagcatcacataggttaatcatggattaattaggctcagtagattcatcttgtgaattagtccaggattatgaaatgaattttattattagtctatatttaatacatttaattagtatctaaacatttaatataacaggaattaaaaaattttagtcccatccaaataccccgcaagttctggactaaacttagtcaccggagaccgtctgaccgctgacgtctactttcggtcacagtacactgtaataacaggtcaataatcacagtgacgttgccatgaccggaaagtccaaacttgttttcgtgctaaggtcccgtttagttaaaaaacttttcacaagacatcacataaaatctttagacacatgtatgaagcattaaatataaataaaaaatactaattgcacagtttgcatgcaaatcaagagacaaatcttttgagtctaattagtccataattagccataagtgctacaataatccacatatactaatgacgacttaattaggctcaaaagattcgtcttccagacgagtgatgaaattagttttttcatttgtgtccaaaaatcactttcaacattcgatcaaacattcgatgtggctctcaaaaatttttatttccccaactaagcaggccctaacagagcccaagtcatcaccattcagaaaaaaaaaacacagagaatcgagttgactacaggtcacacgacgcaaatatgcaatcatggtgacagacgatgggggatacgattaaagttggctttgccctttttacgtggaccgtgtcgcggtcacgaaagacggacgccatcattcgggatgatctgcccggacccctggatgacttgagcgatccttgttggtctgcgtagcgccatatccttttttgttgatcctcgtttactcccaaaagctctcacggccggcacaagcgacagcctaatcgaaggcaactcacgtcgcaatgagcgtcttctgtgagcacttcatctggtccttgtgcctttttctttccccgcggtccaggttgccaaaaggcacgctcgcgggcgcggtggcttcacaaaagcaacggggtgacggcgggttgatgagagccggaccggcccgaggagcgcaggcgtaggtgccggtgatgcttacgtccacacagctcagctgtctccctgcctgctggctttgccgctaccggcaaggcggcaacggcaaccgagcccccggccccgcgccggcgccgcccgtatcgcacgggccgcacatccgccgtgacaacgacagcgaccttttctctgtccgctcttcccttgtcgctcggcgtgccccgttccaccacagtgtagtgttgtagctagataaaaaaaaaccgagattagaagggagagaagtctttcgaaacatttctctactgttataaaaaaataaaaatatttttatcggtactttggtacgtcatctatatatatgagacggtttttaagctcattcacttttgaaaatacatattcttatttgagttagtttttaaatttgttggctttgggaaatataaaatgatctctttaaaaacctcgcatgttaacttgagacgatcaaacttctaactgcagctcatgattagattttctaataaaaattatatccaaacgaattacttgagatgatcgaactcctaactgcagcttatgattttctaaaaaaaatatatccaagcgaattcccacagtgaatttcaccttaactaaccgtacaacaataataagattaaaatagccttcacttgttgcaacgtacgggcatttttttctagtttttttttaaaaatatgaacatgttaaagattaaacataagacatctgattaaaaccacacacaacctgtcactgtattatcaggtgcatcgctttagctggactggatattactccggctggcaaagcaaaaggacacaattcagtttgttactctggctgggccgattcagtttgttactctggacgggccgggcctgaccaggccagtgcacagcaggactgcacatctgtctcctgctgaacctctttgttcggcccaagtactaggaaaggcgctcatcaggttcatgattcatctaagtcatctgaacataaaactgcaactgagcattatactaaccaacacaaaactagctgatctcacggcgttgatgctctgcatttgctcaacttctgcatcaaagcaaaactgtattgtgttgagcgcgcgccattcctgcgggcacagaccttctggaaacaaaggtgtcatctaccagctaaaagttcagacttcagagatacctcgagatccacgtcgcggcttaaccaggcatgccattcaaacctttgagctgacctgctggataccataatctctatcccttgattttgttcctgcgggggagatcttgtcgttgggatgtctacagaaagtttatcttcatcgtataataaaacaccccacttgtgtgtatcattctttatcaagtctctgaacattaccagtattaaactcggcttgggctatacgacgtcttgcaaatacagaaagctaaggttagatttgagtcgcaaaggatttcgttcagagcaacttggcctgtggggcttttggttgattacaaccagggacacacaaagatggcgcaattcgagactgttctgccaggggaacagctaggactgccaacttatgcagttccatgagattcctggtgtccgaaacacatcaattttaaatcttcagacaaatgctgggtttgcattattaagcgcgtctgttaacctgccatgagacatatcggcattgtgacagttactcctgctgctgccctgcaagtgagtctgaacaagcttgagaataattgaagccctaagtatggctcacaaacacttctatgtacataacgaatatattcttgcttcattagacatgtataggttgatttatatacggagtacaacacatggatagttgacttgactaaccacatgaaaaacgaactaccaaggtacaaaaaccccttttcacggactagaggtagcactcggtaacatgacattacttctatctgagatgtgtctattctatcactagactaagtatgtgtttccatccttttctgttgtccttaaataacctaaaactagcctaagttatgctcccccacaacaatctctcccatcatacatcggttcattcagactggccacttgttacagcccccaaacgcatcttggatccagtctatcaggtctagtcgaagccacaacttaaggtcgacgggtctacacaacccgagaggttgaccaagtgagtgatgaccactccatcttttaagttgtgctctctatcaccaattatcgacgtaggataaaaacccaacgacatctttgcacacacatttttgtgtttagtggcaaaaaccaaaccgccgaggtaaaaaaacgatcagttcttagggaagagctggatatgaaaaccatctggaaagctgagaccgggggttcggactatgtttcctcctttcactgtcctccaactgccatgagaaaaaaatggttattcagatgatgtccacaggatgagccaacgtgagaatgttatatttaggttgagaaatggtacctgtattttgtaactaaagagtgtatgaatgttgccatcaaaaccttgctgagatcagttccaacgcagaaccgaagcccaccaccgaaggccatgaaatgcttcgttcctccagtgatctctggttttccctgttcagacaagggctagtttagagccatatattatttcaatgcagatattccttactaatgtggaaaatgcatgtgatgctcccattctctccctttcctcgttatgctacccattactcattttccacaacttcaatgcaaacagttgctttttttatagggtaatggaaacacttgtttattgaaactcttggttctcactttgtttatttctttatacccaatcacctaggagagctcactgaacctgaaatcagcttgttactgcatctatagatccatgtcatagacaggcaagacagcttgcctttttacagattgcattgctctttatgcaatttatcatcctttttgttttacaagggactggtgaaatagcacatggttcacctaccggattgagatactgtcggattacaaatttattaccacaagccccaatgatagctaacaattttctgtgcacttaagtagtacttgacagatgagatagcttcatggtacttgttttttcataggttacactgtacttctcttggcatttgaccttgttgttaaactactgagcaggaagtttctctgttggttctggtattaaacccctgaccgatcaagctggtacttgagatcagaaccttgcaaccttatactaatcacagtgctaataattgggaagttgcagttaattaaagtattcttctttcataatttccgttttaatgtcgaggcttgagaggagaatatatgcaagttcggtgagcagatcagataattacagttcctacttcctagatgaggagagagctcttttttttttaataaaaaaggtagacgcctaaaataaactgaaggaccaaagctcaaggctggagctgccgctcaacctggcaagatggaaccctaacctacgtgtaaacttagaatgtacatgcagaaactgctaattactgaaagttcatattaagaagactaacctgccacctccatggattgaaggccaacggatcttcatatatctcagggtttaagtgcactgccggtgggcacaccatgataccccatcctgctggaattgtgtagcctgcacaaagttcagagttcagttttgtgctgcaacttgctgaagtgaacctttctaattaacaagagatgtcatgtgctagatagtattcgagatatgtgtacctttgatctcaacatcctgcaacgccttccgaaaaattcccggcacgatgtttgcgagtcttacaatctccattatgaccttcacataaagaacatggaagcgttagttttggcagttatggattcagaaatcgtacggaaatggcatctactacataacctgcagttgccaaaacaattaactgcggtaaaaattcaggttgccgagttctgattctcttcctcttttgctattttcaattgtaaaaataggagtttttcttaatcagccaagcctgttcaagaaagttcttacagttattattaactaagattatctatcattcttgaagattgggccttggttaaacaacaggggaacacgaactctgcacttgcagagttgcagtcttgttggcaacagctttgggctcccaagattcttgcactagttccagatcaatctcattgttccccaagtaaattcgagcgggggtattacagtacgtagcagtgcagattggtctagcgcacactagtcccgggttaggctcacctgagacgtgaacgtcatcgatttgtactcggcccacgtgacgccggaattggggtccttcctgttcctgatgattgcctcgtgctcctcctgcatgcccacgcgatcgacaaggtttaattctactttgctttaacttgtcgatcgattgatctgatcaatgacgagctagttgaactcatcacactcccgttgagtgaaatatgatcaacagcgagagtagagagtagactaacccttagtgcgtcgacgactttgggattctcggtgaggagcttgacgccgatggtgagcgccagcgcggtggtctcgaagctggcgaagaggaggacgaacatgaggtccagcgcgatggtctccgtcagcagcggcttctccctcctcagctcctggatcacgtggtcgaagaagtcctcgcatggccgctccggttcggccatcctctccttcatcatgcccctcagcaccttcatcgcgttcttcctcccctgtgtacgtatcaattcaaaaaaacaaatttaaaatcggaattcattttttttgagtatatatcagctagctgtgtaacagtgagaagcaggagtttctgaggtttatggagtgcatgtgcgcggctatacggccaagtacaccgatctgtctgtgcgtgtggtccttagtttagtggcgtttcgcatgtgcagacggcctagctagggtgcaatttgaagttgtacaaattatatcgtgttcaagagtatgggggcagttgccgagttgcgggcggctgcgggcgtgtgggcgccgtacctccatgcactcgtgataggccgtgccagggatgttcagtgggaaggatatcaacccgcaaatgaacgcgccgaagttcttcctcaggttcacctgcgacggcttggacgggtcgtagccgatcagcttcttggctgtgagatcaaatatcatctgaaatatatatacagaattaatcctcgtcaattacgcgcaatgcggctagctaggcagctagcacatgctgatgcatgctggttgatttggcgtccggtgtgtgcttacagtggagatgccttccttgagctcgacgctgggctgggaggcccaggaggcgaggctgccgcggcaggcggcgtccgtctcggcgaggagcacggacttgaggttctcctggccgtagagccggagcacgagcgtcttgaggtacttgtacatgaagccgtgcagggagccgacgttgtcgcggccgaagatctcggtgaaggtgtccgggtaccagctctcgaacagcttcccctcctgctggaacacgtagtagttcatctccgggtcggccgacaccaccaccggccgccccaccacgcttgtcttgaagatgctcccgtatctgcgcccaacgccaacgccaatgtcacggaccgaactcgatcgatcaacaacgtcaatacttccgcacgccattgccgcatgcgttcttggttctgaggtggaggtgtgtacctcttgatcctctccttgacgaagggggagaggtcgcaggtcgggttgggcgcgaagaactgcagcgtctcgccgatgacggggaggccgagcgagcccggcggcagcctgccgttcgacctggggtggctccacctgtacgcccagcggaggagcgcgacgacggctgccaatgccgcgcacaggagcgctatataggccatggaagaagccatggccgccccggaggcggcgagaaggttcgcgtcgtataatcttggggcgagagggatggtggtggcgaggcggagagaagctagctgaagatatggctgcatgtgcgtatgggggagagttgtgcgagaggagaggtggtttgctaatgctagctagagttgctagcaaaggccaaaggggaggaggcggaggggttatctgtgggtttgtgggtaaggatggaggggggtcagcttatataaccaccatgctgaaagtcatggccttaaaataaaaggagggagggaaaattgcatacatgcccaagattaaactctaattgcatgcagttaatatatttgctctttttttttggctaatagatttaccaaactttttctttactactggtaggcgtacgattgtaacatatgtgttgatgtatcgaagcacatatataattcaacaatcaaaaggaataggttagctagtcttctggttctaaagtaatgctcgattagcttgaaacggttagacttgaaaatgcaatattttgaacccacaagtaatatatgcgggtgtaactcaatttcaccaacatatatgattgagtttttcctttctagttttgtgcaactagtttttaatttctaaggggtgccaaattatttttttgctctttcaaaactacatatatggttaacatttttttaaacaaaattaacatatttttagattagtcccttgtttactttgcacgcccatgggaacttgatgtgttagaagtagggtgggtattcggtccgactgatcggttcggtctcttgttcatttaaaatttttgtacatctaaaaccgaacactaaattcattgcaaatagttaagaccgagtaattcagtatcattatttcgtttcgatctttggtcatggctaaaataattggtagctttgtacgattaaaaaaaacacaaaacacaattaaattttagcaacatttcctctcttaaaggacatgttttgatagtaaaatatcacaagatatattgtttgctattgcaaacaatatataacacatcaagtcatcaagatatcatcatagtaagtccaatttagcattaatatttacgtcacacatgatacttaaataggctttaatgatataattcgatctattcagtcatttccaccgtactaatttcagtagtaagaattacttatcaaaatattcggtttcagtcttggttagttcgatttcagtcattcttttttttttaaatcgaagccagtatttgctggtgttatattaagtaggatagaagttatttatagagtcacgaaatatgaaagagataaaaccgaaaagaaactgaaaaggaaggaaaataacaagacaagacatcctcgcatgtgttatattgggatattctcgtaatacctttggcgctgcacataatccacaccttgttctcatatgtgattttggtcactagttgagggaattgagcctactgattgtggaacactcgtttatttcgttcgcaccagattccccaagctaccatcatatgaattaattcaattgccttcgttttgtgtttttccccttgggatgtccccttattcaccggtcaaacagtggctcgtcaccatcgtgcacgtttggtgtcttgcatcccaactgttgtaagatcttctcccaaacttgttgtacaaaggtgcaatctttgaaaaggtgttcttgccggaacctagttagaagcatagaaggacatggctgtgatatcaacattttgagggataggcttgaaatattcatacatcgacgaggcagagtgggaaatggggatgctttgccagtccagtgatcaatttctctggcaaccctattggctgttgagagctggtcctgattggttaaggattatatagaaggggaaagggaatagcaaagtattgccggtgtgtctccagaccatggattattctgctgtccctatcaaccccagacgatgcctttgtttatgcaaaagcatggtgcgaagtgtaccatactgaattccatcggagtgtgagatttcagcctcaacttcaggtgagtctgtgtattgtacagtgtacataacactcttggagcagagtattactacctgacaagtactgcagctggcaaatactgcctcaacttcagaatattcagacccattatagggggaaaaaaagattcagatgcctaacatctgcaggctatctgaaatgtagtatacatgcaaagtacattgtactctaatcacctatcttgcactaatttcagagcttatagtcaagaatccgaacttggcgtgcaagaaactgaaccttttgttaagtaattcgtggcctgcgtgctcatcacagaaatgaactgattgaataactcacctgggacgccaaactgtgtagtgtgcttgcatggatgtgagtcaaaagcatagctttcaggatccatacaaaattctctcttcttcttagctgtgcaaatatgtgtcacaatctaagctctacaccttttggtaatcagtgacagtatactattccaccagctagccagacagtatatagattaagttgtttcccctagacaattatatcaagattgctagcctgaatccagcccagaaattggcactggagcgaaatacgtcagatcgatccgatttccgaatcttcctggaagcatcagaagaagcggtcctgaagcggtgcatttccgtgtcaaatagattcgacatggttggctgtccatttcgggaattttatacaggagtttaatttcttctgccattcgatgcctatgcagcaagtgcaacaagaagaaacaaagaacaggccatttcccagcagcactgtctgaacttttcgcgtcaagtcgtcaagattcatcagggagaacagccagatattcagacaccttttcatgtagttgctggagcgcttaagctggaacagccagagcaaaacgctcgctctggctttgtgtttccttcaccgcctctcatgatcgaattctttatgcagcggagctccttttgtggcccccgttggcttctcccatatcccaacattatgcatgcacctcgcaacatgcgtacgtgttcctggatgcatatgggtacagatcatttggctccgtatgggaagcagtacgaacagcgggggcgcgcacgtactacacaagtcacaagtggcccatgccgcgagtaacatgacaaacagcgaaacataagaaacggggtttcccactggcaattaaaaaaggaaaaatctgaagaataggatccaaatcatggagtagggtaagcggagcaaagagagaaaccaaaaaaatttgcccagaaattctgaacagttctccataggcggggctggttttcacaatttagaccatgatctaaagtgattccgcggctgcagcatgcagccacaacaatcactgccgaaattttttggaaaagtattggtctgttcggctgcaacatgcaacggttattgacaaccaattactgcttagttgctgccactaaagaactatcgtccggctactaggcagagttgcaacaagccgtggaataggctcatttttttttaagctagacacctagtgaagctttttaccgaaatggagttttgtaagcaatgctatgacatttgaaaccatgtatatgccatgactcatatgatttggtgccatgtagaaattaggacaccacataggataatccatgaagaggttaacattagcacacttttcaaattgttaagcagtgtgttttgtgcgaaagcttttatacatgaaagctgctttaaaaaactaaataaatctatttttaagtttgtaaaaattaaaacttaattgatcatccgctaatggttttcttgtcttatgtaccctaactttatcttcatctttcattagaaaagaacactacttacatatcacaatttgactttgtcgctaactcggagtaaatcaattgactgcttctaatcggatagggttttgaagacggggtttccaacttgaattgtaggtgacacattgagtgactacacattatactactccctccgttccttaatatagggcgcaactggttttttgatgtgtatcaaaatatagggcgctcatgcacatgcaagcaaatagcattaaaacaaaagtataaaatctggttgacttccgcacgcatacatgcaaaggctttcaatgcttcttcggtttttgcgttgcttatcctttcacatgccaaaataacaggttgtttgcagggaagaatgcaaagagctgcatgcatgcatgcaaagaccgatgcacacgggagaagcaaagcatcgcatgcgtcgctcgagaaaatcagttaagtcttcttggtattgccgtccagagcagttgcgctctatattaaggaacggagggagtatgtgcttgccatctttggtcaaatcgattgatgccggtgatccccttctctagtaccaaaatacggagtagatgtaaaagagacacggatttttatgtagaaaacacttaataagaccacgaatattgtcacgccccgaactagtaccgaccggaactagcccgtgacgctccaaattaacctgttaatcgataccagtcccaggaaacagtgctggtatcacagggagacagaatatcacagcaacagaggtctctttattatagagtagaagtacagtcatgttgggctgcggacagatcccgagctcacaactgcattacaaaagggaaacggaagccatgacttggaccaaacatcacaggcgcgacttgggaactaggccgaaaccctaaaactcatcgaagctggcttgctcctggaagaactcctcatcagcgggatccgcttcatcttcttcagcaactgggggggggggagattatttatatagagcaagggtgagtacgggagtactcagcaagccaggggaaataagtgtttaatgcaggcctcaaagaaaggctggtgtttttgcaattgattttattcgaactcttttttgaaacaactaagtgagtgcttctcaaacgacacggatgagatagtgcgtctcgtccggtcggagtatgtgcaatgtatcagtcttttagaattgaaacaaggttggcacccggccaacagcttttcaacggccacccgggccaacaacttttcaaacggccacccgggcctagctgatcccatcagctacagatttttcaaacatcgaaccacttttctcaacagcaatttcacaaggcagtagtcaaacaaaactacgctaggaatcaccccacatccgcccatgaccgtgggcacggctgttcgaacagtttgttaacctctgcagagggggtacactttacccacacgacattactaacccggatcacccagcccgtggaaatcagccacgtcgggggacctccaagctttcatgacaaggcatttccaaagccgacacaggtttaccatatgccgacgagaggggtcccagaccaacaacaggttaggtcccagaccatactgtgccaggaagcccaggggtcctccccgacaccaccccggcgaatccacatgtctctcggcatcaaggctcccctggtaaactagtttcttagccaggggtgtcccattccacccatgtggtcgtacttgtcttatgtttggatgaaattccaaggaaacggtccttaagtgcaagagcgggaaaccgtacacccggtacgttccccggtccgcggttttggaaatttcatttagttcacaagcaccgacccaggtgtcgggttttccaaatcttttgtaaaacccaagttttacccaagatgtttatcatattttaagtttgagggcgaccgtcgatactcgcacagagtgctcgagtatcgaggcgcaactggatggttacaaggggacatggtataacaattagcaatggagggatcagatgcaacaagttaggtaggtccgccaaactgtcatgcggacggaacaagcagattaagtgcgatcctatcaatgcataatatttttcaagcaacataattaaattcaaatataggctcaagatgttcaaaggtggcttgccttgctcgagatctggagcttgatcctcgaaatcctcgcactgcgggtcttcgggctccgaaactacacgcaaaacgggacaactcaacaaacggcgaaaataaagccctattaatgacctctaagcgtgccattagatagatctcgggatttgaggaattttgggagttgaacggagtcaatcggatttacggttgggaagatattgaatttctaagattattggatttttggtctaaaggaaaaggatttaattaaatcctttttggaaaagaaaagaaaagaaaagaaaggagggagggaaaacagacttttctcgggcggctagggcgcggcccgagagaaagagcggctcggccgagtttaacgggccggccggcccaagaaggcggcccagagcggcccaagatgcgcgcgcgcggaggaaggagagagagagccggtggacagggctcacctcgcgcggtcccgggtgggacccgcttgtcagcggctcggctcaccgtgcggagggagcacgcggcgcggcgctagggtggaggatggacgtgatgcacgcgcgcggttcgcggtggacgtgggtgcggcgggtccacgcgcagcctcacggctcgcggtggaacgcgcgcacggggagggactgaccggggtcggctcgacccggtctaggctgagctggcgccgacgtggcgcctacgtggctgccacgcgggccggcgggaggtagacgacgacgccggccggaacagacggcggtcgacagcggcgagcgacggagcgaaccacggcgatacgggcaaaagcgagcacaccgggcggttgcacgtgacgaggggagacgaaccaacggctcggatttgccgggggttgctcgacggcggcggattgcggcggcggcaaccggcggcgggagaagggggaaacggcgacgaggtcactaggggctaattcccggcggcgagagcatctacgcgattacgggaatccgatgctagcatcggattgggcggaactacgccgagcgaggccggcgacgagcggcgcttccgagctcaggcggcgacggcggcgagcacacggcgagcgacggcaacggtcggggcggcgccggctaacttcggggaggctactcgagctactaccgaaagctaaggggggagatggagcgaggaggaagaacggagggaggcactaccgtgcgggacgggcgcggtgacgagaggccgacggcgcgggagtgatctctccggcctcgggccgaggaagaggaagaagagggcgcgcccggagtccccttccgcgtccacgaacgcaccggctctcccggcgcttggcgatggacggcggaggcgagacagagcacgggagcggcggcaatggcgaggaggcgaatgggagaggaaggaagggagggggggaggcttgggtttataggaggcgggaaggtcggtttgggagagaggaaccgacattgggcggtcaagccggcgagctggcgctccggctagcggccaaaacgacgacaggaggtgacgccggcgagaggggaaaaagggggaaaaaggggaaaatgagggagagaaagggggctcgccccttgcctgtttgggaaaaggcggagggagcgggggcgacgtggcagggggaggaggggcgctgcctccgtcccttggcggcttgcgcgcggagtggcgggggccggg

SEQ ID NO: 7963 - DNA, 12581 bp, Oryza sativa
tttgtcatctgtttttcgctttgctgtccagttggaagtgttcaagaagacgcttatgcagtcactccaggaagatgaagatcctgctgtaagttatccacgactctgcgtttgcatgtttgtgttgtatttacttcaagaacccaacagtgactagagcattggaatttggaacttttgccctaattttatttgtaattctttttgattggaagtgatttttcttgttaaaaatactttgctgcagaacactactcctaaggcaagggtcagcgaaacttcaaatttctcctctgcaacatctgttggaggtactccaaatattttgggaggaatttggtggttgctaattgcatcgatttgcattgtgccatatgtaaccactagagtaaccttgacagtctgtttctatcagatgaagattctgcatttccagtttccaaatcgtcacaattatcagaaaccgcaagttcagtctcagaggaaagtagtcatgttgagccagatggtacattccattccatctcagttgattcacgttgttcaatgtgcaactccttttggtgataatttacataaagcacctttttatacttgcagtacccaggccaccccgtccacatgtatttttgccatcgtacaacagtacaccaagggttactcccccagactcacctccaaggagtttcgcgtcaatatcacctccaaggcggcattcaatttcaattacatcaaggaatttgtttgatgacaggtcctcggcctattctggtcatagttcagtgacatctccatttgatgcaggaagtcacacaggttagctgtgctagctcgaactaaatatctatgttcttgtttgcattgtaatttgctaatacttttgtgtgaaataaggaaccttcatatgtaggatgtattaatataaattttgtgagtaaattagtgaggctgagattcttcaaggacaaaaagctgactcaatcaaaatataccactgaaaattggctagtattctgctaatagagttctgtgttttcgtaatttagaacttataatatatataaaaggaggaaacctaacaaattgcctggtcatatgattcaatgaccatccatatgtgataaaggcttctatcaagtctcttgagtatttgcatgcaaaaaatatcgataatatctttttatgaattaatgaatgtcaaaatgcaatctagattccaaacagtcagtctacctttgtgaagaactagcaaactccattaaccatccattctgttgcactgatagtagagagctgaaatagataatctgcttgaagcaccagcattttaggacaaatgaaaaggattaattggtcagatagactggtaccagtctccagtgtagcttagggtttgatttctgactgagcatgctgatcatttccatgaatttagtagttctctatgtttattgtttgcgcgtttgttttccaggacgaacacgagttgatggaaaagagttcttccgtcaagtcaggtatgtggttttagatgaacatgactttggagagtacctctagctgtgccctttatgttgtgtaactttcctttagaaaaggatggaacatttgcttaggagttattgtaattccctaccttctcctagtccacttgtaaagttgcttaaggtctgccctgttgtgtttttttttcccaaaaagcttgacattataatgtacttgaagaaccacacaatattgcgctataggaattgtattaaccccggtccctgaagatccttttttcataaattgcaaaaacaaaattatggctgtcttgttgcttaaccaccagaaaagcaaccttttattgcaatagtcatggtgcacagttaacctccacattccttttgacttaaatttttgtgtgcatgcagaaaccgtcatggtgcacagttaacctccacattccttttgacttaaatttttgtgtgcatgcagaaaccgtttgtcttatgagcagttcagtgcatttctagccaatgtaaaggagttgaactcacacaaacagaccagagaggtataaaactatagaaactgcacttactgtatgttctactatatgtgaatctgtatctccctttttgtcctaggtttttcttctcttttggcgcttattgaagcttctgtgatgcttacaggatacactaaggaaggctgacgaaatatttggtccagataacaaggacctatacaccatctttgagggcctaattactcgcaatattcactagaatcctgaaaagtcaaaactggaacatttcttgtaattaaaagcggtccaggtttttttacaggaattatgagaaaaatacgtttggtactttttgtatttcagtggctactaatttcagatttctggtgtatagtttttaaaatttattcttgatgttaatgtagaatctgtaaggtatggttatatatgtaatacaaatgaaaaaaattggaataagagccaatgtgtttttctttttattaaattcaaaatgtttctaataaccacagataaaatgcagttgaaaacaagagcaaactttcctcgcatgtatcagtcaatcaaaccactttgaagaagataaattaaatagcaccagtgccctttcatacaagtgtagctctattgaatattcttttggtaaaaacggcttgatttgccgcagaggtaaataatttcagactgtaattatttatactgcttgaatgattcagtggttcagagcacaaactgaaaaacgtatcccagatttgctggtcacatcaatgctcaactacggtacaaaattcagaaagaaacataattttcctttttgtgtaatcaaaagaaaaaagataaatgattaattctccaggttacttcgcgactcatggagcgattcttcagcacccagtgacacccgttcttcagccacttcaagcattatcatgtcagctttcttattacctgtgctatgtaatctttaatatatttttttagcacgctaatgctactacaaaagttcacttttgtttttttatattccctgaactatttaccggcctgctccaaattgccttttgttcttcaaaactcccaataacggcagactgtctcttgtttgctaaagaatttgccaattgtttgctatatatttcaccatcgaaatcgctcaatacccttaccagctttgcactattcttgctgatgacaatctgcccgtccgtgcttttgtttgtgttggcaataacacttactggcttgagttccactgaaggtttcagtcctgatccttcaaccatgtaaactgctccaagaatttctcccagaaatatgtcctgatatcatgaaaatttacacaaagaagttatgtgacaaaacggtatcaaagtgagaaaaaaataagatagagatggattgtagtcactagtcaattaccaaatgatgatacagcttctgtttgatctgaagttcttgcagcaacgacaacaattcatggacaaattttgattcatgggtatgctggatgtcttccaaagccgcaaggacagcccgaaatgatgcagcctttcgttgcgccgtaagaggaatgagtgcgattttcagatcagattccaggactgtttttgcagctagtggatcaagaaatatgttaaactctgcatgtttgtttgatggaaccgtgaacaaatttccattctcatcgcctccatctttgatgagtccaccaacaacatagactctctgcattggaaaaggttgtttattgagattgacgaccactgatgaactcatcacaaactaaaacttattttggaagatcgagaactaattgacctctattacagaacttgcatccctgtcagagagtgaaatgttggccatattggtgagaggtccattagtaagaacagtgatcttttcgcctggatcaagctgcttcctgacagattgccaaacttcaagagccaaaggctgccgatcttctgggtgatctaaactttcaggagcatatctgatcgtgtaattaacaatgtaaaaaaaatttaggacaatcttcaattaattattcctatgagagagttcctttactgtacccacagattagtgtggactatatattcagagcatgctgcagaagcagaaggttaccttctaggacttcttggcagtgacctggctagtccatacagtgtatctgaatcaataaaaccaccacttccatgggggatagcataagaattgttgcagccaagggttggaattcccaatgcagtggtattgcctaggcctactggaatgtcgtcgcggcccatcatatgtagaatgtcgtaaacgatatcgatgctcgcaatatttgcccagccattgccattgaccaaaacagcctaaaacaatttttaagacagtgagttttgcttgatgttgtcaacaatgattcaaaacaaatgctaatccattgttgtacatatgagaaatgacaacatgattttgttcacttaatgcatttgccatacatttttttgtttccttacctttagatctattacttctattggtgtcttcaagaggtatattagggaaacaaaatctccagggctcatgtccatgtcaaaaatgactggcttccccctgctcacatttctgaaaaccggcttgtaaagaacttctctataatatgggaactgcgtattgatgttgaaaagcccagtttgttcgggacgatttaagacctgcaggaagcaatttcgtcaataacagtaactttattagacaaaacaatgaaaatattcatgtcataaccttgtcattccctaaaaataagaattcaaccttctcaaagatgagcaaggaatgacatgcatgcttacctctaagaagctcttggaaaattccttttctagtgaactatttttatccgtgttaggctttgctcttgttgcaacacgaacccgaactccttctggaccagacacttctctagtgtatccatcctaagaggatttcagaaaaatatcaaaatgtatcttgtctcatgcatagacagaattttgcatgttgagtattaaaaatgtgagatcatatcatagcaactgggagatcagcgatggagatgttcagaacaggaaattttaacttgctcactttctaattatcagtgaactaaatggatataagaacaatatccataaatacttttttttttctaataagcatatctatattgttaaagaacattccaaaagtataacaacatttttcaatcaacaacatagcgatggagatgttcgcaacaggaaattttaacttcctcactttcaaattctcagtgaactaaatggatataagatcaatatcaatatatacattgttacaacaactcgaaaagtacgatttttttttttcattcaataacacatgcacattacctcgcatctccctctgttgcttcccggtaccaggcagaagctatctcttattccagtctgaacatggccactgtgaactccaccctctttcaggccaagtttaggagtagcacggccatcgaaaaaggggttcgagccgtcacgtttaccatacggtttgtttgaagttatcactgtaatgttcatatattcaagctcagaaaattcattttcaccatcaacctcgccattgcgcatgctagagagagccacaccagcagcaaaggaatcccacatgtagtagctctgagtaatgaaagaacaccatgagaaattgggactttttttaggcgaaatttcggtaccaaataaaagttgtgttgtttttttttacaattgtgaaagaaaagggagatttgagctttggacttgccgtgttgccatggccgttggatcgtcccctcagcctcatcaagaccttatcaagtgactggaaacagtactgtgcctcgtaagtttgctgatgctgttggaattcagaaacgaattcctcggtgaccgaaattgtgttggtcgcatcaagaggaatcatcgtgattggaatcccggaatgtatgacctgaagatatagaaacgtagagtcggcactattactcaatataatcagttaagtcttttttttttcgattgatataatcagtgaagtcaagacatgcactgaagtagctaaagttcatgcatttcatcgtctgcttgttgacttatcatctacagcctacaactaaaatttgaatttcagagttgattttatggtttttcatcgtgatctattttccagccttacttttaaactgtaataatactaatacaaaagtttactcataaattatctttggttgcctctacctgtcgtagcttattaaccacattgttgaatgcaataaatcacgagataattgctggatcatatgcagcaaaattaaaattaaccatgggaaagaaacagtttacacctatattattgctgctagaggcagcgaacagttgatactacattattattgcaaatacaattaaggtgacctgaatacctgataagcagcgaaggggtctccaaagatgttgaactcggcgaacgggttggtggcgaaggcggtgaacaggttgccggcggggtccgccgccctgacggcgccgccggagacgtagacgcggtcgatgttccgagccaggcgcgggtgcgccatgagcaggagcgccaggttggtgtgcgccccgaagaggagcacggtggtgggcccccccgacaccgtgtcggccatcacccgctgcgccgtcggctgcgtcaccggcctgtaccgccgccgcccctgcggcaggaaccccctcctcacgccggagttcgtgtcgacgtccagccgcccgccgcgccccgccgggaccgcctgcctgtacctgcagccgccggccgtcgacgtgccctgcagtacacacatcgctggcatcgatctgcagctttcttggacacactacaccggactaggtcacctgttccaaacccttatctttaacgggtttaagcttggttacaaactaatgatcactggtgaggatcagtcacatttaacgggtggagaaccgtcacaatgactccacccgacacaatgatagtcaactctgacgagctagaactctacggtccgtcagaggtaagtgacacacagcaacacacagtactactatgagttttgtagtacctggtcgatgagtgggaggtagccgccgacgtcggggccccggagggcgccggagtcggagacgccgccgtcgccgccgacgccgacggggatgtcgtcgcggcccatcatgtggaggaggtcgtagaggtggttgacggcgtgcccggcgtcgctccactcgttggcgttgatggtgatggcctgcgcacgcgcacgcgcagcgcattgtgtacgtgcaaagaagaagcgcccgtgtcacatcacatcgatcgatcgatcactcagcacacaaacgcaacgcagagagcatcgacaagacggcttatcctgtggacaaatggcgttgaaacatgcaggtaggagcagcgctggtcaaaggccggtcgtctctctctgcagggtgtgctgtctacgtcaacgtttaattaattaattatttaccaacttaatgatgaaatgacagtgtaggtgaggaggagagccacacgcgtgcgacgatatcaccaccggagatggaccatttactccgagttggggagataatagatacgatcgaaatgatcgagatcgtcatcgtcttttcaagagattgagccagaggcctttgtaaaaaaggctatgtatggatattttttacggtatactccagaattatctggagcgagagaccgtctgttttgacagtgattaaacgcttcatatgtctattattacctccaataagaagatgattagtggtaaaatgatcgtatctttgggaaaattcatgaaacaaattagctagacgcaggcagtatcgtatggagtatgcaactcgatggccatcagcgttaacgcacgtattaccttgacgtcgaactcggagcggttctgcttgaggaggtagagcagcgcgaagaggtcgtcggtgtccatgtccgtgtccaccaggatcctcctcggcttcgccgccgccgccgccgccgccgccgccgccgtggcgcggcccgcgccgccggccgccacgccggaggcagcgggcgcggcgcccaccgccaccaggagcagcacggcggccgccgtcgccgccgtcctccacatcttggctctcctcttcgccttctccgcgggagacatgcacacagcagcagcaggaggaggaggaagaggaggatgagcttagctagctggccggtgcgcctttttatcgatcgccggccggcctcgctgtgggtcggtagctgcagggcattaatgggcggcggggcgggctggcagtggcagcagccgtcaggcgagcgtggatgatggaggcctccccaatcgggcaagtagtgatgaagccgatcgggctgcccacatccacactgcacctgtatttgatgataaacacgtagtacctccgctaaaatatagtaactcttagctgcatgcattaatttagacacacaattatccatatatatagttaaaaatatttatattttggaacgaaaggacctgttcagattgtaaacaaaataaatcttactaaattttggtaatttggtaaaattttgataggatttcttatgtatttactaaagtttgacaataaactaaaaggatgcacatatttagcaattctgctaaaaaataatatggtttgaaatggtatcaatattaacaagcccgaagtatatattactttccattttacaaatcacatagcctgcctagctaacatattaaagtatggatggattaatattctctaagaataatctacacgtgtgactatttatatatatttaactagttctaaaaatgccttcaaattatgtagtcacacgacatgtaaaactttgctgcaaaatacaataaccgagtagccactaacttgatgtgggtatcggtctaattgaactagtaccaatcaaaaagccactcgatcaacaaactggctaagctagctcaaaagatttatctagagtatattaatattaataaacacttgttatttataaatcatatactttcaacgtagtggcggagctagaacgaaatgaaggacgtacatcttgcttaatttactctactttagatcaagtgtaaattgatgcgtgtgcctaagtttgtattgaggggggtgcacacatgatgaaaatatgtgagttataacttaaaaatttttcttgaccaagttcctgggcacccctcccatactctacctccgcccctgtttctagggttataaatagttaaagcttataacaacatttttaaaatcgttgctagccgtggtaataaatagtgtggtaataggttattgcaatgatttttatttagttgcaaaaaattttgatattgccataaaatggatgtggaaaaaaaaatattacaacacttcacatcgttgcaatagataactattgccaccactccatgtgtggcattagatatttaaacccaatatctctccctcacacgtgctctccacataaaaattatcattgcaatagtacaatgtattgccacgaattatttttcgttgtaataaattgatagcgatagctcaattattttggctagctagctaattattaatatctaaaaatcagccgtggataagctctttgagtcaatcctcggtttcttgtttccatgtgtcacattagaccattagatcttgagtttacgatcagataaattaattttcttgttttccctaaaattaatttcttgtttatatgggatacatcatgagtgatagttacccctactgtacaggtaattaaaccaacgaaataaacgtgaaaccgctggcggttggctcgatcgtgcccatcccggcgtgcccggcccggctggtgggttcgggaccgcgtggtcgttttccaaaaccttccgttgtggtggtggcctcgatcgtctccggccggacggcgagtccactgtccaccagaggccgccacaccctcccgtcgttgaagctacagcaacaggcacgtacgaccgcgcgcgggtgggcgcagcgcggtggaagcgacaccaccgatggttatatcatcgatcgaaattgcttgcttgggcgccggccacgggagggaatcgtgtgtgtgagacttcgtgaaagagagctacgtagctaagggggtgtacgtttagatccacgggtaaattttttttcaccgtcatatcgaacgtttgaacacatgtacggagtattaaatattagaaaaaaaaactaattacacaaacttacaagacgaatcttttaagcataattgcgccatgatctgataatgtggtgctaaagtaaacatttgctaataacggattaattagatttaataaattcatctcgcagtttatacgcggattatgtaattttattttgttattagtctatatttaatactttaaatgtgtgtccgtatattatatgcgacccgacaaatcggtggagataacaaagcctaagctagctagctttcggtgtgcgtccaagccacgtgttgtgcaagttagcgaggaggcatgaagctaggcacagggacgagcacgtagatactgttgtgctgtgtctgtgtcaccattgacttcggttgatccggacggggacttattgtcacgggaaaacggatggaaattcacaggcatgcgcgtgcattatgcacatacggctggccctgttcgtatgggctgtttgcttcagcaagacagcaactccttaattatcttttagcatattttccgaactgataataaataaggagttttgtgcaaaaaaattatataaaagttctttcaataagtaaataaatctattttttgaatttagtatttaatacttgattagtaaggcgctaatgatctatttattttttttagacgtcaatggctattcaaattaatgatataattaagcagggacgacgtttcgtcggcggtggccggtggggagtttgaattttggaagaggggtacagagctaagaaaaaaaatctattgctcaatgaaaaagtaaacattagtacgtgcaggaaaaatatatctaaagcacatagagttcatactgacttgtatatctcacagctgctaatcgatcgtacacaatttaacaagacacagagagtatggccaacaatttattaaccacgagggtggtaagttttaaatacaaaatgagaaggaaaacgtcagaattacctcctaaatgttgtggcagtacaaattacaccccttaatttaaaaaccagacattcttcacccttaacttttcataccgatgaattaccctcctggtcgattccggagtggttttgttcttacgtggcacacacatagtcgacttcggagcggttttcggcctacgtggcgcacacatggtagtccagtcaacatgaaaaaaaataaaaaatggtgggcccaattatcagtttggtatcttctctcgatcaccacatgtgggccctactctttttgtattttttatactgactggactatcacatgtgcgccacgtatgatcaaaaccattttagagtctgttagggaggtaattcgttcgttataaaaaattgagggtaaaaaatatctggtttttgaattgaggaaggtaattcgtactatcgatcaccacaatggtttagggggtaattcgaactttttccaaatgagaatatggcatgtaggacagtatgctaacaaaatgtggtgtatcttaattgtggtatatccaaccaaatgctaacctaaaaaaatatggcaagcctaaagtttggtgtgtgacaaatttcgggcagtaaccaaatagctcttaaatgcctaacttacatatatatgctacacatttaattttaaactagcatggtggcctgcgcaaattaagtggctagcatcattatattttctctcatataatagcatatatattttctcaatgtattattcaaatatattaaaatgataacataattttaaatattgtactaactttacgaaactactaatgtgtaatatacgtattgtattttatatacgtgttagttattaatagtttttaatatcaaattttagttatttgtaaattatatttctatatggactctagactactctttcaatattacttttaattccgaattttcgttatccgtatttctatgtagactctaggctgttcttccaatatttttttatttttaatcctgaatttttattatttctaattgtatttctatgtggactctaaattcatctttcaacattctttaatttttaatttcgaattttagttacttctaaattgtattcctatattgactttagactcttcttcccatgtttttttaattttgaattttagttatttgtaaattgtattattatacggactctaaactctactttttaattttattatgtttatttcgaattttagttaattttaaattccta

SEQ ID NO: 7964 - DNA, 6568 bp, Oryza sativa
aaggcgctgtacaactcttacacgggttctcgggtcgcccgggcgggcggcgtgccagtgtatggtgccgttccattgccgggcggctcccctccctcgtaattcgggccgaccgtgccagggcacgggcacgggggggtgtcacgcagacagtacagtggtctccctttgactggccagtcaagaggaccagttcggcacagccagcagtccagcgcccgcggtcaagtcaccatacgtttgcttccatcccctgcacaccgtctcatcgctccggcgatttgacgtcggacgagacgcaacccgtagaagaaaaacagaactccggaccgtggcgcggcgccgcactggcgcgcctggcgagcgtgtgcgtccatcgatttgttttcccctcggtgcctcggccgaagtaggggaccggccacattcgctgtagcggactagcgggggtgggatcaccacaccgtacagtggtcaatggaactacttttctctatcttaaaatattatatctaaaagataacaatattttaaaacagagagagtagcgctcaattaaacgcatttagatggaacagtaaaataaactcttattttaagactcagagcagtaaacttaggctgtctttagatggtggaaaagttaggaagttagtagaaagttgatagtttatgtgtgtaaaaaagttttcgatgtgacgtaatatgatggaaagttagaaatttgggaaactaaacacggcctcaaaatccaaatcaacgcacggaaaacacatcgcatgcgatatgcgatgtggtcgtcaagtggcttcatagcccggtcgttgcgccgttgcgctcaagtgacattgtgacaatgcaatgcaggatccaacgtctggaattggttttactcaggattgggcggcagagacgtgcggccgagggatcaagagctggtagctgaccgtaaaataaagagaccattccgacctgcagttttgttgtccacgcttttgaaaaccttgatgtacaaatgtacccataacaagtcatctgtgtctcctcttgtctgtcccaaaaataacatcattttgaacaaccattgaaattaaataaagtggggacaattccacttagttttggtaaagtgagagtattctatttttttttacttttatattgttatatgtgagattgattaaaaatgaacttattttggtacaactatactgagatataacttctacggtcttgaaaacataatacactgctataaataaataaagtaatacaatacacaaactaatgtttccgttaggaattgagcatggcttgttggaataaaagagcaacatattgccaccacactatggctgtgttcacatatgccggtttccatcccaaacaatacgtatgaaaaacggagcggttcattagcacgtaatcaattaagtattcgctattttttaaaaaatgattcaatataattttttgagcaaatttcgtgtagaaactttttttaaaaaaacgtaccggttaacagttttaaaagcgtgcgcgcgaaaaacgaagcaaatgaagttgggaacttggagttccaaacacacccatattcacatattcacatgagaacattgttggttaaataagtctctcaatattctaacttggatgtgaggttagatccaacacctaaacattgattgtgttcccctgttaatatggattttatggcaatgtgaaaatattcttaacgtcaaagtatatagtgtcgagatgttttgctttaacgctaataaaatttacgctaatgtcggattccttttacaaagtttttattcaatctttaaatagtcttcttttgtttaaaaaaacccaaaacttcaaattttcagccattccatatccaagcgtgcgcgcgtgcctataaaacgcagcagggaggttttttattggtcgtaagcagaagaagcgcgctgtccactgtccacacccgcacacgccgctttccaccacggcggcgctaaaccctttcgaaagaatccccaaatctcccacgctccaaagcccgaaaccctagctcctgttcacatggcgccagggctccagcgcttcaccgacatcgccggggacggcgggccccgcctcgacgccgcctccggcgaggagctcctccgcatggaccgcgccgccttcgtcgccctcggccgccgcgcgccggagcccccgggtaccctgttcgtcaccaccaggttggtagcgtactgatgcttccgccgtgtccttatctcttattttgcgcatttgtgcctaccatcccgttcacgttgtgccttttttttttcgtttttaggagggtgatttggcttagcgagacggagaagggccaaggctatgcggtggacttcctcgccatcacgctccatgctgtgtcgcgcgacctggaggcgtacccctccccttgcatctacacgcaggtgattggggaaacgaactctccattttattatctctgtggtctaactgggcaaatggtccattaggtgtagctcttatgtttttacatatgtttaatttgttggggtgtgtgtactggttggagccctggaggcctggactgatcttgaaatggtttgttcaatcctctgggtgtttttagttatgtagtggtgatgatggtggggttggtaatttcagctcaacatgtgctcttttgatcagcaatcattattttgctacttccaatatactcctattttaaaaatatcttgcagcttggaggatcctgagctttgttttgtgagccatgaattgtatatttgtttggcacatagttcatcgattgtatgattggtgtcacatgtcgctatgacaatgtggtccgtcttgaactaatccaatcttagaaaaaaacaaaagtaacttctgtgcgtgaaaagttcataaactaatttgtgtcttgattcctgggtgatcactactttgctatttgttctgagtgggtgtacaatagtgtctgtaaggtggcttagtttcctgtttgagttccctgatggtaatggcaatgtctgatattctgtttgtttaatttgaagattgacgcagaagatggctctgatgaggaggctggtggatcagatttcgaagcaaatggtgatctgcagctagcaaaagtctctgagatgcgcattatactttcagaccctggtcaacgtatccttataaacatctctgtcacattcaaataatgttgtttcccacaattttagctctgatgccttctttcttgagtttatatacgccagctgatttattttttcaagtattattagtgtaatacttcaaaaccatcttctggagactcttcttactcctatttgctttccactaccaccacaattatttcatcattttatccctatttatatggtttttaagtaataacctgttcagggaaccaattggagttcattatctttctgatgtgtgaattgtgatacatgtgttttcgcagtcatgcttgaggcgtttaattggagattatcaactaaatttccatggtttattcttatgaaattctagaaaaaaactttaggatcaagacataattttacttgctagcagtttgtttctattttatgaaaatgttagtacaaagtaacctcacgaataaataacagatgtatagcccaaatcagtttcagttatgttagcagaactgaacctgcttgtcattttctgcgtaagttttggatcctttacaaagtttttcagttgatgcacttttcgatgtcttctgccattgtgctgaactgaaccctgatcctaatgctggtaagtactagtagtatgtaaattacagttcattactaaaaaagagctcttcaacaagtcttgactgtcttgaattccccagtgcgcaatgaagagaatggctggtccggtggtgaaaatatggctgagggtgggtggattcatggtgatgaagacatgattgatggtaggtatgcatgatacattttgactgcatttgctgttgatgttcattgtagctgttgatacttcatgcaggaaatgatcttgaagcccacatgttctttacgaacttgataggccaaaatggtctacatgaccttggtcgttctgtacgtgaggtatgcactgaattggttaatgttgtcaagtttagcacattactaggtaacctgatgagagacagttcctggttttgttcagctgtaattttaatcatttattgatgttgtgctaatatatttattaagattgactttttttttcttttggaactccctaaatctttcttgttagtatatcaacaatgttagtacttagtactatcattcaaatgaacaggattcctttcctattaaactgtactgaatctgtcattgacattatcgacttgcatcatatgaacctagaactgtctttgtgcgagtgataaacttttctgacatcgttggttttttgctgttgcagcttcaaattgatgaccagcgtttcgaggatgctgaggaagaagacgagatccaagaaaatggacattagaagcagaatgttcattttacttgttccgttccttgaggggactatgtcattggttcgtctgtagattaccactgatgctgcttggttcgcaatacttgcttcttctacttcctttccctctttcttgttctataggatcaacatctctagggagcatcgatggtaacttttgtgagaaaaaggtcttgctgctggtcaagaatgtaacttgtagagcatgatggtgaatcgagtgaaattagttcgatacttttgatctgacagataggaggggaaatcgggaaaagaaatatgttctcttttcccttgtatatcatggcactgttgtgttatcatttaggatttaaagatttaaatgccaaactggatggaattgggacatatttctacctttccctatctttacaatctgaaaacaccgaacgacacccatgtcaattgtcatgtgaagtcgttgcttattagttgtcccgaattattaacctggccccaaatttctgagcatgtaaatagcacgtcccgccaatagaacttgtaacaaaattgttgacggacgacgagatgaaaatgtgcaggcctctatatagtgcttgagaacacactagcataatacggattatgattcaacttctcttcagactaacaaatcaattatgtactctttgtgcgatgaaacaaatcaattatcaattatgtactctttctgcgatgttgtgaaaaagaagatatgcgttatgcgatagcatttcctttcgcgacttgcgagttgtggctaaaaaaaatagtatctcaagatgaaccaatcatcaatgaacaagtatgaaaaggaaagagaattttctaaagcgagaagggaaacatgctgggctggtccaaaactgcagagcctggctgcagttgggccgagacgagccgagccactagtcgcatgtaaatactcgaaccaaacgccgaaaccctaatcgaagccaccgacgcctcgagcacgagcagccgaccgagacccttccgcaagagcaacatggctgcggcggcggtgtacggcggcataaagggcgggaagcttggcgtcgagaaggcccacgagctgcagctcaaccgcattcgcatcaccctctcgtccaagaacgtcaaaaacctcgagaaaggtaagccagccggcaaaacccccccaccacagcttcgactcaatctcgtgaactgctcttaattgggcaattggtcccgtcgctttactttgcttataccgtgatactccctccgtttcacaatgtaagtcattctagcatttcccatattcatattgatgctaatgaatctaaacatatatatctatatagattcattagcatcaatatgaacgtgggaaatactaacttacattgtgaaacggaggaagtagtttactagtcactgtgcacctttagatttgtatgagaactgtatatagttgactggatgtgcttttggtctgtttgtcaagttgtggcatacggtgttgtaaccgctgaattatcggagcaatttaaatcttttgtatatctgttcatcaatacaatatggttggagtgtgggagagccgattggcgaatgccgttcataatatttgctcctgttactcttcattgcaaattggaccaagctgttatacccaattttgatatcttgtgtattgctgaacattttgtctgttgaggtgtgtccaatcaaggattgggctagtcaagttgggactggtctttgggttttcctcaccgtcattgtgaattgtgatcgaatatgctattacctcctatgtaatttggtatgatatactataaaaggtgctctgaatttcttcccatagacttgaatttgtcatctcatatatctatgtatttgcagtttgtgcggatctagtgaagggggccaaggacaagcagcttagggtaaaggggccagttaggatccccaccaaggtgctccacatcactacccgcaagtctccctgtggtgaaggtattgtatttctatgatt

SEQ ID NO: 7965 - DNA, 7913 bp, Oryza sativa
attcctgcaccccttttagttttaagtcttctcgaagtggtaaaatatccccaagataacctactgtcattttattctttacatcgtagtggatgacattttatctaaacccagcgaatagagtggcatattatcctttttctcccacctcactgcctcccgtatcccgaatcctactaccatcctccttttcgtcctatcctctcccagaccatggggatggaagcgccagatctaccggcccctccgaggtacgcgccactcgtcaaactccccttttctttttccagtaccccaagatctgtcaccaccgcctgccgccaagttctaaacaatgcaggattgaggtggagaactgcttctccctctctgaaaatacagggtccatggtggacatgatcaatgtcgcggcacgatgtgcctttttactttgtgcaagtgagatttcatatgatgttggagaacgctacaatttcgcgagcattctgcttcatttcagatacacctgttgctcactgcacaaactcctggtaattcccatggcatctgatgtgttagtagtgtggtatgatgcttcatgaatttatactagtactaatgtgctagtgttagttatagaatgtttattcatcacccggttctttccagaaaatattgtacagcttatacccaatcttatggcttgttttcatctggagtgctcaagcctcaagggacatacatgtattactgctactaccaccacttaacaagttacatactcattttcatctgaatcacaattctaatacttgtttcttatgcccagtcaacactaacttaaaccagttaccagactgaacattagataacaaatgtcccagctcccttatcatactagtggttaatctctcacacgtcatattaacttagaaagatgctttaaatgataaccaagtattacaactggtgcctgatactctgatagaaacctttgttacattctaggactcggataaatgacatcatctattatcaacaagggataactcttctgtagtaggatatggatatccatgtgaggtcatcagagtagcaagttgatggatcatcgccatgatgctattgctgcatacggaagatgacctgatttatctataaatgatgcagtggtgctgatgaccaatgccatctctgcatcagtcaggtccaagtgaaagcgaaaaaaaggcttttcagaagacaagatcaagtgactggacggtcacaatgagagcaaactcgggacttatctttgccgtgatgatcctgataatgtgtggcgcatctgcagcttccagtgacaatgatgagctggtggcaccgttcgacacatccaatggcctgagaacgctgtgaacggccacttgggctgctaccccgggtgcttcagagactgtgttacaaggatgcctgaatgctgttctgtgaggaaatttgctgtcagcatggccgatctccttcggttcacgcatcagtaattcatctatttgcgttcagataacgttgtgaccatttctttcagtagcagtagcttgcgtcgctctccgcatgagtaatcttaagtctttggcaattcactgtaatatatactaatatgctcttccgcggggtcccccattttaattcttcaagccggcgaggtgtgtaatagattgggatggcctatggccgtgatctaagggcagttgatgtttgtgaattcagactgttcctgtcgatgtcatggaacgcattgtggacttgtgcttggttgtatgaggtgatgtttgattcactagcagtcactgttggttagatgcaaaaggataaatggcgtcttgcattgctgaccccttactggttgcagtccagatgtaaaaaaaaaaatgcagatgaacttagaagaccttggacaaggataccaaactttaatacccatgtgtgtcaattactccattctgatctgaagattgactttgcagtttgcaatcttgctaaactgaagatagctgtaagtatggtgaaagaaaaacaaaagctaaaaaaaagatgttgtccggactgccatgtgcattgtattctacaaggcggtttttgcagggagataatagaggtgcacacaactcgagtattctgaactctcgcatatgatgcaagtggcattcgcgagttacttagtgcgatgaccacagatctcgaaccaatgatccattttctttttataactatgatccaatgatctgcaaccatagatgtattcccatgttacctgatacaataagatgtgtcagttcatctatataagacatctacagtagtaagacgaaagggagccaacttctgtagaacagtattagagagggtcagtattgctcatacaacttgtcctatatggccgtcactacaacgggatcaaaggccatcgcggtcgccttcttgtgcatcgcctgcttcgcccttgcagcgggcgccgccgccgacgcgccgcggtggcttcacatcaatgccgcgcgcgtcggcacgagctgcatggagtgcgtcctctcctgcatctccggcgggggcctactcgacgtgtgccgttctctctgcgaggatttatgcgatgatccagaagccttcacagtcgtaggtagcagaagcagtagtcactgaaacatcgaatggcccatctctgccagtattcagattgccgtcgcagtatcctcaggtccatcttaacttgccagctctgtccgctattactggttttggatcctggatgaatgaagtgatgtatttgctggttctcctgtttatgcactgtcgcatcatggccgtgatgtatcatgtatgtgccctgttcgatgtgtgtgtttgactgacaatgctagatttgccgagccaaagatgcctccgacttgaccctctagaaaggcagaaaccaatttgtcactacagatctgcaggcgctgcatgctagcagcaccgtaatttacagataaaaaaaatatgtgttcaacctttctcaaatcactacagagtctgtaactgcttggctgatcagtttggatgcacggactcaagtcaatcaacatccattctgatcccagcgacagagccactacttggctgatcaggcaatttactcttgtgtttcaatagttgtaagaatcgatctactagtatcattacctggtcgagattcgagagacacgatgaataaatacgtagtacggcatagtgctcgaggccaggtagcagttgttcgacctgtgcggatagtttcttcagaaagagaatccaagaaacaggcatattcgcaggcgcatcgttgccaaccgcccggaacaaacgtcaatcaagtttgtcctacgaacgcttcactcctcgcctccccgctccgcgttcttgcggtggattcgcatcttgtgaaatgcgaatccaaccgaaggagaatcggttctacaaatgttcgctttcgcctgaatccaccacaattgcgtgcatgcccaactcgaattctacgaggaatcggaatcatgaacctctcaaccacgattacttgtcagttgtcaccaggcagataacaagcacatgcgtgtaacacctcaaaaacagattctgaaatgcgaattccaaagccaagtggctacctgtacatcgcaatcaccaggtcggttcaatgttagcagtgtgatcacgcattcacatatatgagacccgtgaggccgtgacaaacatactgaacatatgttggaaatatggtcataaatcgatatattttaatccaaaatgttaagacaataatcatgatataaacagtgtagtgtgatccaatgacaacatgtaacattactagtagcatactaaagacatcatgaacaacattatgaatatcaggaataagaacatagcagtaacgcagtaacatgctagaggcatcatgaatatcaggaacaggaacatagcaataaagcgctaacaacgagaacaggaacaggagaaggatataccctgagaatggccctccgctggattgtgaggcagaactgcctccgttggcattgttgttcgcggcaccggctccagctcctggcgcaccacctccagctccagctccaggtggcgcaccacttccgccatctcctccagcagcagcagcggcgccagctccaggcgcagacatggtgggcgaggacgaggacgagcagtcgtgcgggaagcactccccaaaaacctgatcacctgcctacccggtacgcagatctcaggcgaaggtgtggttccggaggccctgctccttccgatctctcgtgcacgcaagcgatcagaagcgaggaggcgagagcagcacaggcgcggaggaggaggaactaacacccgggaaagaaacagcacaggcgcggaggagaaggaactaacacccgggaaagaagcaagcggatcgttctgatcggactcacggcctccttatctatcaggagagaggcagtcatgggaacgtgggatcatggacgcgctgttgtggaggcagtcgatcggactcacggcctccttatctatcaggagagaggcagtcgtgggaacgtgggatcgtggacgcgctgttgcggaggcagtcgtgggaacgtggattagtggttgcaaaagagtagcgacgtgacgcacgcacgccagccacgcctcgccctcggcctcggcccggtccggcgcgcttgcgcgtgtggctttccgacccccacctcaaccagtcaacagggagcctccaataactccctatttaggttgagatattcctcgcttaaatcctgaggtggtattattatccttaacacttattatgggcctttgagatttaataggataaattgggcctagcccatttattctaacaatccccaccaaatttcaaggcttataagaaatgttctcaaggttgtgcctgtttgatataccagggttttggtggagactgttaagttgaacttccacctaggaaatgagctacatcagaccacaactgaacaatggactatgccttgaattgtcagttttgtgtgatctggtttcactcagacccttgactggtactgggctgccgttcgcatcccctctgtttggagcatataagtcaaactccaggcctttcatgagtatctagagatcgcccaaacctcatagactgtgactagcagtcgaactcatataggtgtgttccttctgagatgttctgcaggtcaacatctctgcttggaaaagccactcggatcacattaaggcatgagccatcttaccatgcaggaaagaagagaagtacatcatgaaaatgagcccttttcaagggtctcttctctcagtcacataatagtttgtttcgccatccaaattcacgggatctccgatcacaatggacaggtttccactattgtgcgaccttaggtgggtatcaagcccatttccctcgatgcactgtctatcacattacgtggtagccccttggtaaactgatctgccagatttctagccgtttggacatagtccaatgctatcactccggagtttttctgctttctgacagatttcagtcttctcttgatatgcttagatgacttcatgttgtcctttgaactgttcactttaataatcactgtttgattatcacaattcattaggatagctggcactggtttttcaactaccggcaaatccatcaggagttcacgaagccactcggcctcaactgtcgcagtatctagtgctgtaagttctgcttccattgttgacctcgttaagatggtctgcttgcaagacttccaggaaacagcgccacctccaagtgtgaacacatatccactcatggcttttatctcatcagcatcagatatccagtttgagtcactatacccttctagtacttttggatacccggtatagtgaattctatagctcatagtgccctttagatagcgcattactctttccagagcctgccaatgatcatctcccggatttgagacaaaccggctcatcttgcttacagcaaatgagatgtcaggcctcgttgcactagccaagtacatcaatgaaccaatgatttgagagtatctcagttgatcctttgctattcttcggtttttccttaatagcacactgggatcataaggagtaggagctggcttgcagtcactatatccaaagcgactcaaaaccttgtccacatagtgggattgcacaagtgaatcccaccctcatatcctctttgtagtttgatgttaagaataacatcagcctctcccaaatccttcatttcaaaactcttggacagatagtccttgacctcctcaatcacattgaggctggtcccaaagatcaatatgtcatcgacatataagcacaagatcactccttctcccccaccatagcaatagtacacacatttgtcagcttcgttcataacaaagcctgcagatgtaagcgtggtgtcaaacttctcatgccattgcttaggtgcttgcttgaggccatacaaggatttcaacagtttacacacaattccctcctaaccttctattacatacctgtctggttgatccatatagatctcctcctccagctctccgtttaggaaagctgtcttaacgtccatctgatggacgagaagatcatgagaggctgccagagcaagtagtactcgaatcgtgatcaagcgagcaactggtgagtatgtgtcaaaaaagtcctcgccttccttttgggtataacccttggccacaagtcttgccttgtacttttcaattgtaccatcaggcctaagctttttcttgaaaacccatttgcatcctacgggcttgcacccatatggacgctcaacgacttcccaagtaccattagacatcatcgagtccatttcactgtgtactgcttccttccagtagtcagcgtcaggagatgaatatgtctcttctatggttcttggggtgtcatccacgaggtatacaatgtagtcatctccaaaggattttgcaaccctttgtctcttactcttgcgagtatctacaatgttgtcctcctcaggattttcctcaggcgtttgatcattgtgttctatcggtgcaaagtgctcatgggcatgacagtttcttgactagaggtgctaggtgtatgtttcatgggaaattcattctcaaagaatgtagcatctctgaactcaaaaattgtaccaacatgcatgtcgggtactccagagtttactattaagaatctataacccataatgtgaatagcataaccaaggaacacacaatcaacagtgtttagtccaagtttccgctttttggctataggtacatttaccttggccaaacagcctcatgttcgtaggtatgagagatttaatttcttcctttctcattcctcgaatggtgttacttccttatgcttcattggaattttattcaggacatgacacgcagtcaaaactgcctcaccccaccattccttggaaagccccgcagtgtctaacatggcattcaccatctcagttagagtacggttctttctttcagccaccccatttgattggggtgaatagggaggcgtcctctcatgaataattccaaactcttcgcaaaaggatgcaaattcattggaaaaatactccccacctatatcagacctcaaccgtttgattttcctttcaagttggttttctacctcagctttatagatcttaaagtaatgcaatgcttcatcctttgttttcaatagatacacataacaaaatctagtgcaatcatctatcagtgtcatgaaatatttctttccccctttagtcaacacgccgttcatttcgtacaaatcggaatgaataagttctagaggtgccaaattcctcgcctcagatgccttgtgaggcttgcaaggttgtttcg

SEQ ID NO: 7966 - DNA, 21810 bp, Oryza sativa
  unsure (1)..(21810): unsure at all n locations
gcactaatatctctatccatcaagaaaggaccggatcgaaccttattggaccgcgagagcggcacgtggtagtcgtcgtcatcgtcgccgctgtcgtcctcgtccttcttggccttggaggcacccgcattgcccgccttcttggcccgagaaaccgcgagcggcacgttgtcctcttcatcgtcatcctcgtcttcctcctcctcctctttatacttgggggcggccgcaccgctcgctttcttccttccccgggcatgcgagagcggcacgaaatcgtcttcatcgtcgtcttcttccaccaccttcgggcgcctctggaccgctgcggcgccagcggaagcggcggcggcggcgtcttctccggccatcgctagggtgggggcgagggttttcggatttttcgcggctggaattgggggagaagcgagaccgcaaggccgagcgtgacgaggagacccctggctttacgggtatttgggctcagaacgctcaagctgctactttattgggctgcattctgtttaggtcctacacgaagcgttaggtaacatgggcctctcctgggaaagttctcccactagttacccttgtggcccatatccggatatgctttcatcaaaaggaataagttttgactcccttgactggtggtcgaatctaatccctattcatgatatcttgagccttaactattaaaaccgatattatttgactcccatgacgggtttggaggacggtttcattaacataacacctacgtgcagtgttgacttggtctttgcacaacgtgggatttatatagcattaaaactagaaaaaaatgtgggatccatatatcattcaaaaatattgggggacccactgacatgtgggtcccacaatcattcttcacagcttcacttattgttcctccctgtctatcccctctgtctctcctttcgacagaaccaaggctcatcggcggtggtggtggcggcgagcgggcaagagctcgggacggcagcaccatctctcccctctcccttctccaccctaggcgatagcctcggacggtggcggcgttgtcgacggagtagatcgcgaccacgatatttacagagtatggggatcgttggtaccatggtatatgcgagattgagataaaagagacggagacaaggattttatacatgttcgggccccttatccgtaagataatagccctactccagttggtcgaagccagtgttactcttattcatcaaaatcatacaagtacaatatttctgataacctatctagtcatcatcgacttagcggcatggaacaccacacatagtcaacgacgaggtagtcttcatcctcgaatacaaactcggcgagatcagacatagcgctagatccctcttgtcggcctctgtggcaccagattgggtatgtctaggcttatctctgatatcgatgtctggcggtgtgtattggtgtctattctgactgagcctcccctctcctcctaaggggtcttgtatttatacccccagatatcccctagtccaaatagaactagggagacaattatggatacaatccgagtaatccttataatttccatgcaggactctccttctacttccttatttgggaataccttccgtatatgaggcatgactccatatagacttggtatatggtggaccccgcagagcctaacccaaaatcattaggtatgtcttatccataacacttacgagcgcttcgcaggtggtggcgggtgggggctggagtagtggtggcgcgccccatggctggcggcaatggccgcagccgaggaggttagagacgagaagagtgacggcgacgggcgggcgagagctcggcggtgccacctctcccctctcccctctcccttctccacccccgacgatagcctcggacgacagcggaggtagaggagtagctcagcggtgttgcgaccagccgagtcacgagtcgacagcggagagcacctagccgagtgctctggggcaagacgatagtcgatagagacagcgatgacggggcaagtggcgacgagatcgttgaggcggaggtacgcagatgacgcgaccgacccaatcacgaaccctcgccatggaagtacacgaccacagggagcctctcatccccaccactagcgacagcggcgccgggctgagaggtagagtcgcagatttcctcccctctctctctctctccaacccttcttcctcctcactttcgctcccttatctatctatctctttctctctctctctcttcccctttgaccgggagtggggtatcgtggcgcaagcggaagaacgtggcggcgcggggtcataaggaggaggcgggaggtgatgtttgcacgccgcgcagcaaagacctcccgttcctcctgcaagatacgggccgcggagcccgagaggcggaactaggggtggttgtgcttcgccccgactgactccacgaaggcggcgggtaaccgtcgcaggaaggagatgacgtggtggtcgggggccttgagcgagaggcgcagcttggagaccacgaagatgggggtcggcgacgacgagaggaggccggccagcaacacgagtgaccggaggtcccgcgcctaggacagcatggggacggcgtcgaataacgtgtcctttccacaattccattgcatcttcacatccacacatgccatagatcagacgagcacaacgaggcgagctgtcgccgctcctgccgtcactgcctgccgccgcctgaaggggaagagaatggggagagaaagagagagaagggaaagagaaagggaggagaaagaagggaaagagagggagatggatgatatgttgggccacatgttcagtgggtcccatatattttttttgtgtgagtgataaataggtcccatatatatgtttttaattctaatgccacctaattgccacgtcaatgtcacgtgggatgaagaccaggtcaacactgccacgtaggcaccacgtcagcgaaatcgtctttcaaaaccgccgagggagtcaaattgcatcggttttaataattgaagggtcaaaatatccggtattatggtttagggatatgaatcagatttaaccattagttaagggagttaaagtgaacttattccccatcaaaatcaataaaatgttgaaccatactggcacagtccagcaaagtttcgtatccagataataacatctcaaaaataaaattcttttttgagcggtcaaaaaaaaatctagtatatgccaaccagctacaatactcctatatcatttgactgaggaagtggattcttggtgatgtggtcaagcattccccttagagcatcaccaacagtctatctattccattcccaatcctaattttttaggattttggttaaaaaaaatttggggcaacagattcccaaaagagctccggacgttttggagttcccatctccagttttctaggtgcatgtatttgagggcgagagaatgactctcaattctctttcccacgcgtttctcctctccttccccacgcgtgggcggcgtcaaggcaggtcgcgcgtgggagattgcgatctcctgcgcacgggaaaggaaaaacaaaactagaatttctattggaaatttaacataagaacccacttttcgtttttggaataaatttaggctatcttttgaagggaggggttttttcatcacctattttcagttcagaatacccaaaaattaatttttagagatagattattggtggactattggtgatgctatttaggcttgtagagttgtaggcaatgaaaggcactctgttgtgttgcaggtgcagaagatccggagctgagtctcgctttccctcacctttactcctttaggccaaaattaagggctgagcttaattagcgtgatccacaatctggcattcgattattgggctgccgcgcgagcccccaccagccgtgtcgtctgttgactactgagatggctctccccccttaatttacgtgtctttccctccacttcacacgttgctatccacggcggattccaaacgtgaaccgctctcaaaccggtttgatgacttgatgtcgtcgtttcattggtcaagaaactgctctgcaacgtctaattaaattcgcacagcgagtcagtgacagtgtgacacagacgttctctgcttccacctctagtacgtttctactctacccgccgctccgcggccgcgcgagtccaccgttccgctccacgcgcgcgcgagccctcgattcgtcacgcacacgcgcccgcgaataacccatttcatcatctcctcgcgcccgcgcgcgcggtggccactagcccaccactaccactacgcgctggtagttacccgcccctatcaccccgcgcctcggcctcgctcgctttcccctacttccagcgatttcatcaagaaccacctagcgagagcgagaccgagcgagagagagagagcacggcggcgatggcgtaccagaggggggagacgtcgtcggtggtggaggcgttcacgctgtcgccgctgccgtacccggtgatcctgatcctgctcatggtgatgctgctgctgggggtgtcgtggttcttcacgtacgaggacttcatggaggaggcggcggagcagctcagctgggcgctgctgctcgtccccgtcgcgctcgtcctcctcatccgctggatctcctccgtcgacaccttcgacggctacttcagcttctacccaaccgagcgccgctggaaccgctacgacccgggccccgccgaggggagctccccatggggcgtcgccatggtcgtcctgctcctcctcgtcctcgcctccttccactccaccttccaggacatgtggaagccctgatcattgattctactgctactcgtcgtctttgatatccgcacgcctattatgcgtacgtacgtggggttatacgctgcttgatttgcttgccggttagtaactagctagttatgcatctgtacatataccgagcttgagactgttaactcttgttttgtaattaacgcgtctggtttttgttcgggatcgagtttgttttctctgttcatccatccgtttcttcttctcttgtttgttgttcactcgtcgactcaaatattctttccctccctgttgaacgtgtgagattcttttcttttctttgccagatgattgatgctgctctcttcggcatgaagggatgcatctattccgttctgaaggcctcgatccttccttcaaaaacttgggtgacgattggtaggatcgagctgcaaccatactataactacaagaatcagtgaagagactacagatatatgataaatgcagacagtgcagagttcttttagatgaggctagagagttcgaacgcagggcaatcatcgcacttgttcgaacgttcgtttatctttctgcttggcctgcacatttttttagagatagaggctgtccaaagtttggatctaaacttcaatccttttttatcatatcaacctgtcatatatatacaattttcagtcacatcatttccaattttaatcaaaatctaaactttgcgctgaactaaacacagcaagagtataggttatttcctcaaggaaaaaaaagagagcataggctagggtaggattttgagagtcgagagctatgtatgatgtatctcctcagcccacgcttgtcgtgttgtccatcgtgtgctagcaagacgcggatgccgctttgacaaagcatggaggaagacaaaggcagggggtggttgggccgtccatatattgccgctgctgccgtcgtcgtcgtggcgtaattcaatccgatgcacgaaacctgcagcaatcagctgtacgtgccgcgacgtgcatacacgtacaccggaattggcgattcatacgagcgtattaacactgcccaaccaaccaccctttgctaattctcatcccgtccaggcggcgtgccggtccatgccgtcgtttatcatgccgatgccggccatcgtgcgtgtcatgcgttccggcgttttctcctgcactcgatcgtagtttggtgcgaatcaacgtgctgtacgtatagtcgatcgaaatcgtcgatcagttagccggtgcccgatgggcgatggcccatcgcgttgctattgccccgtgaaaatgacctcatctggcagcaggaatctcccgtacccgccggtgtccatcgatctgtctcctgtcaatcctgtgcgtgtccatcgaaacgtctgctgaaacagcgacggttttagcagagatactacgggtcgggtatgtttagttcacgctaaaattaaaaatttggttaaaattgagacgttgtgacgaaaaaattagaaatttatatgtgtataaaagttttgatgtgatgaaaaagttgaaagttttttaaaaataatttggaactaaacaaagcctacctccggacccggcctcgagagtcgagcaggtaccattgcctgtcagtgacgcggaccggaaggagaaagacgatgagcgatcgatcgatcgatcgagcagctagagggctagagctcatcatcagcgagcgccacgccgcgggcgcctgcatcaaacagcagcatatgtaagcctggatcggttgcccacttggaatgattcggagagagcaagcaaggggagcacgacaatgatgtggtgtccaccaaacacggtaattagggcaggctttttgccaaaagggctccggttcggttgttgccatgtcttcgcgaatcttttgggccgtctcggcctttttaattttctactatctctcatacagggtagtatgcctttggtggatgcttcatgtcatgctttcttttgacgaagccgcgtgcgcctgaccgacagtagtatgcatgtagccaaggaggactcttttattcgttgatgggaagtacaggattcctcgattgcgatcagcagcttacttgcggcaaacggaagaagcgtgccaaggaggcagcaactaaccggccgcaccaacttcttaccgctctttggctgaaaatttgacattttgacacttttgtacaacatattttacagctagatcgtggtaaaaaatttaacaaaaataacccttcatctcagtgtcaaatcccgaggcgccgaggtccaccatgtcaaccctaggtgtcttagcgctgagcatccaccgtcaaatgttcttataaaaccaaagaccttctgttctaagcatgatacaatggttttggtacttcttgtgtttctacacactgcaaagattcgaactttgggttaaaagcacgataaatggcaggagctaccaccgcatccgcaccaagctcatttccatcggaatcgctaattcgcgtgagcgccagcggcgcgcgtttcgggagcagaaggcccagcgccggcccgctggcgcgcgccgcctcctcccacgcttttcttttcatttttttaccgattttttttttcgttttttcttttcaccttttttattattatttttaatctttttaagtatgttttgagtttgaaagtttttaaattttgagttgaaattttttcaaatttgaacttgaaagtttttaaatctcgacttgaaagttttcaaatcttgatttaaaagtttttcaaaattttcaaatctggacttgaaagttttcgaatctcgagttgaaaattttcaaacctcaaattggaagttttcaaaattttcaaatctggacttgaaagttttcgaatctgagttgaaagttttcaaatctcgagttaaaagttttcaaatctgagttgaaaattttcaaaatttgactttaaaatttaaaacttaaatcaaaagttttcgaatctaacttaaaaattttcaatctgttagtaaaaaaatttccaaaaaattctctagaatcttttctaatttctataattagtgttaagtatatattaactaatagatatgtaattaaggcttaagaggggggaggggagtgctcgctagcagcgcttacagctaggagccccccatttatttaatccgtggaagcagcgccaacaatctcgtcgttaaaccgttgaagttcagtgttaggtaacctgctgttgacaagttcgtccttagcacctaacttcttggcgatgtttggtctattttttaatatagttaccacagtttaattataaaataagttctataaaagggttaaaatgtcaaaattgctctttggagcgtttgccggtgttggattaagagttcagctaaccagtccgtaccacaaaatcgaaccggttcagctatcagatcttgcgttctactactagcccttcagtaaaaatcggatcaatttacccctactgcaaattcaagccggttgcattgcattctctaaattaaaacatcgttaccgcccggtcttatcatattttcagagccgataatagggtaaaagtcagcaactagtgggcttcttagaatggtcctttcaagcagtctgctcttagtatagtaccaccatgcatgcaccattctctgctttctgcattctactacgtgccaagagacaacgttccacgtatcacataggagataaacgtaattttgtttttcgcgagtgttgtggagataaaatcttgtccacaatactcatgcatgatatgatcctaagaatctgtactagcatatatgggtttctcaaagaaaaactgtagcagatgtgtttttctgagaaaattaaggccctcatcgtttggccaattacatataattaatatgttatttggcgtattagcaaaattataacaaattatatataagactttcatatatgtgtttttagcaacttaaatactgataccaaaaataaattttgatgaaaaaacttcaaaatcaactttaaaattaaatttgaaaagtcaaattttggaagcggctgatgttgtacggagaaaaggaagggggcctaattctgttgtggatgtgtcatgaaaaactgtacatactgtcatcgtaaacatgactatcagctaggacgaatgacacatgccaatcaccctctatttgaaaatataagtatatctagtatataaaatttatctccatgtgatattttcatcgcacgtaaaacgaaaaaactcattagcataggattaattaagtattaactattataaaattggaaaatagattatttatttgattttttaaaataacttctacatataaatttttttgtcaaaaacatatcatttaatcccttatccttatgcctatcatccaaaatttaaattttcaaccttaaatttggagttgattttaaattttttttcatcgaagtttatttttcaacttttgcttttagatcgttaagagcacatatataaaaatttttattcataaactattttttgtttgtaaatatgttatttgacttattttctgaataagcgaaacgattggaacaaattgaagtttatagttgagaaaaggaaccgcacctaagcaatacctggcccacacctttaataccttttcagtgtatatgttatgttgtaaaccgttggatcacagccactcgatggatatcaggcattcccaagcattctactccctccgtccaaaaaaaaaaaggcaaaccctgagttttcgtgtccaactttgattgtccgtcttatatgaagtttttttataattcgtattttcattgttgttagatgataaaatatgattaatattttatacgtgacttgcttttttaatttttttcataattttttcaaataagacgaacggtaaaacattaggcacggaaactagggtttttcttttttttggacggagggagtaaacatcttaccggccggtcttatcagaataatagcagtgtttgtatgcacttgtactactcacatgacataggcgataaattaattttgtttttcgcgaatgtcgtgcagataaaatctagtccataatactcatgcatgatataatctaaaaatctctagcatatgtgtttctcgaagaaaactgtagcagatgtgtttctctaagaataatctgttgtggctgtgtctaagagatgcagacaagtcatcaagaaaggcaaattaacgtgcaacgtgctggctagaccgccagagtactagtactacctctgttctaaaataagtgtagccgtaggtatccatattcaatgtttggtcgttgtcttacttaaaaaaaatgaaatttcttttttaaaaaataattacagataaaaaactattcatattttaccatctaataataaaaaaaatactaatcataaaataattgttaataaaataatttttaataagacgaacggttaaatgttggaaatgaataatataaaattgaacttatctgaaggtggagggagtattatatagcacagagtaccccgcacggacaagtcagctagcccgacgtatcgttttaatttgcaccacaatggcattcttcctggtggcatgtctgccatgggtttgtttcatcctcctctccctgtacgtcttccagttgttcgccgatgcgcgccgccgccttccacccggcccatggccgccgaagcctctcatcggcgacctccttgcccttgggaagggcgaccagcagcaccgctccctcgcgcgcctcgctgaccgctacggccccgtcatgtcgctccgcctcggcacggtcctcaccgtcgtcgtctcgacgccggacgccatgcgcgagatcttccacaagaacaaggataacctcgcgggccggcccaccgccgacgcctttaacgccatggggcacagcgccaactccctcctcgggctggagcacccgggcgtcaggtggcgcgccatccggaggttctccaccgcggagctgctcgcgctcagtcggctcgccgagctgcagcccatgtaaggcacaaggtagagacctcgtcctgggcgtttcagagctcacgacgcgcgtctagccagtgcacgtcaggcgtgtcgcgctcagcatagcgttgaaattaaagtgtagcgccatctactcagtcgacttggcccgcgaatggacgaccgtgttcaggtcgagtggtgaaagaggccatgctactgatcggcgcggcaaaccttagggacctcttctcggcgatcgccgcccactacatacagggcgaccgtagcagggtaccggaactgttctccatcacgtaccgccaagacgaatagcaggttgcgcgtcccaggccagatcggatcgccggcaagactggcaagagcaacttgctaaacgtggtgctcgacatggagcgcgagtggcaacacaagggctccgtactaagccacgacgcaatgagagtattatttaccgtacgcacccgtcatttctatgatcacctttataatcgtacgtgggtagaagaaaggccgagtttacttccaactttttaactttttcatcacatcaaaacttttctacacacaaatttttaatttttctgttgcatcgttccattttcaaccaaaatctcaattttggcgtaaactaaacacacctaaagcctgcatgttttacatgttgatccttttataaaaaacttatatttcataaatatactttgagtaaaacttattttaatgatagacctaaaactagatgctagagccattgatatgatgatatcaagtatcaacatgtcgatgccaaggaggctatggtgtctatagcgtcgacacctggcactcattgcagccccaccgccatggctgctaaagtgtttggaggtcggctccatggctatgggcatcaggaaaagtgctacgcttaagtgctaaagtattatacataccactgttttttaatataggccacaattgattttttttaagttacttgacttctcatcatttatatagatatttatgaaaatagacaaaccatgctgctattgtaaaatactccctacgtcccaaaaaatacaacttcttcattttctttaaatataacaacctaggagatatgagttaacgtttatcactaaactagtctggtccgacactacacccatcccagacgacaaacaagtttttttttacaactctatctaatagctatgctaagagctaaaaaaaacagtactatattatggggaggatggggtaattttgatgataaatttagtgatacccttttcacttaactaagtaattgaataaatgttgtaggtcaaagtttgagaaaaaaaatcaaccatgtcatatattaaagcggaagtagtactccaaatttgatttcaggcacccatatgttatagaaagaggttagtgccaatattcctagcacctaacatctagacattcagcgtcgacaccactatggtaccataatgttatttggtactcctccgtttcaaaatttatcttaaaatatataagctttctcaaccaaataaatttctacatattttctaggaatccttatattttggatgacacgagtagtatttattatatgattggcatgttaatgattttctcgttttctcaattaaagtgagaatttatatggattcttttattactttggtgtatccaacggatacgctattaatagcgtaactagccaaatattcatacgttgcaagaaaatattgaaaatagcaaacaaaatctttgttgaaaaatatattattagttggttgaaataggatattttatttttaaaagacaaaaaaataccgtacttagaaaattaaagtgtcatggcctttccctcaaaaaaaagaaaagtgtcacggcctgcagcgagcaagcaaggcgagtattcaactatttatcacccgtatgtcaggatcctggtggtggcggacttgacaacatcactattcactactgccttttaccttttaatagtagtatataatactagttagtatagatatttctttactaattgaaagcgctcgtgtaagttttctcagtttttaatgggtgaatagctaatttagtccctcaagttttaccgaaggctcactttgatccttcaggttttattttattcacataggtcctttaagtatttgttttggccaaaaatcatcattgggcccacttaatatgccatatggctatttttagtcatcaattctattagaaaatatctcttttgcccttaacttgtatacaactatacactagaaaaaagaaaaccaaaatgaataaacaacattacatatgtacttcccattatttcaacatgtgcacatgaaaattgagcctaatggctatcgtatacacttgcaagtacataatttatttttgttttatctataaaaagaattcattacatgcaattttttctcttatatatatgtgaatgagggggtataagtgtcatttatcaaaagagttgttagttatgtgggttcaagtataaatttgaattaaaataaaaacttaaaggactaatatggacacattgaaacattaagtactaaactgatccttgcatgaaacttggaggaccactttaactattcacccgtttttaatcctagatgggtaaaagggctagaggtctccatcgttttctctatacagcatcagttgctgccaaaattaaattttcaaacccaattttgaagttgattttggagttttttttatcaaagtttatattttacattagcatttaagtcgctaagataaaagtcttacctataaattactattgttttgctaatacgttgaattgtttattatccgtatttggctaaacgatggggtataattagtgtatcgtatggttgctctaattaatatgtgagagttccatgcattcgaattttacataaatgtttggagtccatgacataaccaacaagagaataactaaaccaacgtgcgctatatattgagatagagtccggattggtcacataaagttattttaaaaatgtctacacatgtatatatactgcttcgtacgtactcccttcataaaaacaaactcaacttaaatggagatgtgactcattctagtaaaacaaatatggacaataggccgttttggtttgataccaaaacgttgccatactaattttttggtagtttaaatagtaaatgtgatgatttggtttgaagccaaatatttggtaatgcctatactcaatttggcacaattctagaatgttcttcaccacaatttgaaatttggctctcaattggcatcaatccaaagacatttatttataattctaccctaccaaaatattggtagtgccaaactaccaatatattggtaggtactaaaccaaacaagaccaatattctattcagatttattgtattaggattaatcacatatccacttatgttaaattcttttgggacgaaaggagaatctagcgagcatagttagaatgatatatggtttttaaatacatacacttaacaaacacaataacagagaaccttaaaatcccgtatattcctatattagaaattatttgaaaaattaaagcatgttatccaagcgaatacaaaggttgatgactagttccatctaatataaattgcatatctgaatttaaccaatataatctcaggatttatacggtgctggagccagtacgacctcggtattaatcgagtgggcaatagcagatctactgcaaaatccagagtcaatgcgaaagataaaggaggagatcacaaatgtcattggcacgaatgcacagatccaagaatttgacatcgcccggctcccatatcttcaggccgttgtgaaagaaacccttcgtcttcgtgctgttgcgccattggtgcctcgcagagccgaggcaacgatagaggtccagggcttcaccattcctaaaggcaccaacgtaattctgaacttatgggctatcaaccgagatgctagggcatggaatgacccggataaattcatgcccgagagattcatcggcaatgacatcaattatctgggacaaaattttcagtttgttccatttggtgttggacgacgcatttgccttggattgccactagcacaaaaagtgatgtaccttgttctggggacactggtgcatcagtttgaatggacccttcctgaagagctcaaggagactggtatagacatgacagaaaaatgtggaatggtgctatgtctcgcaaaccccctcaaagtcatggctaagaaaatgtagtgaaacacttcagtgaagtattcaagagtaagcacatttgccaaaattgatatgacaccatgtgatcgagcatatgtactgttattagctgtggaaagtaagtgtgtgtatgaataatgccgtaggtgtgtgtatatgttcagtacttgtgtaacacaggagtacaaattcagatatatatctgaagagttctgtgggtactgggtaagtaaattggctggacccttgtagagggctagctcccaatatctagttcagttgaacataataaactcaatgcttgtaaaatagaaggtaaagtgaatgtattacttacgaataaatatgttgcaaaactatgcattatttgaaactcgcaatcaaaaagcaaaaataaaaatgggaccggctaatgattaagtcattagttgaagtacatattcctctatgatgttgagcgactcatacgattcctatatgaaaataccctggagactaatccactgaaatatcggaaatgcatgttagtaaagagcataatgttggacaaatacgaaggcgagtaacggtaatcacacacaaccacttattcagaatatgacaattaagctggagggtccaaacagttcaatgattgttcatctaatctgaaggctaagtatctatcagaaattgagtgggacacagcacaaaattctcaagaaagacaaccgcaaattctttggcggagaaaacgattgttcagcttaattgtcatattctgaatagagatttgctccggtctaataaaaagtacctcgaggtactggtacctcgaggtaatttttgttggacggaacaaatctcatctgaaaaacaattttcttcggtaaacagacattcaagcctctcatgagccaattaaggtgatctgacgactgaagttaccacaaatctctttcacacttctgtagtccaatagtgatatgttggctttgtaatggccacatatttcagcaattttattcattcctgggacgtcattatgtacactctacgtggtaaaaactaagattaactgctacatcatgggcacttggaattgccctggctgctcttcaaattgttgtagcatgggcactcttccttgttcccggacgtgccggatggaacgcacaagcatttctggcagcagatattgcagtacttgaggcatggttcctggcgctttgttgccgagcaacggtagtcgcatttctgtgggcattctgctcatacatcgaaggagagaaaattcagaattaaaagtaaaaggtaactaacattcttgacattttatatgagatggtacaagaagatatgaagccttccaaagagtctgttagttgagggaacgggaaattgcaatatttcataccttctatggagacagaaccttctgcaccaacctacattacaaaaaccataaattaaatcatcagaaaactaccagaagtccagcactcagaaaatactgatgttaataacttactggtcggtaaaagcctccattcgtgctccctgaaacttcagcctgaaagatatgaacacatctatattgtcaatatatatcttgggattgggaaaaaaatggtttttcacttcaaagaagctaaaagagaggatgtaggttaccacaaaagctaacgcgagcaagaggaaaatggtggagaaaaaacgagccatttcttcttcttactacttactggcttactgcagaagtggagagtgattcttgtgagaaactctgtcttcttaccggcatatatatactgtctagctgagcgatctctggcatatggaacgtccatagaaggacctgctaacggatggataaagaaaccgaaaatttaaacgggggttttcaaaacaaatttaagatgatagtaattgtacaaataaattaattggcaccacctcagattatcaacagagtaattgtccaccttaaaggcctgctaaatgctaatggatatatacagaaactgaacaaacggtagatctgaacaacaaatttaaattatagtaattgtctaaataaaataattgatcatttccaaattaattgcccacagtgtgattagtgtgaactttttatgtctaatttacctgctgatgaagagatttacaaatcaatacttagcggcttaccaggcacttaatgctttggggcgctaaaaacagtcttctaaaatgcaaattctattggagagtttgggcgcttattctaaaattctactatgcacttatttggagagtttgggcgctggaaaaatgcaaattccacacatggctagtcatctaaaacagggtctggacctccgaccagctcacgactagagtatggcaaaataatggactttgcgccctctgccatagagaagtcgaaacggctctgcatcttgttgtcagctgcaggtacatgaaaaaaaatatgaagcctgatagctgtctaggtgtcttaccaacagcttgacactagacaatgggagacgactcagaccgtaaaagcctggtgggaggctctaacaaacatggtagaagttccaaaaaggaggatacgcactctcatcctacttgtcgtttgggagatctagaaggaaaggaaccaatgaatcttcaagcataacgatgctatgttgtcagtcctttttgccaaaatcaaggaagaggggcggacatgggcaatggcaggagcaaggcgcttacatgatatttgccctactctatatagtgtactccctccgtactcgtaaaggaagtcgtttaggataatatttaagtcaaaccttgtaaatataattcatgaataactctcaagtcgttgagtttgaaaatgtaaaaattatatgaatagatttgtcttgaaaaatacttttttaaaagtatacacatcacttttcaataaatatttttatagaaacaagaagtcaaagttgtgttttggagactgtgtcgctgtccaaaacgacttcctttacgagtacggagggagtatagagcttttccccttttcttaacctaagggttatatttttctcctgccatatttaatgaaaaggcacagtctcatgatgttttccctttaaaaaaaggagatttacaaatgcacaaagtaaaaaatatatatgaattcaggagtctcatgatgttttccctttaaaaaaaggagatttacaaatgcacaaagtaaaaaatatatatgaattcaggaaacaactttcatctctataactcaaactttttaatccccgttgaagtatttttcaggacattaaaatgaaacatactccctccgttttttaatagatgacgccgttgactttttctcacatgtttgaccattcgtcttattcaaaaaatttatgcaaatgtataagatataaatcacacttaaagtactatgagtaataaaacaactcataacaaaataaattataattacgtaaattttttgaataagacgaatggtcaaacatgtgagaaaaaatcaacggcgtcatctattaaaaaacggaggtagtattcacattcagcatgtactgaactaaaatttgagagctccaacaaaaacaataaatatatcaaatttcaacaagagctgaagcaacaatttactatctagatttcagcacatttaactcaaatttcaaaataatctcaagccagaatttgccaaattgcggatatatctttgacttcccccaaatccacccacctgctccccaattgttctacaagcaactgacatctataccatagactcatagtacatacatgccaatacacattgctgtgccctggataacattgcatatgttgatgatcgtatattgcagttctcccctactaactattaagttgtatgcgccatccaattcaatttaaaaggttaaaattgatgagagaaaaaaaaaggacaatgcacttattcaatattacataggcattgaaaattactgaaatatgggcctagtggtattggcattgctacatatcagtagttgtcattattctagcagtattgcacaggattccgactggttttctagataatctatagtgttattgttttctgtcatgctttgattctttctaaattgttctgtctgtgctggttttcagtactgctctaaaagattaacaacgtgatgataaacacacagcacattatcagacgttgggttattcagtatgttcagatcaatctaatttgcatgcttattagttattagtatcgattaactcctctctgtaccgatcgatgtttcgtgtttgcaatgagcagcgtactatggattgggacgtcatggctgaggtgtacaatccatgtggcatcagcgcgcacatgtcaatcacaaatcatataaagaacgatgcaaatgggcagagcaagcaagcgatttgataaatacaggtaagcagtctcttctcttggtggtcaattgttcaggatggaactactgtatatgtttggcacaatgtttagaactgatcacatgcagctgctatctatcacattctcacatgacctcattcctatcaaagcagcctgatacacacttggagctaatattactaacatagcatatcttaagatgttgggtaaatggacctgaaagacgatggaaactgtttaactgatggtcatcacaagttaaaaccttcaagacgacccaaagattcatgcctaaaattacagaggaatcgcagtagtgaaatcgtagggatatcagccaacatacaggcaacaatggggagaactacaccatgaaatgaagaacaaacagtttttgatttgagatcagaattgtgctttcacagagccttggaacaatgatcttcagcaatacggtttcttgcaaaatattggtacgggggacttcggcaacatagtacaggtaatctggaatacatgggctcattttgctgtagtccatgtaggaatcgaaaaaactgtagctcataagatcttgaactttgtacacttcaatagttcaaaacagagcccgacaagagacctatattggtattttaattacgcataacaatcacctcagttgccactggcacacagaccttccagctctgatttgtcatgaatgtaatttagaaaactctcgaactagtgcatacaagtgttcagccagtcaacactatcaaaagcagaaccatgcatttggcagatcgagaaacatgatctagagtcacttggttagaaagctagatcagataatattgattgaataattctaacccacttcacaaaagatagtcacgctagcaatgatagttatgaccagccaaagagaactacattatgatcaggttagtatggcctgataaactaatctattaaattcaataccatgatgtctgctacctcctccgtttcacaatgtaagtcattctagcatttctcacattcatattgatgtcaatgaatctagacatatatatctatatagattcattaacatcaatatgaatataggaaatgctagaatgacttacattatgaaacggagggagtaccacacagcatggaagtttagttcatcacatcagttatagccacaaatgaaacactagcttttgaaataaaacatacctaatatcagaacaacgtacaatatgcagtaaatacagaccgagcatctataaaagtaacatgacaatgcaaagtacagagagatagcaggttgatcagagctatttcaattgaacaaacgaaacagtcatggtgtacttccttctctcccgtggtacaaaatgtcactaaaagaatctattatagtctttgcaactcacagcctgccccagaacccaacccagttcttcctacaattgtcatcctaagaaccagctaatggaactaggatttgaacgctcagctatggggaagccaatagagtggaagggttttttcaatacaagctaattaatgatcgttttgtttcacttgaaggacgtgctgagcaaaacgagcctctcagacctgatgagttaagcactggatctagaacaatgatacacaccgtcagaagaaggccatgaagaaaatgaatatccaatcatcttgcactgcttgtgttgccactccgacctcgcgaagacttgctgttgctactgccatgctgcttctgcttaccagcaaacccaggcatgtagtactcgagataccaccgcacaaacttcttaacccctgtttgaagatcagttgacggtcggtacccaagctcccgctgagcaagactgatgttagcatgtgtatatggcacatcaccattccttggcatcttgacaatcttcctcaccgctttcaccttgagcaacttctccagtaaatccaccagctgtgtcaccggcacaggagatgtgttccccaaattgtatgtcctgaatggtgccggccctcgcttcttgcctccactgcctgtgctacgcccggctgtatccaatgccccaacacaccccttcacaatgtcatcaatataggtgaaatctcgggaaatggggggctggtgtgtgcctccacctgcactttcatacacggtgattggccgaccagcgggtacaagtcgaatctcaanttcaaaggggagcgt

SEQ ID NO: 7967 - DNA, 9261 bp, Oryza sativa
cagggtggaagagtatgtttatggtatggaatctttacttgcacccatgtaccttgatttttacatgtagattgttctggtttgtttcattctttatctctgagtattgattatttgctacatatttttcaggtctttgcaacagcttcatatgatgaccataaaaatattgtactcctggcgtttgaaattatcgagaagattttgcgggagtactttccctacattactgagactgagtcgacaactttcctgattgtgtgaactgtcttattgcatttactaacagtaggtttaacaaggatataagcctcaatgcaattggttttcttcgattctgtgcggcaaagctagcggaaggtgacattggatcctcttcaaggttgaaggagaatcctccttctcctcgcttgaccaaggatggaaagcaggaaagtgcagttcttgttgataaggatgatactatacacttttggtttcctttattagcaggtaaccacatttcttgttctgcatgtaccttctgctgctttcagttgatttgtgtacagataatacaaataatgtgtccccaacttttcaaaaccttgcaggattatctgaacttaccttcgacctacgacctgaaatcaggaaaagtgccttgcaggtgttatttgacacattaagaaaccatggtcatctcttctccttgcctttgtgggagaaggtgtttgattcagtgcttttcccaatatttgattacgtacggcatgccattgatccatcaagtggttctccacaaggacagaatgtggaaagtgatccttcagaacttgatcaagatgcatggatgtacgagacatgcactttggccctgcagctagttgtggacctctttgttaagttctatgacacagtaaaccctcttcttagaaaaattctgttgctcttgacaagtttcataaagcgtccccaccagagccttgccggtataggtattgccgcatttgttcgtttgatgagcagtgccggatctgtcttcgttgatgaaaaatggttagaggtggttttatcgttgaaagaagctgccactgagacccttcctgatttttcttatattgcatccggagcttaccttgagaatgtaccaatagaaaatgggggctcttcagaaaagacagaagacgagtctcgaccattggaggatggcactggagaagcttctagatcaaggaacttgtattttgcaattggtgatgccaagtgccgggctgctgtccaactcctattgattcaggtatgcactattccttcagagaaccgttgtttgataaactagttcttaattgatctttttctggaagcatatttcttcatcaccctatgatttcctgatttttttttttcaaatctccctcctggtgatatggatgatttctctagtcactgtaggaacgaatttcttcattcagaaacaacagaactttgatggagaactatttatcaatcctatgaatatctatcaacttattttgttttcaagattgacatactggaactttcaagtgttattctagtttcacttgtttatagaatttattactacacctccactatagggtcttagtttcctagcattatcttttgcaatttgtacatgtggtcttcgttacattgttcttacattatccctgtttatatatattcatgctgttttgtaggctgtgatggagatatataacatgtacagagctcggttatcatcacagaacactgtgatcctctttgaggcattgcacactgttgctactcatgctcataaaataaacagtgataatgacctgcgatccaagttgcaggagttgggctcgatgacccaaatgcaggacccacctttgttacgcctggagaacgagtcgtatcagttgtgcttgactatcctgcagaacatttgcttggacagatctcccaatgagaggagtgtagaggtggaaagccaccttgttggcttatgtaaggaggtccttgaggtgtacctgagcactgcaaacccatctcagctttctggtgctccgcagccacttggtcattggcttattccggtcggttcttcaaagcggagagagcttgcagcccgggcacctcttgttgtctcaaccttgcaagctatcagtggccttggtgactcatctttcgagaagaaccttggccagttcttcccccttcttgctggtctgataagttgcgaacatggttcaagcgaagtgcaggtggcattgagtgatatgtttagcacttgggttggcccggttgttcttcaaacctgctgatgctgagccccatatctgttatatagtatatctccacatgtaagttattatttgctttattgccatttcttgatgttttgccattccccattttgttctgtttatcattctagttactgggggaggttgtctcttgcagagctgagcactgtagttctttttacattaatttcttttagctttggggagtgtatgttacaagatgactgaattctgtacggtagcttagttcaaaattgtgcccgttctgttggccaagttcaaagtagatatgttttgcattatgtaatttatattgttgaaataatggcagcttctgtgctgtttattcttaccctttaggatctttggcacaagttttgatcgactaaactagaaattctaaaaactatgttcaaacacacgaaacacgagtatagttcacttcagtttggacatatatccacacgttcctagcttcatcctaactagcgaaattccgtttgctacggataaaagaaaacaaatcataatatttcctaaaataaataaaagcgtgtttttcaacaatgttgcccaccttattgctacatgtgaatactcacttcaatttaatttaattttatatagagagaatatactctgtctttgagtttgtcatagttcaacgatttgttaggctgacaaactcaaagataagtatattctctatatgacattgtctctttctataatatactgatgaatttattaattgttttacgatatgctactggactaggctttttttaataaaaaaacaaaaaaaactcttaaagatatacaaggttaacaattgatttatctcattagaaataaaaaaataaattatgtggcctttttacacaacatgaaagttttttataagttacaagttatttttggtatttttaattttttttttaaaaaatctatttttgtgtgatatatgcaagagaaattgcttactcaaaagtcaaaagataatagccaaaaatatcttatgtagcatatgaaagttgatttacattaaaaataacaacaaaagcagtgtaagaatgccaattattttttttaaaaaaataatagccaaaacatatattttttaaaaaaataaatatgcaacttatttattaactttcatgttgtgtaagaaggccaaataaaaaatttcatattttttaaaacttttaatgagatagatcgattgttaaccttgaatgactacaaggatatttcagtttttttaagcctagtccaatgacgtgttgtaaaacaattgataaagtcgccggcatattatagaaagagacaatattagtggtaaattgttaaactagaataaactcattgatataaattagattctcttttatacatggtatccatttagatctagttatgtaatatattaaaagatcaagaggtaatgtgtagattcagtcgccataattgaagtttttttttaaaggagtataaataataataagcagttgcaatgtggttcaagtctgtactgtaaaggaatcttgcgttctgcgtgtttgtctagttcgtccagagttcgtccagattgcttcattctgtaattctctaattctgtatgccatgctcttcagacgctctgtaagagcgactgataatactagtgaagtttgaatatgtatgcttcggaatgatatacatttctgtttacgttggacgcaatgagttttgataatgcggatcatgcagaagataaccgttttccctgtacaggacgagaactttgcggagcagccgaatttctaatcagtacgttgcgtcgttgcattgtacagttttcagtttcgtatatgagagacttataaagcatttccctgtacaggacgagaattttgcggagcagccgaatttctaatcagtacgttgcattgtacacttcagtttcgtatatgagagacttataaaacatagcctaccccctttcgtttttacccaagtaaatactacaaaaggaagagccccaagccaggcagtgttggggcgccaactgaaaatagagcccatcgacacaatcgctacgaattgacaccaccaccgtctcacactcactgccgttgggagagatggaaaagagaggaaggagagagaggagagtccttaatatgtggagccaccatctcgttgctgttgggagagatggcgaggagcggaagagtccctaacaggtgggatccacctactgattcaacgagttaactgtggttaacctgccactttaccaggtaccgcttcccaaaccgaaaggaggaaaaaaaaggacatgtgcaagcacccaccgtgagttaccacgggatgacagctaggatgaaggccctctgttcacagtgcaagcatcgagtcggacccacagtgcacgactttaccaaatcaatccccaaactcctccctcatcacgcactctccggctccttcctccctccggtggcggcttctcccctctccccgtcggcagcttctcccctctccctctcctcgcggcggcggcggcggcggatcgagaaggccgaggcggtggcacgcgacgagctcggcgtcgtgcgagcggtggaggggaggcgacgacagatccacggtgttgtggaggctggggacgcggcggattgaggagaccgaggcgggagcggcggagctcggcgtcgaaaggctcgacgcgcgtggcggcggcggctcaagaacgggcatcgaggaggaagcgggcgaggtgagcgccgggcggttcttggcggcgggtgcgtccagcggttcttggcggcgggtgcgtccggcggttcttggcggcggcggctcaagaacgggcgttgaggaggaagcgggcgaggtgagcgccgggcgggtggccggcggttcttggcggcagaatgcgtccccggctgcctccttctcctctctcccacgccgccgcgcctcacctcccacgccgcggcggcatgccggggacgccgccgctgtgcgcctcgcctctccgtcgaccgtgccgcccgtgccactcgatttgttgatttgttgccgatttgctgccgtgtttgctgccgcgatttgtgtcgatttgttgccaagcatgggcggtgcgaggacacgagctccacagtgtagaaaagcagtcgtttcctcgcctcgcgagagaaggaaacgcgcgtctcaggttgggggcggggcgctctccacaggcgcgcgtcctcgctccacgcaagccagaatccaacgtggcccccatagcaccggtccaactgtgtgcaatgtgaagggcctaaggcctctcccactgcaagcacccatcctgagttaccacgagatgacacgtaggataaagagctttgaagaccctctctttacagtgcaagcaccactagtgggacccacaaatatctgctagtggggcccacggattcccacctccctcaaccggctcatcctcccccaaatccccaaatccactcctccccgctggcgccggctcttcttctccctccgccggcatggtggccttggtggcggaggcctccaagcggtggcggtggcggcggcctcgattgcagcggtggcgtcgtcctcgaagaagaagtggtggcggcggcgtccccaacgtcgacgagctcggcgtcgacctggccaaggcgccggccgggaggaggaggtgggggagtagatccggccggcggctcatcctcggcggccgcagagcccgctctccctctctccagcccctcacggcggcgggatgcatccccggcggctgtggctggcgcgccggcgggagacgtccccggctgctgcggcggcggcggccaccactgcccgcgccgccgctcctcctcccagtccgtcgcgcctcctcgcctcccacgccgcggggaggagggagcaagaaggcgccgcacccactgcacgcagcggcgaggaggaggaggaggaggagtagattcggcggttggccaccaccaccggcctcgccgtcgcgtcggctgccccgtgccgttactcctcgtcgcggtccacggcctgctgctgggacttctccggcgggacggcgatttcgcagattccatctcccacgcgtgcgctagggcatggcaactcggagacacgaccttcacagcgcaggcgtgggtcgattttcctccgccgcgcgtccttgaggtggttgaggaactcgtctcccaactaaggagcgagggactacgcagggacgcggtgctgcgcgacacgtcggcatttttcctagttggcaccagaaagcaacgctccacctcatcgcactgtaagaggcctaaatttattcctttcagcgtgactgacaaaactcacgcccaagtgcgcgtgtcattaggctgcgcgtgtgtccgccaataatttttggctgatctgggaggcacaggtctgatcggacggatgcagatcaccaaagggtgtcggagttttaaactccgacgttggtaacaagaacgcctttgcatgcgagaatgctaatgggcgatcaggcgcatcgtgcattcgtgcccgtgcctgatccctgctcctttgttcatggaggccttcctgcggcacggccacagcacaagacacatcctgcatcaatatgacactatcgctccttcaacgacgccatcagcgacgaggctgtactattgacagcaagaagaggccaccgcctcattcgtgcctcgcctgcgctggcgacgacgaggaattgctagaagtccgggacaccaacttcctacgaatggccggcagaaattaagtagggagtcggagccccgcaaaaaggggaaaaaaaacgctctttggaaagagcctatagctagcacctcggcagaagtagatgtttcagagtgattgtacacttaggccgtgtttagttcctcctaaatttctaactttccatcacatcacatcgaaaactttcctacacacataaactaccaactttttcttcaaactatcaactttctcctaacttcttaacttttccaccatctaaacacatccttaggttcaaagcaaaatagcccataatgcaagtcacctgaccaggccatggttcaaagcaaaatagcccataatgcaagtcacctgaccaggccattgatgaatgagtcaacacgatgttgtcagacgatgatctactaagggtgtgtttagttcacaccaaaattgaaagtttggttgaaattgaaataatgtgatggaaaagttaaaagtttgtgtgtgttggaaagttttgatattatggaaaagttgaaagtttgaagaaaaattttggaactaaactcggcctaaggccttgtttagatcccaaaaaattttggcaaaaaacgtcacattaaatgtttgaacacatgcgtggagcattaaatgtgggggaaaaaaccaattacacagtttgcttgtaaattgagattctaatcttttgagcctaattacatttgctaataacagattaattaggcttaataaattcgtttcgcagtttacaggcggaatctgtaatttgttttgttattagtctacgtttaatattttaaatgtgcgtccatatactttaaaaattttacacccaaagaactaaacacaccctaactaggtcacaaagtcgcaagttccctcagaacactggtgattcgaatttgtacaatggtcaacaagcacaacaaataaccttcggattaatccaggttaactgtacagcaagcttggtttgagcaaactacacaggttaattcacaagaggtgtgtgacactgacacacaaaccaacaacgattatcttcatgcaagtaagcacatgtacagtgaggtctcagtgaggtttcaaacacacggcaacccagaacactctagcgggacggaggtacggatggctaaacattctcacaaataaatctggccttaaccgctcgacttcgagcgaagaagaattattccagcaactgaaggcgtcacctcgaagaatacacaagtagctctacagaaaactcgtggcttgcatcatcccgtcattcacagtaaagaatcagcaggccaacgctagcatcttgcaagcagctttttttagatcttttccttggcgaagaaccgactgaaaccccggttttgtttctcgggcaattggttagaaattgaggaagatgatctcgatctatgctttgggcgcttggatccgtttggtgaaaggaaagggcttccgtccgcttcagagggggcattgtgtgtcttgtacccattcactggggattcatttcctgatgcatgcatttcctgatctgtatccagttgacctgttggcttctgtgagtattcaacaccttcggttgttccagccgcgtcctgcaggaaatcttccattcgctggtttggcgaggaacccattgattctgctggaggacgcatagattgtagttggcgaccaagaatcaatatcgtctcctggcattctgcaagtttctctgctgcagctgcgatctctttctcctgtcaacattttaaacgaatgtgctgtcagtgtcagtcaaatgcctggaatttccagaaaatatcagttttgcgcacagtacagttctaagtactcctgaaataagttagtatgaatctaaattcagcctattgatttgactagtaagtgatctaatagtatcatactttttcctgtatttacaaatgaaaatgtatagcgaaagcatttctacaagaataataataaacaacacatgaacaaaatgtatcagcagccctatctcgaagataatttctctatctaatatagcaacttgtattgttcaaaatcatagctacctcacatttaatttctctatctaattcctcatctcaacaaagcacaatcatcccccatttaatttcacatgtttccttgatcccgtgaaaaactccaaaagtgtttttttttagataat

SEQ ID NO: 7968 - DNA, 4711 bp, Oryza sativa
tcctgcagcccccccctcccccgaaaacctccgcccgccatggcgaccgccgcccaggccgccgccgcggcgttcctctccttcctctcctcctccccgccgcaccacaccgcgccctcatcctccgtctccttcctggcagcccgtgtgctgcccgcctccctcagggccgctgccgcggggtccccaacttccgcctcccgctcccggggccgaggtgtcgcggccgtcgtcgctcagctccccaccgcgtaagagcaagctactaatgctcccaaccccactcatcaatgtttatcatgaaatactccttcacttcgggtgtttctcaaagtccctagtccctctcttcgaatttagctcataagagtaaccaattcgattgcgagatttgagttttgtatttttggatcctgccacttttgatacggtgattgacgtttttttcaggaatccagaggtggcttctggggagaagaagatccggtgagtacaatttctcttgatattccggttccatctgtctatattggggagctgacacgggtttaggtggtcatcacgagcggtgaggtcatttgcaatggcggagctggaggctcggaagatgaggtacccaaccactggcactgaaggactcctcatgggcatccttgtcgagggtgaggcaaatgatcttggattatcactgaaatttgttcgcttgcatctctggtgcctaagggggtgaattatttgtgaattgtgatggaaattggaacagatgagtggggaaagagaaaaaatatgatatacaaggctataggggttaaacctttgtagtggcatgaaggttttacaaagatactataatggcattttccttacttaaaatacgtttatacaaaactgtagaagtcagggtaattttggtgcacgtctacatgcctcatgcatgttgaaaaatatggagcagcatgccaaatgcaaacacaatggaatactatcgaataataaatcatctgccttataggttgtaatattcatcatctgagtgcagagttattaagttctcaagttcctattgttctatccatgtacatccgcaatagtgacacctggagtctctagtcatggaaaatataagaaagaaaaaaaaaggccattttaatgtagcctcattggtatttcttccagaatgagtagccaggataacacagtaaactgtctaaaaagtaaacatgcttcaatgtaaaacagttgggagtaagacaacccttttggttcataatgttaacaatgtttagacctttgcttgctgacttatgtagattttgtgtgatggcgtccacaaataaatccaatgtcttctataaaaataagatggagagagactatgataatttaggggtgttggtaaactctgcaattctagcctcaacctttgattggttttcagtggttcagatatgattgttttttttcaggttttattttgatttgttgggacagtagcaaactgcgctgtgctctgagactatgttcacgagcctacataagatataagcctctaaactgtcaggagttcttattgacatcttaaaactgtaattgacgtatataccatgaaagtacccagctgttgaactagcattcgtagttcctttttggtttgctacttcattatgctcatgggactgcacttagtcgcaacttcattgcttacaggaactagtgatgcagcaaaacttttgcgtgctaatggaattacgctgctcaaagtgcgcgaggaggcagcaaatgtgcttgggaaatcagaaatgttctactttagtcctatgcacccaccattgactgaagctgcacaacgagcgcttgattgggctatcaatgaaaaactgaaatcaggttacttctcttttaaatatgaatccatttattgttcaattcttatttaggtccagaagacaatcagttgactgtctttagttttggtctttgatgaaactcatgtctttttcttactgttttggtactcttggacaataggcagattttttttttcatgtttgtagaacagaagtgtttgcatattgtatggttacttccatttttagtgatgttttactattggatttagttgagaaaattatttgattcatggagcacattgtgttgcttaataattctacacttgaatttgttttttattctctcgtagtttacatcttgattcttgagccttactattaattacactttgactatcgtaaatttatagtctatttcatgcaattcgatcagatatatgcatctactgtctccgattcatcggagcaacggtccaaaatatgaattttcacgcaacaccgctggcatatcttgtgatttcatttctggaaagttagttgcattgattatgacttgttctcaataagtcaatatgaagtattggtgagttgctttgcttaatcactaaggattcttggtcaccgctcaatgtggtgtctggcattgttgagctgcaataaccctacaactacatggtgcaaccttcataaattaccaccttccttcagaacgtagtaaatataaaatgctttgtaattctaaacttcttatcctagcatttcagagtcaatacacttgtatgctactggtactagctatatcggttgaatgaaggatgtaattttatttgccatatcatgttcttgtttgattggtttgttcagcagagtttagcttctttcattggctgatattttattgtcttagatatatttatctagtatcttagacaacatttgtcatttctgtggattacgataatcttgtttggtgccatttcttttagacaatttggcatttgtcaaactgcctttgttttcaatttatgttgtaaagagtattattattatgttctgaaaatatggaacaattggcgggagagacatgacagtttaacgtatttttgtctaaccttaatttcatctataaaaccaactatagtgactatgagtaatgctcggatattttatgataagctaaaaccagaaacaaattaaatgatgtgttcgctttcactcctctctagacagttatgttgggctccaatgcaaactaagaacaatgatacagttatgttgagcttcaacgcaaattaagaataatggtacttcattcagttagatgatgtggtccaaactggacatatgatcctccatactgtacaaagttaccgttttcagtaatgatgaatcaagaatagacttattctatttcttttactaacagtggtttctacctattggagtaggcattgcatgcatcaatatgataggtgtaccaataggattgcactaatattctaggacatatgttgttagttttatgactcttttgacattggtcccttggcttgttgaactaatcaccaaatctcctgtttgaaaatccctctccttctttttttttttttgtaaatgatccatatatttatcaaatgtctgcgagtgagagaatggctgtacagaaagatcaagtggcatagaagctccagtgaataggacttgtcatggttgaaccattagtctgtatagcaaatatcagaaagtgatattctgtgtctccttcagtacttgtagaccctgcccttatgtctactttatggtgtaacaaatggagtaagcataagccaacaattcacaaacttggttctaaatatttggttgttcattggaatcagtatacttttgatagttgccaaaattatgtcaggattatgttgacactagcgtctcagtttttttttttttgacgaatctcgctaaatttcaaggtaacatgtctgtttgttcaaatttcggtgcaaattgctagtgcaaaatgtatcaagcccacccaaatgtgctatttagtgacttaaaaagcataggagtcctaaaacctacttaataatttctttaaatacatctttgttgcttgatggtgtattgctaagttccttcctgttatggtttgagaaaactaattcagagaatcatacataccagatatgttgcaactagacagtatcttgcatgcaacctagtatcctagatctccgtcagctaatgctgatttctcagcccagcataacatcatttgatgtcattttgcaaaagaaaatactgtttagtgtttaaacagtattgtgtcatttttttttgtgtgtgtgtgaagaggatttaaagctgcagtggtgccttagcaattgtctgcaacgaagcggtacataatgatctgatagtctgatgtattactcttgcactgattatgctgattcagtagctcttagcccatagcagttagtaccataactagcttggtttgacaattctagctccaaattcgtgagatgttatatgcagacataagtaacttatgacagaccaactgtgcagtgttatgccagtttctgtttgtttgaaactccaacatggctgatttaaatggagagaatattggatcaagcatgaagtcagtattgaagcttttctggatgtcattttgccttagagattgtatttttttagaagtatctggaactgaagtcatattcttgcctcttggtacttgaatgtttggtataatactccctctgtctcaaaatataagaatctgacatttcctagtactacgaatctgaactggagtagatatcaactatagtaatagttttaaattgaat

SEQ ID NO: 7969 - DNA, 15235 bp, Oryza sativa
tcttcagacatggaggtcatactaggtgggttgcttccattttgactcagtgcaccatcaaagtggatatccatgttgggattcgaagtactcttacgttggctaccagtcaacattgaacttccaagccacggagtttgcctgctgtcttagcatacatgtttcttgatgtttgcagctcactattccttttggccaaggcctcttttagcattttggtttcatcttccatggataacaaacgtgcagtcagaaactcattctctttctgcatgtgctgtaagttttcaaatgcataatcaggaacaggggacataggggacataggacgatggaagctggaattctttgcaggcgatcgtcgcaacctgctttctccataatctctgcccaagctctccacttccattttcatttgagctaatgcagcaggccctggtaacttctttcgaacaagaccccgtaatctttggcattcagcttccagttttgatattttctttacatcctccatgtgctgtttagttgcaacatcagctgagcgcacactcatgttcttttcctcattgcggatttcaagctctttggaaacaacatgaatttcatatttcagtgaattaatttccctttcacctgactgaattgtgtttttcaagacttcgatttcagcctctgctcgagccttttcctcatcaatcttcatcaaaaggtctccccgttcctcgagtgaccttgagagtgcatcattctcagcaccagccctaatgagctcctgttcaaactcaagtaactttgcttcaaactcggcctttatcttctcccactgtttggtttttgcaaagactacatcatgtagcttctgctcaccttcttctttcacagtccttacttgcttcatgcattctttcagagcaccatccagatgggcagctctttcctcagccgctagcttagccaatgtaacagtttctagctgaagcttcagtgctgaggcctccgcttcagctttctcccaacctaaacatgacaaagcatatagcccatcaaaaatacatctactgtagcagttttataaatcattcaacctttaagaaaacatatgaatggccgaattctgtttccactttaaagagagcagtaccacctataccaacatccactagcacaaggtttatgaaaataaaagtagtagttagtaagttattctactcaaataggaagagtaaaagaacatagtgatcctctgtgcacctgatacagcttcttcagcaactttagcatgctgtttcactagggcatctttagtagtgatctcagactgtgccgcagagaggtcctcattcaaggccttcaccttttcatttaaggttttcacttgttcttctgattcagtaaggtgtgcatatgtttctggtgaaatctgcacatattttggagctttgtcatcctgaaaagtggaaacatggcattagaagaaataaacatgtaaaggtaaggtaaaattggaaaactttcaggatgcaccagtagacaattccatttataatgtcagctttagagataagaataaatgcaaacaaatatcaaatgaactggtaataccgatgtcccctatgggtattctactgactccacacagcagtatgtactttagcagttagcaaaatatgtcataatctaaattttccctaataaattttgtgtgccacaaacaaaaatgcaatgagttgctctttgacaaaattatatgtagaaaaaaaaattatgtctttctgcggtacagtgggtgaaagaaaatgaaacaaaatactatgtgagtgatatagtgtagtccttaattgagcatcagagagggcctatataaaactaaatcagcaaatacaaaatcaatcatgaacgaatctaccacaaacatgaatagttattttcattttaaatataaatggacaaaatgcaaataaaccagtccaatagctaataaatggcctcgttttagtcaaaaaaaaaatggcctcgttgcaacccagtactttccataacttcaaattttgcagcacccacaggtacaagcagggttgcttaataaaatggcattaataagtcacagtttgtgattgggacttcctccaagtaaaatggcatttctcaaggattctaactacaggtgaacaccgaaagcaacacaaacctgctcagcttgattggaattttgagaagcatctgcgctagatgatttgtcagatgatttcttcttccatggccagctgcgacgatccatcaggcacaatgtatctaacgataaggtaaatatcaagataagccaattgtgacgagtaagtatctatatccagcataaaggtggacaaattatctgaagctaattatattgtcaccaactctgacaacaatacaaaggtaaaacagtagatagacatgtcatcagatgtaatgttttagaaaaatgaagtaacccacatcaaaataaacgtttttcttgtacaccaatgaaaagtttcaggattaacagttctgaaaagaagacacgaggcgatgtgtgttttgaaaataaaagaaagatatatcatgcaaccaacatatagctccagacaaaagaactaaccaccaaaataagtaaacattttcctgcgcaccccatacaacttctataattgatactgctggaaagaacccaaattgcatatagtaaaaagtcataggaacagtgaaagacgagtggttgggcaagtataatacacacttcagtgcacaataattccaccatatatggtgagtagtacaataatataatcaaccacccctttatcactcatcaaagtgcaaggtacataaaccacgcgtacctcacggctccatagtcatacattccatccactggcgacgtgtacacacacccgatgatccagaagcagaggtttctgttacaatagacctagaacagtagtataggataggacaagcccaggccactactaattccgtcataagaaatccaacctttgaagcaagaacaaagggtactaatactacagtcagcacacgcggcggcggcggcccccacgagcgaccaagttggcggcgcacagcgcagaccaccggaccggatccgatcaccgtcatgccagaacgtcgaacgcgggaagtaatcgccgtgccatgtacttctcgcactcatgacacacacacgcacagagcggcttaattaaggcggccagtatctctctatccacgccgtggaccatcaccgcgcgcatggccgcagcatgcagcatcaccaggctgtagagcttgacgcgatacggcaatcgcgcgccactgtcgctcggcgaagagagagtcagttaaggctgccacctaagacgcccgcgagagtaaatcgccggcgtgggacagcgaatgtttatttaagcccatccggagggttaggccggacggaacggaagcctccgccgagatgaccggacacctactgctgctcgccttgccccgtgtcaaggaagaaggatccattggtttcttactgtgctgcactgctgctcctcatcatcagtcattccgtcccatctgctagcagtaggagtcgtcgtatcgaggacgcgcgcgtgagccggagtaaaagcggagagctactactagtaccagtaccactctctaagcatcatgatacgcccattaatggcggtatttgctgggcagatttgggcttgagccaccagatgcgctatacttcagcctactcactactactaataaatccctcgtccttgcgggctcaagtggggttgtcctttttctaccatctccttttactaatctcgcagtggcagcgctgtactactactccccggccgctacttctatcaatcattccacccccaccggatgaagtgaagctggccgtacttgccggattctttcacgggttaaatctgtaccatgtgttccatcggatgggattgaatgttcggggggaagaagaactcgtcgaggagggggtaaagacggagcgcgagaacggcaaggacaagggaagcgcccgaacagggcgagcacgacgcggtgattccaccctcgcaagcgcgacagtgcgttgccgaaccgacaccgcgcgatttgatttcactgcccattgatcataatagtactagtagtttctttggcccaaacaagacaaggaaacacgaagcgcaaagtccgggagggcaaaaaaagaagaagaccggtgaacgggaaaaaaaaagtcagaaactggaaataagaataaacagtgaaattttcagatggagcggattgaacagggagctcgcagcgcacttctcactagtactactgttcaaagttcaaaaataaaaccgacgtaaaagcctcaaacaaagcataatttcctggaaacaatccagaccaaaaaacaaaaatcgcaagcattgcaggaacacagacgcgcaatcacagggctgcaaattagcaacaacgaaggaaaaacacgggaaaaaattaagcaggcacgcagcaaagggattcggagccttacgggaggcgagggcgcggctcggggaggctccacgcggaatgcagatccggcggggtcacggtcgccggaatccgccgcaattccggcgtgaactggatctgacccgcggctccgatcgacccggccggcgtgtcggtggcttcggcggcggcggagacgacgacggccacgcgtaccttgccgctcacacctcctcaaccgatcagcgccgcactgcacaccaggagctggactgtggattggatgattcacccccactcctctccctttttcccctcggccctcgcctccctcctccccttttgctcccgcaaccttttcttcttccctctggaatcccaccaccaccacctcctcctgctgctgcaacgagcactagctcgaggcggcgtctcccggtttggtaatgcggctgcccacctctcgcccctgctccctatctagcatcaatggagtggcggtggcggtggtggtgggggaaggaggagagacgcgagagaggtgcggagatggaggtccgggtgctttttgttacgggggggtgcgcggctgcgctgctggtaggtgggcaaaaaagcggggagggagggaagaaagtggcgaggtggggaaaagcgggaggagagtgtgtgtgtgctgtgcgcttgctgtgaggagggagggagggagggagtgatacgcagcagagatacacatccaacatttcatcacagtaggatggatggagatggtgacagggatgatataacaataaaatacaggtcttgcattacaataatagcatcatttctttttttagttactgctgagtttttctcttaaaatagttgcacaggcatggcacaaataacctgtttagttggtgaaatgaaaatttttaggtatcatatcagacgtttgacttgatgtcggaaggggtttttggactcgaatgaaaaaactaatttcataactcgtttgaaaaacgcgagacgaatctttttattctaattaagccgtcattagcacatgtgggttactgtagcattttatagctaattatggattaattagactcaaaagattcgtctcgcgatttacatgcaaactgtgcaattagtttttctttttatccatatctaatactctatacatatgtccaaagatttaatgtgatgtttttgtgaaaagtttttggaaaactaaacagggccaaaggcaagccttctctcttagcaattttccattacagtttacacatttattacagagcacaccaggtaaggtgagtcctgtatatgcagctacgctcaacaagtcaacatctcatcaattctatagttaaacaatgtgattcctccgaaaaattgttatatacttcctctgtttcacaatataagttattctagcatttctcacatccatatcaatatgttaatgaatctagatagatatatatatgtctagattcattaacatcactatgaatatgaaaaatgctagaatgacttacattgtgaaacggagggagtataagttattttaaaatattatataaattcattctttaagtttgtacttcctcctttctaaattgatcatcatataatataattcaaaatttctcaaattgatcatcatataaccgtatagacacgagtttcatcataatacaattaatgcagcatgggagaatgtgtagatggcatggtgttttaatcgatacatgcattgtgggagaatgtgtacatggtatcttgattgatgaaatttaaattattattagtcttgatgtataaacatactccctccatactaaaaaaaagtcgtttaggacatcgatacggtctccaaaatacaactttgacttcttgtttctataaaaatattcattaaaaagtgatatatgtatacttttatgaaagtatttttcaagacaaatctattcatataatttttacattttcaaactcaacaacttgatagttattcatgatttatattcccaaggtttgacttaaacattgtcctaaacgacttcctttataaatatggagggagtatatgatgatcaatttgagaaggatgaaataataattaaaatttaataacttacgtattaatagtattttcgttttgtgggtcatcatgtaaagttaaacatgacaactgtggtacaggatagagggttggaaattataaatagtgttatcaccgtttccttgatgcaccgatgaagttgtattgtactactctatcaatgattttgatgaatgtcggtgtctcaaaactactactccagtatgtatctaccggtgtctcaacgtgattttgatgggtttcgggtaagcagggggcacagtgctggagcccaataccaacgtccttcgccgcgtccgcaacaaccaaaatagaaccacgcattttacatgtcaatcatgccaacaggctgcctcccggaaggccataatacacgccacttgttttggctcttcctaatccttatctcacatcgatctctaccatctactactagctatctattgtgaagtctactagtttaattatcatatcgattgaagagttccaaggaacaaaaacactgacaatattaagcatcggacaaacggttgggatcggtaggtacaatatttttccgtttaatcgtgacacatgtccttgatcttgttatgcctatcaactaagtactcctagctaacagctctacatatcatcttttaaagaacttcacacagacacggattgatcgaggttattgtccacgaacagaagtcagttggagcatcactagcctccaatggttcatttcactttccgaagtgccttggatgatgcacggaacctaatctgaattctgaaagatatagtaaaacacttgctgttgcgacttgcatttgttattctttcttgatagcagtatttactactgtttgtcgtaacaccgatgtacagtggcggatccagaaaattaattcaatggtgtcatatcatatctactggtgtcatagtatgctaaggcttcgtttgttcccgggtgttctgggagattgagagagaaaacatctcgttttccgcgcgcacgcttcccaaactactaaacggtgtattttttgcaaaaaaattctataggaaagttgctttaaaaaatcatattaatccatttttaaaatttaaaatagttaatactcaactaatcatacgctaatggctcacctcgttttgcgtatcttcccaatctcctcaatccccttctcctcaaacacaccctaattatatttaaaacatagtgttataatatatgaatatgcagtttaactataggttttaccgaaagtcgtcggtgtcaccgttacacggtagatccgcccctgccgatgtagggtggccttgctttctccttggagcaaaatgcccctgtgccagttgctacccctacaaataaaaaagcaaatctgatcgatggaactcgcaacagctcaccacctaatacctatggtcataaaacggaaagttgcctacgatttatagatcgaaaaggatatgagaaaaaagggggctttagaaaagaaattactctagctaagctcactcatccatccgtttcctcaagtacaatgccgagcaaaacccagccgtaacactccctcatttctctatctgaccaaaaccatgacaagcaaataagttgtcattaagcaaagctaacagctaagcaacagctcaatcaaaaacatgtcactggtttccttgagaaaccaactaaagattagtttttttttggtttcttagccaaagattattcattccaacgtgacactggcgcactgcccgtctgcaggactgcaaaaatggcattgagctttcccacattgactgactggcaatcctcgcaataaacaagcgccacacatgtgtgtgaaagtaacaaaaggcgcctcccagtaggtaggtggggacgcggtggaaaggcaggctggttcacctccaggctatcgctcctcctggctctccaaaagagaaaagagagggatccaaagatgccaaacagtgcctcacttctgtactcctactactactacttcactccataatctagcctgtgcatgtggctgcaacatttcacctcgccatggctacgtaagcagcgaagctttcatctgtgtgcctgagtgtcagtgaagccagtggcatgtcaatgtgtcatcaccacgcagtactagtagtagtagtaccagaaatacggggcgtatctcacgtctaatcggacggactactagcggttaaaaacaggcgagacgactgcgactacggttagttggctaacgtccaaggagcaagtgcacaaaagaaaatgtcgcagtaggtggcacgtattaccggctacaacgccacttcatctaccgtgtgagtgtgagtgagcgaggcacaaactatgagaccggaggtttttttacaatagacccacttgtgtgtggcacgcggggggaagagctagatcctgagccgtccgttggacgggtggtggatcggacggctctggtcgacctgactgcgctgatgcaggggtggttatcttatcccaaactggagtaatttatactagtaatagcgcattagtgctcggtataatcagctggctggctggtcaaatgtggtgctcaactgctgcggtgaatgacagaatgtggtaacatgttcttctgagaataatactactgcagccagggtgtaatcatgggctggttgggcatgtgcggggttacgtctaaaaagatttgatgctgattggcttaaagcgcggggattgaagcaggtgtttatgctttttagagtttggtcagatctactggagtgtcatgagaatgagatattatcctctctgacacgtgtatcgctacattatttagctgggaatgttattttctttgctatttttcttcagatttgttatcgagttgttgacagttttttcccaaatgaaactttcattttgtagaccgttgaatccctgttaagattcatgtacctagagaggaaaaataatcgatttgtgcgcatgaggaaggattcgaacccataacctcacacatagtcacactcacacggtgctagccacctattgtaattacactctagttatattttttaaaaaaatactccgaaaactatcaaatattctttagttattattttctttgttgagtacattggagaattctatctctatacgtgtgatcgatcttgaaagaagaagaccaggtcgtctgaaactggtctttcacctctcgactgcagccagccagctgctagtaggtgcttcgagctgcaccagctgtaaagacccccaaagtcagcttaaactaactatagtacactaagcatcatgcacggagatgcagattgcaggcttggactgcaggggcaagagttatacagctctgtttttaatggaaagagaatgtgcatagcactgttcattgcagctccactgctcgattagctgcgtgcctgcgtcactgtaaaatgtgaattgtgtaacgcaggacttccatttgatcgacaggaattcccggtgataccgtgagcctgtgacctgtgtcactgtgtgatgataaaactgatatttctggggaaaatagagcggatatgatttcgtgaatacataatggccaattgtgtgtgtggtagcagaaagttccatgaggataaatagatagcagtactgctaatctgctataatacagatgagacaatgcacaatgtatgttttagtgattgtctcaataaagaagagggaattggaaagcgaaagcttaatcagtgcgaattgatggacagaatcggaagaagtggctctgggtgggtggctcgctactgaaaataacaaaagtatagttagcagctgagcatcctatcaactgtcgagtgcagggcatcctaagaatgtcacgggagagaaaaaaaaagggtaaagatcactcgttctcttttttttttctccctttaagttccaccgtttttgtttttcataagttgggcgtccactttaattcagctccaaatgctccattataattaatgcaaagtgtagtgtaccgtgtctatatagctgcttcttttaaattagataggttaattatatcatccagcatgcgcttgtcaaagactgaaacagttagccactttgttgtgctgcagcctgcaggtaggctgtaccagtacaacgcattcggttagagtacgaagcttgctctttgcaggcgtcgtttactcgtcttggatgagtaataaatcgatcggaatccaacatggagctgccatgacaagggacaagactaaagaggatataaaaagcaataggagtgtaatacatccgtgagcatgctaatgaacctaccttatttagtctgttaaccagaaatgttacgtgtagatagacacatagtgaaggcacaagtatgtcagtatgtgtgctggtgcaacgcgaaggtaaattagcggagacgctgaaactggaagcaaatgattaattgaagtgcagcctttttcccaattactcagatcatttaagatgtaggacaccgggtgaattgccccaagattgacattttgtagacatttttttagccatctaatgcgatcgaatactgaaaacgtgatcaattatagtctcggcttctctgaacagaccatctcaatactgagatgagaaaactatacaactctctccgttttttaatagatgacgccgttgacttttaaacatatgtttgaccattcgtcatattcaaaaaattttatgtaaatgtatatatataaatcatgcttaaagtactttgagtgataaaacaactcacaacaaaaaaaattataattacgtaaattttttgaataagacgaatgatcaaacatgtgataaaaagtcaacggcattatctattaaaaaacggaggtagtactagctagtactgtagctaaatatcgatcatctcctctggaacatcttgagtccatgcatgagatgatctaatctagctagaacttggttaacctacccggctagctagctaaaccccttttccctgtcacgccgattgctcaaagccgggagcagcgcgtcttggcgtgcgagagtcggaggccgatcgaagattagcgggacccatgcggcgtcctttcttattaatagaagtccccaaaaaagaagcttgcatgcgacgaagcatatatcccccgcgtcttcacaagaaagcgggcgagaaaaaaagaaggaattccaaagcttgtagtacgtacatcgccgccggccgtcgagtacgtcgagtcggttgccgcgtcgctctccccgcttttctccccccctgcttttgttagcttgtcacaccacaccgctctccatctcatggtgcgcccccgtgcgcgcgagccacccagccaaagccgcgtaagtccgcgcagcggcgcagcccgccaccgttaggtggcacgtacttctcccgcgcgacgacgatcgcgcgcggcgctggcgacatgcatcaccgagaccgagcgcgcgcgcggggggcgtggcgtggcgtggcgtcacgttcgttgggcgcgcgcgcggatagcgtgcgtactgcgagagatacgccgcgcgcgttaaccgccgcggaccacgcgcgcgcgcgcatcgatcacatcacatccacaggtgcgccgaatcgaccgggggcgagccgccagccagacgacacacacatatacgcgcccgatggcaacgtgacacggatggttggtgacccatccggccgccgtagttgcacttgcttcaattcttggagacttaaattactgttcgatcgatccgtgccatggcatggagtgggggatcggaattgattgtgctgctggttagttgcactgtcgttggatcaatcgatcgcgagcagagggccggggaacagctggtatatctgggccggggcgtgtagataggtaactagtgcgtcgcaaccggcgtgatgaatagtgtgcggatatacgcgagatgatcgggctggatgtgtttgggtgcacggttgtatgtgtggtccgaggaaaagtacctgcgtactgatacgagccattcgtgaacgcttacacgtacagctcgctgagatgtgattgtagacgtatattgttcgcacgtgcgtgtcgattcctgccctttcgtagtattacatccttctggctatatggatcatgtacgtacagatgatgcatatatcgtgatggactaatgactggttgaacgaccaaagcgccagggtattgcttgttcatgtagctatatgcacatatggcaaaatttgccacatgacattcaaattttgtgtaattagttggaggacaccgtaaaattgtgtcactgctgagggacaccataaaatggtgtaattggctgtaacacactagaagtattattttatgatatttgagaaaaatgtggagagagaaatttaacaaaagacaagtttgcccctacctgctccttctccacctgaccacggcgcagcggtgtgctatgcagggaggacggtgcatgcgcgggtgcacaccgagatggggaggaggcggcggtgagtggcgacgaggaggaaaaggtggccggctcaggatgggggcagagatggagctcccatgctcaccgggcacaatggaggcacggatggggacaatgaagctggcggtggcctcgtcagtgctttgggaggtcccagccgacacctagcggcgtgacgctagtggggagggcatggtttcccggcggcgagggaaagggggagatagggagaggagccatggacaggagctcggccggggccgtcaatggcgtcggttcgctggtggccaaactacgaccaattaattcgcacaacggccatgattcgtgggggatttatggggaaaactgagagaacaggttggggagcaacccccccccccaattaatttggcgaaacggccggcggcgggggtgaagcaggataaagaatagtgtgcatgggcatatttgtactttccacgatttttctctctccatttatatcaaatatagtaaaataatatctctggtgtccagcaaccaattacaccatttttatatagtgttccttagtagtaacatgattttgcagtatccttcggccaattacataaattttagacgtcctttagtaatttttgacgcatatatgcacacacatcaataggtccggccagttttgtgacgcgtaagatccacctatctatcgtactcatcagtttgcgtgacggattaaagtaaaaaaatttcagtgcttgtagaataaaaaaagaaatcaaaaggacacgaaagggagaaggtcgattttcacgcaaactgaaaaaaaaaattcagtttgcgtgacggtgtaaaatcaaaaaaatcaaaagcacaccagggtcacaattggtaacaaattgcccatgctgagtatgaggtacgagcagggtttgacttaccgtcggtaaccgcggcgcggttaccgggtttaccgcggggtacggtaatataaataccacggtaacccccttaaattcaaataaatttaaaatataatttaaatttttgataaattttgcacggtttatacggtttttcacggttaccgcggttaccacgtggtaaccgtgcttaccgccggggcgcggtaaccccggccccggcggtttggaaaaccctgggtacgagtcacaagagctcaattactaaggtataatatcacaagaactctctccttttcatattataaaacacttttatcattttttatcaaatttatagaaaaatataaatatttttaacaccaaataaacataatattaaaatatatttaataaaactattttggtattacaaagtttgctagaattttttttataaatttaattaaactatagacgtttgacttaaaaaagaaaaaatcaaaatgccttataatatgtaatgaaggattactaaattaagcatcactatatctacgtatagagaaatctcctttacaaaatcaggaatgcctattcatttcgtatataaaaaatcttataacaacaatctttttcttgaatagcccagattgctctaagatttatatagactctataacctaacccaccttttgtctttgccttcttcttcttaccatggatccactgtcactactcgccaccatcttctccaaacacaagtctgggcctggcgctaattcctcagtgcttatcttctagtctccgagttgcccaattcttgatcgaccatgggtagattctactgacatttttcttttcagacaaataagaagtactccatccatcgtaaaatataagcattttttggactggacacaatcttcgaaatactactttggccaataatatctatataaaagtaagatgctttaaagaaaaatatttgcatattatgatagtttgttttatgataaatctagtaacatcaattttacatgattgattctctcttttttctattatagtcaaagttaaaaatgttggatctggccatattctaaagggaaattttgctacgggacactgtgacttcgcagtcttagctgtaggacattgtacgaagtgacttttgaggaaaaacagtttcaaaggttggatatttgccagtggacaccg

SEQ ID NO: 7970 - DNA, 19964 bp, Oryza sativa
ggttctgagggttgataggggaagcgataagtcgatgcggcgaagacaagggaagaggaatgtgagtatagcttcgttgcaacttgcaaaacagcaagcggcacaatcagcaagttcacaaccggtctggtgcattgaagttacaacaaaattcatggttccacttccatcctccgaatatcgatggctcgattttttgctgtttatgccaaaaaaaaaaagtaacacatgcatgtaaatactttttttttggaacatgtaaatactattgaaataatattaaaattttctactacgtacttcctccgtttcatattataaaactttctagcattgtccatattcatatatatgctaataaatttagacatatatatgtacctagattcattaacatctatatgaatatggccaatggccaatactaaaaagttttatgatttgaaacggaggtagtaagatatttgatcttatactgataacttattgaattatagacatatataaaaaaaatgtattcttgtatggttacaaattatgcaacttctttaaatataattgattaaactatacttcatgagaataatttgcatgtacattggaatagaacagagcaaatatgtagagaagttaattcttattgtagactaactattaaaattgttcaaaagctcactctttatgaacacattgggatcacttcaaacaccaccatgaccatgaggcaacatgatgctacaacagtagaaaattaacttaaataaagagataaacaacatgcggattgttttgcgttagtgttttcttactgagaatattatatagggacaaatgattacgagtacataatgagaaacgcccaggggtcttcgggctagctccacaaggtggtgggctagataacctgggttcgaagcctcatccattataattatttgatattaggtcattttctaatagtcgtgtttttgtagttacaaaatgggtaatcggcacatattggctttcttcaattgatctagttgcattaattctacttgtaagttatggttgatcgtactttgagcggaatatggttttactctatttttttagaacaagttttactctagctcaagtcgaaaaaaataaacaatgctccgctttaacggactaattggcatgtagctacgattatgtactccatactagtctactagctatattttgagacgaaggaaatagataatagtgaacccgcaacacgacaatgtatttgttagctatgcatggttctaagtagacagatacaaccacaaccttctatattagctttatatggaactagggatgttatatccaaccttgtcgacgagggcacgtaatctgctcgatcacgacacacaaagatcttagaaatttggagcacttgctagtgaaaagctcactaggcacaattgttatagtgttgtgtcgctttggtcgttgccttcaaagtctagccctgcctattcgacttcgtctagtcgttcgggcttggctagcccttgcgtcaagaggctgcgacctacaagagtgagcgagacatttgacattgtagtccgctgttcatcttgccacgacaacacatcggcacccaaaatcccagactttcgagtccccattgttgctggcttgctgcatgttcatcttgttgtctcgctaacgcctatagtccatgacgttgtcagccgtccatgttagacacccatgcaatgtcgcaatctcagttttaaattggacatatgtttttttaaatattttataatcttaatttacattttgtcccgggtctttaaattcctaaatacctaggcctaaagtgtgttggttgagtttctgtgtttttggtgagggttgggagcccactcacctcccagacgaaagacatagcagtcgattagtgcacgattaattaactattagctacaaaacataaaaaataagttagtatgatttttaaagcaactttcatatatttattttttttttaaaaaatacaccgttaaacaatttaggaagcatgcgcgtgaaaaacgagtgatgagatttcacgtgcatgctttccaactgctaaaaaatgtattttctgtaaaaaaaatttattgaaaagttgctctaaattttctatagcaaagggttagcttaaagttgagagctcccgtcttggaacaacgcacgtgcccttatgtacccctgacaacgggtcccccacagagtgtttacaccagtagagtccccgccggtcagtgtcagctgtggtcacggcagtccccgtcgtcctcttcttctaccagcgggccgcaggcggagaacatcgggagcgagcagcgcacagcgcagcgaggagcccagaaggcgacaagacagatagacagaagccattcatatcgaaccaaaaaatcaacccacctaaccaactgacatcccgggtccaccgcaccccatctggcgggtcccacacgcagtgaaacgtgggtggtgcaacccgccgcggcattctgttgcggaaaagagagagagaccccgaggatgacgaccggagataggagtgaaattggaagaggagaattcctctttttttttttctctccctcccccaaaaatccccgagatgccgaagaggacctcctcgcattcccccaccgtctccgccatgaatcccctcctcccttcctcctccttccccaaattcccccacccggacccaaacctcagctccccaaaccctagcccgtgtagctacctcctccacgccgacgccgacgacgaggcgctgatccaaatcccgtgcccgaaccctagctccggcgcggcctcctcctcctccgtcgtcctgccgcccatcgacccggcgccgcacatctcatcgcagttctacaccttcaccgccgagtcgcacgcgctcatgctgcgatgcgtcctcgccggccgccccgcggccgccgacgaggtccgctccgcgacgcccccctccgtgctcgcctcgtggcgggcggtgtggaaggaccggaacgaggacacggcctacctcaccgcttggaagcgcatccaggacaagctcggcgcgtcggccgacgggcggtccctccacttcaagtccaaccctgggcagcgcgtctcgcacgtcggccagtggcgggacatagtctcggaggcgcacgccgaccccgacctgctccgccatctcgggctcaaggacaccgtcgaccgaatcaagcagtcatggaccgtgggtgccaaattctacggcattccggagtcattcgtccgtgtttgtgtctctgcatgtgctgtatgtaaggccgcacctgcgggacagcctgattttgctatgtcatcgccagggcgggggaaacggcgccgcaggtttgaatatacggagacactagatgtgcccgcgcgagatgttccacgccgactgcaacagttggctgctaagcataaggtggttctctgtatcaggcagaagtatataaggcataaaccattcatggccgaggtgaaagattatgcatgccaccgtgctggggtgccaacttcaagtggtgtgaatgctacgtcttcttcaggaagtgtccctgatgggaagaagacacgagtattgaagcgggaaccatatcaatcaaagaggtgtggttgtgggtttcgtattcgggcaattgtgccaatagctaattacaatgagaaagacaagagttttgtatacgaggaggagggtactgcagtgttcaagctttatgcagtgcattcagggcatgagccagggccacttgatggcaatgcccgaattgttcataggttagttgggcataagggagctcttgagttcgatccagacatttatggtgtcagtgaggaaggagatcctaactttacgattaagggagattttgatgttgaaactgatgattcacatcttgcagttttgcagcaaattcgggatctcaaaacagaggttggcttgttagaagggaaggtgggtaagatgcacccagagcttttgggttcactatccaatgagctatctgagtgtttgcacaggatcaggaagtttaattttgatggcaatgtctgccagccagaagatacactgatgataggcaacgaggaggttcctggatgggggccagctgacgtttctcaccatttagatcagcatgacggtgcattctgcagggatgatgagatgcttgatgatgacgatactgattttggttcaagtcttgggcctattgtctcgtgggatggaatgacggcagaatgtgaggataggaagatgctcatgagtgatagtccaaagtgtgacaaatggatgctcaaggaagacgtgggcgactttgttgagaagagtattcttaactgtggtgatgacgatggtgtggaggattcaaaaattatcaagccattgatgcatgatgagaccatggtagctgacccaggtttggtaggtattcatgtagaaggattctactctggagccaaatggtatgattcaccggtaggtttggattccagtggtgatgcagatgtcagttttagacatggtggacttgtgtgagatgtgattgtccctgataccaggaacatcatgtaaattctgtatacaggaggacatcagcttgtaccaatttaatgtagtatctataggtagagcttgaaccaaagtgacctgcctgccctgatatatacatgctgcatttatcgactcaacctttgtttaacttatgtatagtccccgtgtgggtttccatcttgttacaagacaatataactttggttctgttcttgattagctatttagtcataacttaatgttttgtagaactctcaccctccctctctctctctcacgtgcgtgtgggcacgaatgtgcatgtgcattttgtaaatttaatgcaaggttttgcacacaataacatgctgtctctttactttgcaagaggaatctttgtcatctttcctgttcaattgcatctagtgtattagttattattaccattaactgtgaaaaacattatccctgttcatacctaaaaattgttcacttccctcttgtttattctagtacatatcatttgtgcaagaaaactgcaactgttctttgcgagcctattgaacatcactttttaatgacatggtattgactatgcatgatgtatattctcaaatttcatggtgttatatgtggtttactggtttaattttggtgctacaagtgtatgtgtgaaagatgaacgttgttttgttttgtattaggtacccttctgcattagactgattgactgggtggatgtttactatgacagtataaatccttcattgtgatgccacatgaaatacataattatttattattcaaacattaaatagatcttagtgtttttatcttcttttgccaagtcccttttttcatgttataaattctactatctacaatattcattgagcgttaagatgttaaatattatttgtcaaagctcaaggaatggttgagtgtccatgtcaaatgcttcaggaacattttcttctgtttgttttatatattcaattctgtatggtcaggcaaggttcttttcatatttcatttaatcttttcaaatgctgatatatatatatatatatatatatatatatatatatatatatatatatatatatatatattaacgtctgaagcataatggttttggaggactactgttatgcaaattattgcaaataacttttatgttctaaatctacaagttcactatagttcttcatggaatgcattctgtgtaattttatcaaaaggctattctggtaagcattcgtgattcccccctttgataagctagatttctgtttgcattaagcatataaatttgatagattttgaaggggttgccttaagtttttctcactttttttttctgtatttgcaggattgcaatgagttatgtgtcatcatttcctctgctatacacgtgtttattgttgatgaaattaccatcctatgagcaatgcccttatggccttaaactatcttaaccgtttaatcatgaattttctctcatgcagatctgtcagttaacttcgtcatgccgccttttctgcttattggcgtgatctggcgtcacatgatgcatcatcaggttgaggtctggacacaagaacccacatacattatttgtctgtttccattttgcgccacttgttacatctataatacaatttgatgcaccactttcaaatttgggtttaccccttgttttgccgccaaacatcatgctagacaatctccgttgttggctagacacataaaaggtaacatctgtccttcgtcagttgatccagtcaaaattgcagggattagccattcatgcaacgcatacctatcctggctcctgcatcgtcctattctgaacgtatgaattcttcatccaaacattacagttactttcctatcatggttgtgggagccaaaatggacccgtggccaaggaggctggagcaactgatgtgattagcagccattaactaagattttttttcctatggcaaaattagcaaggcaggatttgattagattagcttcgctgtttccttttgtcttttagaaaatatgtttgttagatcctggttatagacaccaagccatacactctatggatttaatgaagaagtaaccaatctaattccttccaatgtaaatcttcccagtctaacttcacttctcccaccaatctaattcctcccaatgtaaatctccccagtctaacttcacttctcccactaagggccaatcgtccttgtggtgtttccctgtttgatctatgctcctaacatttccagaatcttttaggcttattgatgtattgtgcaagtaacccataaaacctgatgtcaacaaaatacattccctggcaagaaaaggtcaaagacttgagcaacaaaagacaagaaggcactggttgtgctcgatttctttgattcttaagagaaataaataatgctctattgtgaggtgccttaagtaaaacatgtttcatatgatcatattgtacttggtaagtaccataatggaatatctaatattgtgacatgcaatgcacgtactgcttgctagataggattatatgttcaagtcagcatgtccaaacgctgttcaccttttgcccaaatgtcagccaggacatgggtccacattatgagctttcttcttatcagatatgcatgcaaacccaatgcttgaaagaaagctagtgtgttggggcataaatatgaaattgttaattcatgcttgtttttcttaactgttcatggagttggactgaagtaaaacttcttttcttcaggtaattgaattactatgttgagcaaactttggcatggcagtgctcaactaaacatctcgaaatagctttatgtgatatgctatattctttgcttgcagtcacagtgtgcttttacagcttgcttgtagagcgatggaataatccacctaacatgctcaaatattaaaaatctttctttagcagttactctctttcctagaatgtggcactcaaatattcatgattataatttctttatgaatatctagattggccggatgtgatgagatttattagtttctacagatatataaaagtggctaaagttgtgtcttggataccatttaaatgttcaacacacaattcattcaactatttgtggcaggaagagtactacagacggagtcattatttacacacagatgaaatatttagtgccaagtctgcagggtgatgagttagtatctattaaacatgcgagttttaaatccatttggctgacttttgcaagaattggtaagtgcattctccattatttgttggtaactgcaagaagtgtacactaccagatatagacagtggtggggctttctagtgatgtttcttttggcattttgctaaaggcaggcctttctggacaggcacaagttgcatgccgttgctgattttagtgtgatgcatgtagttgattgaaaaatgaaaacagtaccattttatgtgcaaccaagtgcattttattagctaacttagactgggggctgttttggtttataatagaaaatggaatctatgcatgcaacaaaaaaaatgttctgaacgttaacatgcttctccaaggcattgcatgttggagtagccagtaattaccactgagagatactcgctccttgcgattagaacatagttttaattatataccatatcaatttcttctactcgtgtgcagtgggataatattgtttttggtcattgatcatcactctggttaactggtcacatttggttgaggatttaacatcatttattggcaggttgtttgtgcagttgcttgttttggggagctggagcaatcgtggaccttgttaatcttccagaataactagttagtccgccaaccagttttctaagtctctgaagccagaggtacaagtggtgcctgatgatatatacttgttaaactgcagcactcgaatcaatgacattattttactgtccgtaaggcaacaactgagccatagtatatctcatgtaatcacagggaagcggaaatttcaacattttcttatgataatgtaagtttctctatgctatgtaggatcccgcagcttatctatatatggcgcagatctcctgaagatagctctgcagactgcagttagagctgagtcagagtaagaagacgtgataagggtgactcgaatcaatgacattatccaactgtccacagtccaacaactttgctatagaatatttcatggatcagagggacatgaaaatctgaactcaaactctttcataaggccatatccaagctggtgttgcaatggtggattcccctgctcctctattatataaggcatagatcctctcaagttatatctgcagtaagagtcagaggtccaagacgtccaagtgagagcgaaaggtgtcttttccagaagacactaaccgaatgactagcatggccacaatcacagccaaatctggggtcatcgccgtatcgatggtcttggtcatgtgcgctgcctctgcagctgctggcgacaacgacatgctgccggcggcgttcgacatcctgcagcagccggcgaaggaagccgccaacctcggccacggctgctacactcggtgcttcgccggctgctttgcagctgggttcgatggagattactgctcggacttctgctccaaggaatgtggcgatgatgtccggaagttcctcagccggctgtcgccggagaactccgctatcgtcggtgacatttgcaacatcccaaggtgcatcagttcctgcgtcgaagcgaagattgatccaccgtactgcaagatttggtgtgaggatatgtgcggtgatgatgtccggaagaaccaaatcgggctctcgccgtaagattccaccagatgcgtttctttcggtccgcgcatcaatagtgcctgcgcttgcgttcagttagcgctgtgatctttcagtagcaaactactagcaagtagcagtagcttgtgtcgtcgctctctgcataagtgtgcttgcttttgttcttctatgttcccgtgttcttccacggttccactgttcttgttgttgaaggcgtcaaggtgtgtagccgactcgtgcaattacattatcttcatttcgaccctgttatcagaagtacgtactgttttagttccttgaatgcagtgatgggcgtaccagtttccgtttcataatcatgacttggtgttctgggacctgatgtccattttttgaaaggtcacccgggtgattcagtagagctggctgttggctggatcctcatgatgttttgattcagtagagctgctcaattgaagatagacgagtaatagcaccatgtgttggtaaccttatatgccgatggacttaaaaagcgaaaaattggatagatctctaaacttgtatataatttttcaaagataatagtcgtgcatcgcgttaaatcttgtccgagtaccaagtacacatgatcaatgacgcatgcgaaaaaaaagagagagaagaatcaatgtgcgcctgaatgcacactctttgttcttatcatctgatgaagttccaatccgcaattctcttttctaggaaaacaactccagtaagaactccaaatatttcgagatccgcatccccgcacgctgcgtctctcactctctcctcctcagtccgtttcgctatccttttgtcttgctcgatcgtttcgcggactccagctgccggtcgatgatgacgggagcgaagcttgcggagaaccgatcgacggcccggcaatagccgccggcatgcgcatagtgaagcctttctccctgctgatgccatggcgggcgtcgggcgatcaatgaagtgcgccaccaagagtacgtacctcctcgtcgtctacaccggcgagtactaccaaatcatcctacttgatcaacgacgccattgacgactccctcactcccgtgcctgacatcccccgccctgagcccctgacagcctcctcgccatcgggagcggaacatccatcttttcacttggcggtggcgcctacgtcgtcctcgccgagctcctcatgaccaacgtccacaaatggcgccatcaggttcgttgacatgaagaggacacacggtcgctgaggatttgaagctggccatctggatcctgtcgctggactccggcggcgagtggaggaaaggcccggagtgtcgtgtcggagacatttgggcaagcgaaaagtacgttgtcatgggagtgccgcggattagtccgcctccggtgtgccctgtcttgcgcacggtcaacgataatgtcgtctgcgttatcgtgaacgatgccgacgagactgtgtacgggagtgtggatgtcatagcccagcattttcttgccatcgacgtggaacgtaaggatcgaggtgggtgctctgctgtccgtcgttaccaagcttcacgccttcaccctgatggtggggtagaacctgtacggctgtaccctaaccacatggcttgcgaattcagtgagtacatggaacactgacaggtatagaggtacaaataatagcctctagtactgctaggaccatccaaaatacttgtcattgtcaattgttgagtaaattttattttagggaacttttattatcaatgtttcattttgtaccatcctttaaccaatgattttactttaaatcgggtattttttttacctttgttttacattggttcaccctaactctcttctcaagtataagtatataaatgatcttaagtgcgttggctcctactcatcaataaactcacatagcaatatgcaagataatttctttggcatataacaagtttgatgtagatggataaaatagttgaggggttcaaaatatcacaaaagtaaaaatacccgatccaaagtaacaacattgtttaaagggtgatctaagatgaaatatcggtaataaaagatgacaaaaagtaaaatttactcttaatttttcatgcatatttagttctaaagtaaaaatctgtatattatgtggtgtaattaggatttatatgaaaggtgatttatctacatgtaataggtcaaatcaatggtggtccactatacaatttttatcatgttatgtattatatttagaaataagactacttcacccctaaagtattgatgctgatctacataacccctggagtatgaaactgggtattttattccgtaaagtatcaaaatcagttcaaataacacctagagtggttattgaaacgggctcttgaactaaagaggagactttgaaatgggctaagtattttattcacaagtgaaacgcccgagactaatgtaaattagtgttagtatagtaactttaggcttgtcgattagtgcgtgaaaagcaatagttagataaatttgggtttactagactaatctttgcgccacacaatcatttgcatgtcaaaactacctataaaaccactgtaggggttatttgaaccgattttcatacttcaaaggtagaaatctagtttcgtactttataagtggttaaatagaccaaccccaacacttcagggtattccttatatctactatagttttaactttgagttaaatcttaaggtggtccatgccctacggcagtagcggagccagaaatttaaatctgtggggtcaattactagtggtttgtatttaagtgggatcatttctctttattgttttggatttatacataaaaattgaggtttataggacgttttttaaaaagctggggtcggccgaccccacagaaatggcctaaatccaccactgccccaggtgccacctagttaactctgcatatgggcctatgatcccttcgatcacttttcattactacaatggtgtttgaaactgatggatattaagctggtgcatgtagaatgaagaaaataattaacacattattgattaaaatttaattattaaaaacttgacaaattaatttatttgataattttaatgtaacttttatatagaaagtttgaaaagtgtaataacggaaactgagttaaaatctgtacgtgttaaatatattattcccctttttaaatttatagaagaagttaaatatgaacgttggaaaacgctgaacaagtgaacatatcccgcgatccgcatttgttgcgactcgtttcgatcaactgattctccttcccggccggacatccacatcatcctgcgatcgttcgtttccctagtcgttccaggctttttcagctctactcccctccacccaggcgcaaatcatccgccatggctcccgcctgggtcttgctcgatcgcgtcgtcaagcccgccgtcttcgacgaagaagagagcaaaggtaagggagaatcgaccggcgccccagtgaagtacctgccagccagattaaggcaggaagtccccgccggcatgcgggacgtgaagccctacccagaggttgcggatcctcccattatatctcgcttctccatgctgatttcgcggaaggcgatcagggtagtgaaatccgtccgtgtccggtgcgccgacaagagccttgtcttgttctacgccggcaccggcttccccggcttctcgtcccacggctgccacctgatctacgacgccatcgacggctctctcactgcggtgcacacattcccctttcctgtgtccggagtcgtctgggtcggcagagccgctgtcctgcgccatgccggcggcggaggaggaggaggagacggtactaccgcctcctatgtcatcgccgagctgctcaggccgtttcatggctcccttcccgatgccacgctcgtgatgtggttgtcgaattcccccgcgtcgacctccggcagcaacggccaatgggtgaaggaggacgttcgccttcccggcgaggtgtgcacgggcaccgaccccttcaccaccgacttggtgttctcgttcggtgaatcgtgcctgtgctgggccgatctgttcatgggcatcctgttctgcgaccttgcgacgctgcgtgcacctcggttccgtttcatcccattgcccaaggcttgctccttcgaccccgtcggcaagtatggccggcctcacatgcccgagttccgttccatgggccgcgtcaacggtgtcatcaggttgatcgacatggagggttttaccaacgagtacctggccgtggatgaggtgaagctgaccatctggaccctgtcagccgacctcagcgagtgggagaaaggcccggtgtgtactgtaggagacatttgggccagtgaggaattcgtcgccatggggttgccgcagcttagaccgatgtgccctgtcctgagcatggttgacgaagatgtcgtctgtgtagtcatgactgaagtcgagattgaggagagcgatgtcacagatttcgacgatgagggcaacaagctcaagttcaaggcccagtacgttcttgacatcgacgtgcggcgtaagcgggtgttatccatcacccagcaccacattgaaagtatgggtgatcttataccagatctcatcgcctgtgagttcactgcatactcggagctctcaaaaggcatgcaggtattactactacgacacccaacatacttagttatttactcacttgaagtatattgttctgttaacacaataacactttccacagttctaatgcttggttatcatgtccagtcagttacatcttagtatctcacgagtaacggagtaagtatattaggctagttatcctactgaactgaactctagatagcatatgtgtgtgctaatcagccatcatgattgtctaatgccaaatgacttagctcttttgccatgctacagccctcctcgtccaaaccaggaacgccattttttcattctgttggtacttctaggaactggagaacgctgtcatagttactttcacttcactacaaagttgtgatggcttgtccagtagatgtatccaattgaattcttgattcagaattgatatagacctattttatttaaagatgttacatgtggtaaattcaaactgagcaccaagtcaccagcaaggttctgtaatgaaatttgtgaaaagtgcaatctatccataacgtgtgggcttggttggttttagctattttacttaaatgcctcttagaattgaccttatcagcatgcccttgtgtgagtattgctcattattattttagagagtacagacaaatggggccaatgataggtatgttgcggcgaggcaactacatcatctgaccaaacctgaccataattcttgtcgcagttgtacgaaaatctcttttcttttttacttctgaagtttttttagcgttgtgtgttggaaaagagatttgtctaactaaaattctctatgtaataagtatagaatcgtatcctctataccatagtatatggaaatatcatgtgtaccagtgtaaggccctaactgagttatgttactttccctagctggtactccctccatttcacattataagactttctagtattgcacacattcatatatatgttaatgaatctaaacatatactccctccgttttgaaatgtttgacaccgttgactttttagcacatgtttgaccattcgtcttattcaaaaacttttgtgaaatatgtaaaattatatgcctacataaaaatatatttaacaatgaatcaaatgataggaaaataattaataattacttaaattttttgaataagacgaacggtcaaacatgtgctaaaaagtcaacggcgtcaaatatgtgtagtagatgtcctaagactatctaggtttctcaatgatgaattttcatttatatatatttggccacatattaatttcctgtctagctctgttaattgtaactttggtatgcactgagggaattattgaagtggattaagaaccattaggccattttaaatttgtctagtttgacatacattaatttgtttctgctaggcaatggtggaaggaaatgagggtgaggaaagcacaaagcggatgaaggttaaatgatctctgcatcatgtggaacttcgatggtttttgcaacatatcaagtaggattaacattgaagattggtgtttgattagcacccatctatgtggaaggatgaatgtgatgtaatcattctctagaagttatgatgttattatcagatggtagtaaaactgaattgctagtgtgttttgttaacgctgatggttttaacattacttcatagctacctttgaattgtctggtcatgccgggctggttgatggctgactccgataagtgatacaagtggtacctgatgatatcttttgtcaaactctagcactccagtcattaactagttgtaaatggaatagtattagtacttatcttaaggcaaaatctcaaaatcgtacagtcttgttcttttatttaaaagaaagaatattctgtgcacaatcttggaactctgtgcggcacaatcttaaaactgtgtgctgtagttttttttttttaaaaaaaagaaaactatgtgctgtaggacgttttgtgtttatatcagactaccaagaaaaagagaagtgaaattttacgcatttccgtgccaatatacccaagttgctacagagtacagaggatactctgactcatactctctacgtccatttgatattttacttagtcaatttttttaacatgtaatcaaatttatagaaaaatatattaatattttcaatataaaacaaacatattatcaaattatatttaatgttaaatttaatgaaactaatttagtgttgtagatgttactaattttttctataaatttagttaaactaaaaaaattttaattaagaaaaaagttagacgttatacagtatgaaatggagagtatctcccaaagttagcacgggaggaagtcaactccaactctccagtgagagccaaaggaggcattttttgaaggcacgatcgactgactggttcgaaacaatgacactactttaggatatttttgttggatcagaggaagtgaaagtttataaaaaaatttcatttgaccatttccaagttgctattgtttggagtgcaccagtttctctataaaatgggctgatcgatctcccaaggttagctttgcaggaagagcttggtcctaccacagagctcgaaaaaaaaagtgctttcgagtagacacgagtcacacgatcgagtgactagcatggccacaatcagaggcaaatttgggatcatcatggttgcgatgatcttggtcgtgcgcatcatcgccttcgcatctgccagtgacaacgacgagctgccggcgttgttcaacatcctgcaacagaagcccgggaaggctgcacaggtcggctccgactgcttcgacgaatgctggagagactgcatcctagggacaccgtttacgagtttgtgcgaccagctatgctatcaaaaatgccttgttggttcccggaagatctgaagcaggcgcttgcattaaggttggtcagatgcatcagtagtgtctgcgctgcgcatctgcgttcagataacagcattgcgatcatttgtttcgtcagtaaattgagtataataatttggcattagcatgcgtcgtctctacgtatacatgagtttgctttagttcgagcattcacaatgtataattccgtatgggtattaaggtggggtccacaatatggataaagcaatgaaaagatctgtgcaatgtatggagcccttccaactctaaaaatgggatccacaaccatataattatttcgtttttttctcttccctatcagtgctctcgttactttgcctgcaacattgtaaaaaagaattgttattttatttggagtgtccgtcctcacgtgaagggccgatttattagggctagggtatgataccgccgcctgcaatgtatagagcgtgtgctacagtgaaaagattctcttagtacccttgttaattcacacattgcaggtgctcttagtaccgcttttttcttcgaggctccaataaatgtttcggctgttcaagccgtcatggtactacctctactatgctgatatcgagcctgttcactttgatatcattttcaaccatactatttttggtaaagttgctaaaaagtgtcttcgtttaatttgttgctaaatttgataaatacataagaaatcttgctaaaattttggtattgccaaaatttggtaaggtttattttggctacaatctgaacaggtccatcgttttgccttcatggatcaataattccctgtgttggacagatatgccttccttttccttgtttatgtcattaattatataataatgtcctgatgtgtgtttgcatttaaccatttaacatgaaagaacacaccgacccgttcatccgcagcaactcctggttggcctttagataacgtatttagagattagtaatgatttaggctccatttaaaagctatgcgacaaacgagagaacgtattttttaagataaaaaaaatactttcccttgattctagacttacaacttgcaaccattatctagctcctttgtgcttctgggcctcgccaaaccagcttatgcctcccgatggtcacggtgaagctatggaatgccaaccacaaaagtagatcaccatcaacttctaactctggcttaatcctcagccaggcgaataggatcgaagttagagtaggtgttgtttgcttcgagagggtggttatggccactctggacgttttggtgtagccgcgggcggagagccctagcttccggcgtcccgcgcgctccccatggatctgaacaaagcgacactctactttcatgaggccactggcccttccgccatggcagaatcatcggagctccgatgataacttgttttgtaaaactacggtcgttattaacgggagagtgaatatggactagatcctgattaatatagggttttttttgagatattatgtatcaggattattaggggcgatcagaaattttgcaaattgctcaaactaaaatcctagctattggtttttagaatacgtaaaagctctgcgtatcttttgtgtcaaggagagaggagttttaaacctttacaaagtattggttgagaaaacaaaggaacacaaaaggaaaggaaaaaaaaagagaagcgtgagccgatatgcgacaagtttggcgatcgataagcgggaggctcctcagatgggcaggccgaccgttgcttcttccgtggccgcacttgctacctctttccacgatttcctctcattattaaacaccatattgttttgttttgttcctttcaaatgtccaggctaccaagatgacaatggtgtcaaagcatctcctatttgctttgtcaaccttcttcctagcgtcgcaccaccactcaatgaagcaagcattgttggaggggaagtaaaggggctgtcaaatggtgtggagcttggatttggggcagtcgagaaggatgtggtcgatggtttctttttgttagtcacagaagacgtaggaggtagggtgtgacagccctcttgtgctcagcatgttcgccatccagcagcgtcggtatgccacaagctaggtgaagtatttgcactttgattgtgccgagctcttaatactagctattagtagctgtagaagattttcaaaatgtcttctacctactattccatctatccaaaccattattatttggattaagatagcaagtaaaattaaatggagggttgaagaagtttgaagttgtcatattttctatcacaaattttaaacgctgtaagtaataaaattattggtagctatcccatttctttcaaaatgcccccggcaaccggcgcttatgcctgtcgccgtctactccgacggccgcctcgtcgccgccatggtccgatccctagcaggcaccgcctctcccctccctcgagctacatgttgccaccacctcacaagaaaaaggacaatatataccactccattcgttgggtttcgataaaatgccatccactacgatgcaaaagataaaatgccactcagtaggttatcttcggtatatttttgccgctttgagaaggcttaagactaaaatacccctgttgtggagagagaggaagtgagatagaagccggacggcggccgtggtcgccggtggcgagcacgcgtggggcgggcggtggaagcctgacggcagtggagaaagaggaagagagaagggagccggacgacggcagtggtcgctagcggcgagtgcgcggggagggggagggacggtggagagagaggaaaggagaggggagccggacggcggccgtagttgccggcggcgagtacacgggaaggtgggggaggggcagtggagagagagagagaggaagggagggggtgccgtacggcggctgtggtcgccggcggtgg

SEQ ID NO: 7971 - DNA, 16533 bp, Oryza sativa
ctattgcccatacctgtaaaagcagtgcaatgtattttcaaaatgagcatttctgttgcttgctcagctggattggtgcaattctattaaaagatccttttgaaagataaagattttgaacgggttcagagctaatgtttactagcattccatggaaagtatctggtacgtttttcattagtgttgaaagtaggcagtggactttggactgttcaatggagccatgtgagtatgtgacacgccatcttcagatttccattttttaaatatagaaattatattttgatatctgtcccaacatgtacccctaaatacgtagcacagttttttttttagttggaggagatttgccttcttacgccaaatgtgcaacacgagtttggtattgacactatactttgattccaaggacatctacctttaaatcttacgttttgtattatgttccaccttgccttgtgctataaatttctgcttattggcgcataatcactctgacagagtctgtatgatcaggtggacgtcatacattatattcgtcgatactgaagtgtcatgacttgacgagaagtatgtacatactgaaagctgacgccatgttggtatgatcaggtgacctgccgccttcgtaggtttcagctgtgaagtcttcatcaggtatcaattctactcctatctgccacggaaagggcacttcctattggatcagaactcgaggatgaatggaatggtacgtgatccatgaccgttctcttgctgtgatgctgtctgctactgtatgtaggatatgaaggaaagcaatggaattaattagaattcttgcgtgtcagcaactgcataaactctggaatcaagtttatggttcactgtttacactgttcccccattttagcatgatctttccgattacatgaatctattattccctctattacaaaatataacaatttctagttataaatctgaacatgtattttggaacagagtgagtaccattcattcacttcgctgacattgcatgcatacttaaaagaggtaactgggtattataaaaacttgcttgtactcctccgcattcactttaatttgctggcattacatgtttataagagaggtaaatgagcattataaaaacttgcttgtacttctctgggagaatgtaaacgtcaaccctcatgcctacggaagtaactagctatgattatactaagccctcaagctaatcaatgaacaagcaaaaatctgtgtgcaactccgtgttgaccctttccctgtcaaattcaagcgtgtaccatcataatgacagactgtaaacaataggtagaatttcacttctccaacgcacttcatcgatcattttactcttttatatatccttccttcagttccttagaatgtttgcatcaaaaagcatgtgcccctgcttgtttatttctggattggagttcccttaggtcctaatccagatctctttgggagctgtgaccagtgagctctgagcagggcacccctcaatgcaagtctcctccactctaaaacaaatcactgtcataatctctactagttctctgcgagtctatgagtcagagcatgcatccatgagtctgtagtcctatagatatcatagctcatgcctaaataatactattctttttccaagatgttttgaccatattaacaatgcacgggatggtagtattagcatatggtttctcacatcacatgccatcgagcactggacaacaggacaagtagccaagtagtactgtagtgctgaaactttaggaagcaggttcttccttccccacactgaagtcacttcgggtggaatagaatggacacttctggctttggttcggcatggatgtatgcccaggtgcctgtcacgctttgggtccaatcattcagttgtactggcatgggcggtggtcgttgtcgtagtgctctcaacttagctagggtgatgaaaaattttctttgctcatttcctttggccataatacaataatttggctaacatgattatcaaaactagcgacaatcacatgaaaacatggaaaagattggaaacatatatatgcatgatattaacgatcggacaatttcaatctaacattagcatactacagtatagcaaattttcccttatttttgtactagctgtggcaaaacagatgtctccctgttgtattctgagctgacatcttgtcactgaaacccattacctcccgcaggatttctgcgaggaggtagtactccccagctcactgaaaccaatagagaaatggaagaggtgggccgacgcctcagacctcagcttttgtgatttctatgcgctgaccacacgagtggaaagaaagaactcaaagtagcatgtgtgcatactcctatgttgcataggcaacctgcataggtactataattaattaatttacatcatgcatagttgctctattctaattaaggcttttcttttggataaatggtctttaaaggaaattcatatgattttccccatattttttattttatggaacaaaggagtaggggttctagaatcatgtgaaattccttaggaatggcttaacacatggtgattttggaggaaaattaatctgatgtccaatctcattcgtttttcctgtcgtctatcaagttggtgattatttccgtatgtttttttcaatgttttctgatcttctattttgcacatcagcacatgcgttggtataaaaaaaaagtcctacataattgtttcttattcctgtattctaccgttcttgctttcggaaaaactctataaatagtcgaagaaaattcgacgtcaatgtattttcttcagctattataacatggaagtgtttctaataaaaatggatcggagaagttcgtcttaatgattgttcatgcttgcggcactagctaagccatggagaaattgttggacagtttatgaatcatctgtgcgtgctagctagctatacatatgtaacggcaaaatagttactccttttttcatcctaaaatatcataaattttaatcgaatgtgacacatcttaatactatgaatcttaatagggagtctgtctagatttatagtactagatgtatcatacacatcggatcaaaatctatattttaggatggatgaagtaactaagataaatagcattctcagaaggcatgaacaaaccatgaatatcttgccttttctttatccctagaggttgtatttttttccttctatatttaatgaaaaagcacactctcgtgctggttccattcaaaaaaaaaacatgaatgaatagtttgcatccgatccgttacactttttttttcaagtacctgcagtagacgactagacattcatgtcaagatatatatttttttcgtgcaagtttatatagagcttgattataggctggcttaaccggtcgatagtcacgcgtcattttgatgccggctgcagcctgcaaacgaacgaaagcaaagttacaaagacatgcgcagctttcctgaagattgcatccaacggtttccccgaaatctacgacttaaagtttagtaactgcaatatcattgtgagggtaattatgaacttctgtaaggccctgcttaatttgagatttcttctaaaaatctaaagcccgaccaggacaatgatcttacactaaaacaagattactattaggaaaaaagttgtcatgcatgtataaacagctagctagcagcacaacatgtatatatgtacaaaggaaaatgcatgctttagtgtgtgagctcgcaaaccttacagtatgagtttagtgtttctttcagataacttcacacgtagttaattatcgatacccgcccacccctaatttattgacaatatattgcatgctagcgcatcgcataaatatccttatcaatgtactgctaatggctggacttgtacgttaatccaacccttcccatcggcatcatcaacgcagaaactactgttaagtaacttaagtttgccaagctcaagcttaaaaatcctggtgcatgcatgtagctaggagtatagcccttttctgactttctgtgtgcgggaagcaaaaatacacctgcgtgtccatgtaggcatgtagctctccctgtatagtacatctctctctgtctgtctctgtctctgtatgtggacttgtggagcgaccaagatcatatgcaccatgcgtaggagtatggctgcatgcacagtgcgcgctagctgcagcacactgccgcattctgatcgatcagggtgctagtatatagctagtcttttgagctttgaccaagacgtcaagctgtgcgtgtgtccggccgggcgaccgaccagcggcatgcagatgcagtgcagcaaagctaagctaggatcgatcgatgccaagtgaagtccatagacttcacgtggggggggggggggggggatcggatcatgcaagaccgtggccacgggagactacacacgcagtcacacggccacccaggccagctgccgcctgccggccggccatgccagccgcgcgatcgacgtgccactgaacgcggcagcggaatgtgtgcgagatcgacacagtagtggtacagtgtgcgtgtgcgtgtgtgatggatgtgtcgacgcgaaatgggatggctagctcgacctcgcatgcatgcttgcttcacgcaatcttctagtagccctttttaagagagcgaaagagctagcagaaagatcacaaggggaagagaaaggaagggccagcgagggccgggtgtggttgtacaaccagcaagctaggctcttcttccatgccgtggctttaaagtctcatcaataccacgagaacaaaacaacacatagtagtagcagtacgacaagcatgttgcagtagtatagtgtagccaaagtacaggtgcaagagaagaggagaatactgtcaggaggggagaaaaaaaggttcaaggagaaggaaacagggaaaaaaaagagagcaaaaaatccagagatggaatggaactgaaacttaacccctgtgcctatgaccttccaccaataggacaagcaccaaaaggagagagatcggggaggcgacttcagtttccatattacgcatatgcccttccctcctccacttctaccactgccataataataccatcaccattcctcctcctcttcttctcttgctctcctctctcgtgctccatcgatcgatcgatctctaccaacacaactacacacttgtttacctagctagatcatctcatcaggtataagagctctcgagatcgatcgagcaatgagctcgggaggcggagccagcagcgcgctcggcggcggcggcggcggcggcggaagcggaggaggaggaggagggccgagcggcggcggcggtggaggaggcgggccgtgcggggcgtgcaagttcctgcggcgcaagtgcgtgagcgggtgcatcttcgcgccctacttcgactcggagcagggcgcggcgcacttcgcggcggtgcacaaggtgttcggcgccagcaacgtgtccaagctgctcctccagatcccggcgcacaagcgccccgacgccgtcgtcaccatctgctacgaggcccaggcccgcctccgcgaccccgtctacggctgcgtcgcccacatcttcgccctccagcagcaggtactactaccacttgcttaactccatgatttgatttccaacgagtttgatatcgactgatcgatccatcggcttgattgattgattgatagtattgtttgatttgcttggaaaatccttggtctacttctgctgcgtgcatgcatgcatggaccgatcgatgcgtatggatctggatcgtcgtcttgtcctcaagctagctcatcagcagttggggggacaagacgattttctggagtaggcgtgtttctttctcgagaaaggcaaggtctctttccatggaggaaaccaacacggccaagccaagcaacgagcagtgcgaaaaagaggctaacacgccaagcgtgtaaccaggagactgtttccctgcatctggtagtacctgccatgaatgatatgcaagtctcatccgtcgccgtccgcgtcgtccgatctcgatcgatctctatcgacgggatcgatatatgatcgtacgttcaccgtctggccgcgtgtgaaatcttgggctctgaacaatccacgaagtggtgggagtacttgtgcttggttttcgatctgacctctcgaaagaacagccctagcgccaatctctagtcctagaaatccaaactttgagttctttttctaccaatcatttgatgatctgtttgcacaattcaactcgttaatttcatctcgttattattattacatgcatgtgatctactatatgtgattgcgtgatttgaaccttgcacgtactaacagttttttctgtactgatgcatgtacgtttctgccacgtacgatcttgtgatcatgtactcccacaggtggtgaatctccaggccgagctgacctacttgcaagcccacctcgccacgctggagctgccgtccccgccgccgctgatgccggcgccgccgcagatgccgatgccggcgccgttctccatctcggacctcccgtcgtcgacgagcgtcccgaccaccgtcgacctctcagctctcttcgacccgccgccgcagccgcaatgggcatcgccgctccagcagcagcagcaccaccaccaccagcaccatcatcaccaacagcagcagcaccagctccggcagccctcatatgccacgctggccagggcgccgtccggcatgacggcggcggcggagagctcgggaggaggaggaggaggcggcggtggagaccttcaggcgctcgcaagggagctcctggatcgccacaggtccgcagtgaagctcgagcagccgccgccgccgcactctagatcatgaacgacgatcgatataatcaatcgatggagagcgaggcgcaagatttggtgcggcatggacagagttcgcgacgacgaggaggagagcaagcaacgggattggaacgggccggtgatggcgagcaggtcagcaaggagtaggtaagcagcaatggccggttttcgcgtatccgccttgttgttagccgagggtgcaagaagatgccccacttgctgcttggttacaatgcggctttgcttcaattctgcaggctgcaggagaggaaggtggtacgggggagcttcagtagtagtatagctttgacatgtaggagtaacatttgtcactggtagcatttgtcaccgttccattaattgaaagattttaagaagcttctgttcctagtaaccgctgataaatgaaagagaaaaaaaaactgatttcatttttttgttgcgactaataactgtgagttgtgatggtcgtggatgaatttttgggcgtgctcatcttgtagttatgaatggttgcattttatgtggaaaggctataattaaaatcagctaccgtggaaaaattatactgctccatcgatgtattatttaataaaatatagtctgtaagtattaattaggtgtgcatgatgtaaaaagtaaccccctctgacttcatcataggttgagaacattgttaactttaaccattcttatccactctaaagatccaagtccatcttggtacagctgaaaataaaaagctgaggccatcttcctagggaaactattctaatccctcgagggaatgttccctcgtttactcaaaaaccatttaaatggttatgaaaaattctggaaaaatttgacaacattcatacaacacatatatacaacttcacaaaatcttaagtccaaactcaactcacacgtcgagatataaaaaagacaaattcagcgtatgaatagtagcgtactgtttatatctaaatttgtcttttttgtttctcgatgtgtagatcgaatttgaacatgaattttggtggaatagtaggtatcattatattctacattattaattttttttagattttttcacaactatttgcatcgaatttgaaagaaaaaggtatacgagaggatatcccctcgaggaattagaatccactcccatcttcctatagttggaaagaagctttaggcatggttgctagtactactctccaatatcggtctctgatagccagctagctgatctaacaagtctactctctctatctctcaggtctcacattaggaggtataaaagcatttgaattttccatcattattaccaacattttaagtagtacattatatagatattttgagggtcgatatatatggatcagttttaaaagtggttgatttgaatataccttcgtatgcatgaataatagttaaaggcaaaatgcaattaagaccatgttaagctagccaatttatacaaggagttaccggtggagaaaccatctttactcccggttgggaaccccctttaatcccggttttccaaccaggagtaaggatccgggactaaagatgtccatctttaccaaccgggactaaggagacaatagcggcagtgcagatggtttctttttctttttcttttttcatttttattttctcccgaatcaagtaggcaaatccctaaatctaactaacatcccaaattcacatcaccaaatccacatcacaatcataaagttacttatacacacaaatcaaatacatcacaatatcctaagaaattactcaaatacatcacagatccaaacaatgaatcacaaatttctaacttctcagtcaaatacatcacagtgaatcatcacaaattaaaaaaaaaagaagccgctgccgccgccggtcgccacgaacgacgggcgcggccccgccggccgtcggccgccgcggccgcggccccaccacccgccacgggcgccgccgcccgaagccccgccgcccgccgttgcagcgcgcggcccagccgccggccggcccgccggatgggaaggggaagccggccaggaaggggagagaaggggaggagaggaggaaggggaggagttggagaagagagttagagaggatagatttgaggagaggtgtgagattcgatctgtctaagttgtaactgtggaggagagaataaggtatagggattatatactacgtgtttaattttagtcccgattggtagttggtgatctttagtcccggttattgacatcaaccgggactaaagatcctcggccctctgacatacatctgacagtggatgaaccggaactaaagatcatcttttgtccctaaagatcaaaatttttataaccgggactaaaaataatctttagtcccggttcttcttggatgtggaactatcgtggattttgccggaccgaccaaagatgatttctctaccagtgagtagctcagaattactatatataccttaatttatatgatgttcacaccttttcttttacaaaataggataattaaacctaacctctacgtccaaccgatgtacacagccaatgcgatgttcacataactactagtagtaattatttatgctggcgtgcagttgtcttcttctgttctttggtcatatagtagtttatgctgtgtattccatagttaattactgtacgtatatatatatctgaccagcaacctcctgccgcaagccctggcctgtcaattgacgcaacgacatgtatcattctccacgtacgcatgcctctcttgcgtgttatcgaaaaaggctaggttagtgaagaaacattgcgtgctttcgcgcacctggtgttatttattcatatcactgtagatcattccatgggtcttaaacatatgatgctacacatggcgaatactaattttccgtggccacgaagcgctcaatattcgccatgtgagccatccatgtcaaccattgcaaaagtttgcagctgaactggacctggttctactggtcccaatttatgatggcccattagtcacccaacttaggtacagcccaaagaccatagcccatgaaagcctccgcattgactcctcggcccctattgcgtcactgggcgtcgcctcccctttctcgatcacccgcgtattattatccccttattaatagccgcaacccccagtaatctcccactgacattacgggcccacaagtacgcgtccccaccagccatagactgctcctagacccgtcgcaccgaagctcccctgccaaatctacgcacgcgacgcggccatctctctcccttctcccccaacctccattagccgatccaaaccacctcaaagccccggaccgcatcactctccttctccccccccacgcccagatccagatccacccggcgcggcggcggatccgtcgaggaataatggcttccccggcggcggcgccgccgcctaccccgccggagtccgacccgcggctcgtggaggccttcgtgcccttcctcgagaagctcatcaaaaacgcctcgtggcgcaacaaggcgcactccaagctctcccacactgccaagtccatcctcgaccgcctccagaacccgccgccgccggcggctgcggcgcaggcaccgtccacgcccacctcccccacgacgcccacctcgtcgtcctcgcagccgggcccgctccgcagcctctcgctcgcggactcggagctgctgctcggcccgatcaactccgcgctcggctccggcagcgccaagctcgccgaggccgggctcgagctgctccacaggctgatcgcgcactcctacatccatggcgaggccgacccgtccgccgacccctcggcccagctcgtcgcgtccctcctcgatgccgcctgcaacgcgcttcacctcgacgacgagcacatcgagctcctcctactcaagacgctcctctcggcggtcacctccacgtcggtgcgcctccatggagattgcctgcttcgcgccgtgcgcgcttgctatgatatgtacctgggaagccgcagcgtggtgaaccaggccactgccaaggcgtcactcgtgcaaatgttggtgatcgttttccgccgcatggaggcagactcctccacagtgcccgtgcaacccatcgttgtggctgatgtgatcgagctgcctgaagctgcttctggtgcttcgcctgccgctgatgccaactttgtacagggattcatctcgaagatcattggagacattgatggtgcaatcacacctctggcacggacaacttcttcagcagctgcaggcgcaggtggagcagcggctcatgatggtgcatttgagacaagagcagcagaggaaggggcacatccagcagatttgcttgattcaacagacaaggacatgctagacgccaagtactgggagatcaacatgtacaaatctgctcttgagggtcgtaaggatgagattggtgtggagggggcagtggtgggcgctttggatgatgatgctgatgtgaggattgggaataaactgcgaagagacgctttcttggttttccgggcattgtgcaagctctccatgaagacaccacccaaggatgctccagctgatcccattgtgatgcgtgggaagatccttgctcttgaacttctcaagatattgcttgaaaatgctggggctgttttccggaccagcgagaggtacagctgctctttcctcgaattcagtttgtgtttttgtttcacgctgtttgcatcctgaatttattgttatattaaccagcaacatcaaccaaaatttggttcatcactttattgtttattccatgaaaagtggtgtagtaacatccagctgtccaagtaggaaaaagctcataacttatcatcctgaaaagatcaggcattggtttgctaatggtagtgcagttgtggataatgttgctatgtaaaattttgttaccagaagtcagttctgattgcaattttatggaagttagagttgcgtgatttctatttatttcataaatatcgaggctggaacacattgaacttaaaccactgccacttttctttgctgatgttgattccaatagtgacaactgttggcactgatataagcgtataggctgcacctagtaaggcatagcactgtttgaccgttaattttaatggactatgcaattggtcaattatcctaacggtagtatgcacttgtatgctgctggcattctgagctttttgaatcagaattttggcaaaatggcaactagtaagctaccaaaatgaagcccaagtggatggattgaaagtcctgctctatagaatccatgtataaattttttattggaaagatccatggcctgatggccccatattccttgcactgttctatttgattatagcaagtttctgcaagatgatgactgcgatgtgttatgaggaaaaggcgagctttgcactgtcattttgttttgtgcaacctgttttctagtatttaaattggtgcattagatctgctgtactttatgcttggaaaatagctgaaaatattgagagatgggtttgtcatgaagccataaaaaatggacgtataaaacactaaaatcttggactgaaagttcactaagcccacccctggaacagtaagtttccgtaacaacttgcttgtttcatcaccacttagcacacaaagggttatctggaaatatatatttgtattctcaagcattatttgttagcattacacttcatctgagatcagtcctactcccatgacaactactccacatggactagcactaattcagttaggttgttgccctcaacttttcttctgaagctacactcatgacaggaaaccatattcactgcaaatggccatataatcaccactcagattaattttaaggtcaggaaacttgatgcccaaaatttgttgaaataaaaatgatgaacatagcttatgaatgattattaccattcacctgtccacttcgagcatcttcttttcaaatatgtgatgaacgcagtatgtttggtttgtataggtgatgcaattgtattttgatattgcacgtgccattgtcatattactctatatcagctaatgtagagctgttacccatcttcttggtgcttttgttttcttgaatatttctagttctaactactttgtctcaatttatacagatttctaggggctatcaagcagtatctatgcctctcgcttttgaagaactgtgcctcggcacatatgatagtctttcagctatcttgttcaatttttattagcttggtttcaagattcagaccaggattgaaggcagaaattggagtattctttcccatgattattctgagagttttggaaaatattgctcaaccaaattatcaagcaaagttgattgttcttcgtttcctggaaaaactctgtgctgattctcaaatcttggtagacatttttctcaattatgattgtgatgtacactcatcaaacatatttgagaggtaatttataatactgtaattgagctatagtgagcttctttttaaaggtccccccgaaggacctataacactcattaggatgctaaccagatattgtgttatcttaattttggactacaggatggttaatggtctactaaaaacagcacaagggcctccagcaggcgtgtctaccacattggttccgcctcaggacaccacaatgaaaagtgaagccatgaaatgcttggttgctattctgagatccatgggagattggatgaataagcagctacgcattccagatcctgactctcctaaagtagagtcggagcaaaatgataatgatggaggacacgagatttcccacacagaggataatggagacgaatgtagtgaagcatctgattctcattcagaaatgtcaaatggggtttcagaggctgcatctttggagcagcgccgagcttacaagatggaacttcaggtggatgttattccatagttatttctatatgtgtagttgttggtgggaatttgctggatgctgtcctttgccgtatgactcgctgctgttctgttgcatatttgattttatccatttacttatctgtattggtcgattgatttatatgaatggcaggagggtatctctctatttaatcgaaagcccaggaagggaattgagttcctaataaatgccaacaaggtgggggaatcacctgaggaaattgctgctttcttaaaaagttcttctggtttgaacaagactatgattggagattatttaggggagagggaagatttatccctcaaagtcatgcattcatatgtggattcatttgattttcaaggcatggagtttgatgaagccattagagcctttcttcaaggtttcagattgcctggagaagctcaaaagattgatcggattatggaaaaatttgctgagcgttactgcaaatgcaacccaaaggccttttccagtgcagatacagcttatgtccttgcttattcagtcataatgctcaacaccgatgcacataatccaatggtaaaaaataaggtatgtatcttattggctaagtttttgtgtaatataccatagacagcctttggttctgttgtgatgtattaattaatgcagatgtcaccagaagatttcattagaaacaatcgaggtattgacgatgggaaagacctgcctgaagaatttatgaggtccttatatgaaaggatttggaaaaaagagattaagatgaaagaagaagaatttgttccccagcagcaaaaatcaacaagctcgaacaaaattcttggattggataacattcttaatattgtcgtacgcaaacgagattcacgtatggaaacaagcgatgatctcattaagcatatgcaggagcaattcaaagaaaaggctcgtatgtccgagtaagtcatgctagatgtctagatggatagctcaatacctgtatacactaaatgcatgttttccttggtcatttttctttgctgcccatttgatttctgcaactacattattttactgatttgtctcatgtcaattatttatctagaatattttatgaatgaatcaggtcagtattctatccagcaacagatgtagtagttttgaaattcatggtcgaggtttgctgggctcctatgcttgctgccttcagtgttccacttgaccagagtgatgatgagattgtcatatcccagtgccttgaaggatttcgcagtgcaatccatgttactgcagctatgtcgatgaagactcaaagggatgcatttgtcacttcacttgctaagtttacatcacttcactcggctgcggatattaagcagaaaaatattgaagccattaaggtttgttctacttactgtgatgcaaatattagtagcgatcagctgctatcactggcaggaaattactacttttgttgttaccattattttgaaaaatatatggctgaaaattattggaatgaaactgacacattgatgttttgtttcacttttactggcttcaggagtatagttgtatctttctccctttgactgtttcatattattggattgtctagcgcatgttgaatgctcgtgaaagtgtaatatctgaatttagtgatgactggaagcggctggtcttgtacttgttagaactgctataaactaactttccattaaagtttaacgttagttccttttggttggcattttgaatatttgtattatgcttttcgttctaatcatattccatggtgcttattgcatggttttatatattagttttagcataatcataaattcagccttttctgttctcatgctaatttgttgtggctacgaattgcttcacaggcaattctattaattgcagatgaagatggaaattacttgcaagaagcatgggagcatatattgacctgtgtttctcgttttgaaaatctacatctcgtaggagaaggtgctcctccagatgctactttctttgcactgcaacagccggacctcgataaatcaaaacaggctaagtcatccattcttcctgttttgaaaaagaagtctccaaatactgttccagcttctaaacgaggttcctatgatagtgctggtgtgggtggcaaagcttctggggttgatcaaatgaacaatgtggtgacaagcctcttagaacaagttgacatggctgaaatgaatcgtgtatttgtaagaagtcaaaaactcaacagtgagggcataattgattttgtaaaggctctctgtaaagtttccatggaggaattgcgatctgcttctgatccacgggtttttagtctgacaaagattgttgagattgcgtaagtacagggcttcctatattcagattgcaatgtatttccccatacttttctttgatgtatttatagtatataggcagtatatgattgtgtttccctttctcttgtaggcactacaatatgaatcgcatcaggcttgtctggtcaagcatatggcatgtcttgtctgatttttttgttacaattggctgctcagagaatctctcaattgcaatatttgctatggattcattgaggcagctggcaatgaagttcctggaacgagaagagctggctacctacaattt

SEQ ID NO: 7972 - DNA, 51107 bp, Oryza sativa
  unsure (1)..(51107): unsure at all n locations
cctcagatgccttgtgaggcttgcaaggttgtttcgattgaacacaagtatggcatttggaacctttgaccaaagtgaattttggaattaaactcatgttagctaagcgcgtcatacaaccgaaattcacatgacagagtcatgaatgccacacattagactcatctttctcgctaatatggttcacaacattatgattattacacatgtcattcaaagaaaagtggaacaagcctccgctgtcataaccttttccaacaaaagtcccatatttagatacgacacatttattggactcaaacacaagtctaaaaccttctctacataatagagagccgctaacaagattcttctttattgaagggacatgctgcacgttcttcagctgcacggtatttcccgaagtaaacttcagatcgaccgtaccaacaccatgaacagccgcaagcgacccgtttcccatcaacaaggaggaacctctcccaacctgataagaagaaaacagagaaatgtcagcatatacatgaatattagcaccagtgtccacccaccaatcaggtgagtgaaaaacagagagaactgtaggtaatattttaccgtaccccgatgttcctccgccctcgctaatgaccatgttggcagacttcctgtctttgcgctcaggacagtccttggcccaatgcccagacttgccacacacaaagcagtctccctttgcctttcccttgcctttcttcttaaagttggttgcagccttaggtttgacatcaggcttgactttcttgttgttgcgggatgcatgagggttcttcttctgtaccatattggcactagaacctccctcaacctttttgccccggacgtcctttgccctcgccttctcctaaacacccaaagagtcaatgagatcagaaacactgaactcttgtctcttgtgctttagaaaagtggcaaagtccgaccaagaaggtggcagtttggcaataatgccacctgccacaaacttgtccggcaactcacagttgttgttctcaagttccttagccagcatctgaatctcatgagtttgttctactacagaacggtcatcgaccatcttgtagtcatagaactgctctatgacatacagctcactgccggcgtcagaaactccgaacttggcctcaagtgcatcccacatgtccttcccagaaggcatgtgcatatacacgtccactatgttgtcagtaagtacactgatcaatgctccacggaacagataatccgaagcctcgaacttagcctcttcctcaggagaaagaggtggttcacttcgtttgccccgtgaaacatagaagcattgcatcgctgtcaaccacaatagtgcacgtgctttccatctcttataattagaaccatcaaaagcatgtggtttcagtgcagcagcaaagccaactaccgaaaatgacctatcaggtttttggattgttggaaatatggtcataaatcggcatattttaatccaaaatgttaagacaataatcatggcataaacagtgtagggtgatctagtgacagcatgtaacattaccagtagcatactaaaggcatcatgaacaacattatgaatatcaggaagaagaacatagcagtaacgcggtagcatgctagaggcatcatgaatatcaggaacaggaacatagcaataaagcgctaacaacaagaacaggaataggagaaggatataccctgagaatggccctccgctggattgtgaggcagaactgcctccgttggtgttgttgttcgcggcaccggctccagctcctggtgcaccacctccagcagcagctccaggtggcgcaccatctccgccatctcctccagcagcagcagcggcaccggctccaggcgcagacatggtgggcgaggacgaggacgagcagtcgtgcgggaagcactccccaaaaacctgatcacccgcctacccggtgcgcagatctcaggagaaggtgtggttccggaggccctgctccttccgatctctcgtacgcacaagcgatcagaagcgaagaggcgagagcagcacaagcgcggaggaggaggaactaacacccgggaaagaagcaagcggatcgttctgatcggactcacggcctccttatctatcggatcgttttgatcggactcacggcctccttatctattaggagagaggcagtcatgggaacgtgggatcgtggacgcgtccttatgaagcaagcggatcgttctgatcggactcacggcctccttatctatcggatcgttctgatcggactcacggcctccttatctattaggagagaggcagtcgtgggaacgtgggaggcagtcgtgggaacgtgagatcgtgggcggtgcgcagatctcaggagaaggtgtggttccggaggccctgctccttccgatctctcgtgcgcgcaagcgatcagaagcgaagaggcgagagcagcacaagcgcggaggaggaggaactaacacccgggaaagaagcaagcggatcgttctgatcggactcacggcctccttatctattaggagagaggcagtcgtgggaacgtgggatcgtggacgcgtccttatctatcagtcgtaggaacgttctgatcggactcacggcctccttatctatcggatcgttctgatcggactcacggcgcgtccttatctatcggcctccttatctattaggagagaggcagtcgtggaaacgtgggatcgtggacgcgtccttatctatcagtcgtaggaacgtgggatcgtggacgcgctgttgcggaggaacgtgggttagtggttgcaaaagagtagcgacgtgatgtgacgcacgccacgcctctccctcggcccggcgcgcgcgcgtgtggctttccaacccccacctcaaccagtcaacagggagcctccaataactccctatttaggttgagatattcctcgcttaaatcctgaggtggtattattattcttaacacttattatgggcatctgagattcaataggataaattgggcatagcccatttattctaacaacatataggagagagtttggtgaacagcaatcaccaactgcatccggtgactcacacatgacttccctttgattacttggctacgagaacgtcctttggttaaactaaaagtctggtaaagctggtcaagtagcgttgttcgtccagcttgccgacattaccacgtaaccgaaaggtaacacgaatcggacctcgtgctaacactgcaattaagctttctctaaaacaaagcatccaaggaaggtggtaccttcccttcactaatctatttggcaggctgatgactcggagaactgaagcaaaagtagcccgtccgtgtcgctgtcctcctagattgtggaggttccagcggcctgcttatccccagaatcattcgtaacctgggctcgtatctgattccttgatagagatcctgagtgtcgcggactcgcggtgtgcagtactggattactggtagtgatgcagtgaggagtctccccgccgtccccggaatcattggtaaacctggcacgtatctgattccttaatcagaatggagttttgcttgagtgctggactagtggtactgtgtcgtgggctagtataccgtgtataagttaaacaatttcaactttaactattaatagtgaaaaataaaaaataataatcacgtaaaattgatgttactagatttgtcattaaaaaaaactatcgtaatatgtaactctttttcttaaaacatcttacttctatatagatattgttagtcaaagtagcatattagagatcgtgttgagtctatattttaagacggaggaagtagtagttttgtttgagtgctggagtagtggtactgtgtcgtgggctagtgtaccgtgtaaaccggcaaaacgccgcaccgtaaaacaagcgcacatgggtaccggccacgggctctggggctcgtggcagtcgtgggtgggttggggggacacggcgcgcgacggcgccacatgcgcggcagcgcggccacccgccgaaccgcgcgcggggcggagagggatcgagagggtgagggtgagaaccgcgcgcggcgccccaccgtgcggggcgttgttgtcccgtgcgccgtctcccacctcggtttcaccgcgggatctcgcgggcgcaccggtgtttgcgcgaccgtacccccacccacatggcgcggctgctgtgctggtgccgctgcgcgcgcggcacatgtgccaccgctccatgcccgcgcgttctcgtcggctcacgtggccgcgtcgggttggacacgcgtaggctgccgtctctctcagagcaacccgggcacatgcggacgcggggggacgcacttctccatgtgtccgccggccgtacgcgaggcccaagggccaacgccactcctcccgcggtcccgcgacgccaccaatcgtgccgcgtcgccgtcgccgctgcaatttcgtttcgggaattcttggagattggcaccgacccggatcaggggcggcgacgcgatcgcgcggtgccattatgcccgttttattggcttgtttcgatatactactccgtattaaaaagaaaaagaaaaccctggtctcaccgagatctatatgcatgtttctctgaaagtctgaagttaatcacgcgcccaaaatctcggagttactattggccaagagagggctcgtccaatcgtccttgctgcaggcacgtgcttttcgtacatcagttacaaggaacacagcaattccaatcctttcacatgcatctatgcaagcgtaccacacagatggccgccgaagcatggaaaatggacgcctctaactccggaagaaatgtcacattgatacgaactgggctagcctgaaagattcacaacctggtacagctaacttaataacaagctgcaggacgatcgaagaaaacttgggggaaaaaggcatgtgctgaaaggacaacatcatttccatagatccactgttggatacttaaacggctttaattatgagatttagattctagatctctcctatcagctgctccatggcctcccttcacagctaagaaagccgtgaatttttaggatctatactagctactataccacttccaatttcacatgactagctcctgtattttcagttgagtcttactggtatttcttttccgtccatcctatctactctctctgtttctagttttacgatattgtttagttcattttaaactaatcaacatcaaagagaataaatagagagtatattctgtactcaggattcgtttcatcagctcgtaacaatcttaccccttttgtcttccgtcactcacgtttcagctaatttttcgtagtaacagtgtccatagaacctccgcatatctactgctcctagtctcctactacagtgaacgtaccccaattcccagatgatggagtttccactttccaaagagagtgaactagcttaaccttgtttttgccttgacagcttaggccctgtttacttcacttcacaaacaatctatgtcacatcgaatgtttcgacacatacataaagtattaaatatagattaaaaaaattaattacacaaattacgtgtaatttgcgagataaatcttttaaacctaattgctacatgatttgacaatgtagtgctacaataaacatttactaatgatagattaattagacttaataaattcatctcgcagttttcagacagaatctgtaatttgttttgttattaggatgtatttagttcacgctaaaattggaagtttgattgaaattggaacgatgtgatggaaaagttaagtttgtgtgtgtaggaaagttttaatgtgatggaaaagttagaagtttaaagaaaaagttgggaattaaaccatacattagcctacgtttaatactttaaatatatatccgtatatgtaatgtggcatgaaaaaaaaaattgttcccgaactaaacaggctctcatttacggctaattattctttcagtggtaggcgacgtacccgtcgacagcgaggcgtctgtggtgacttcatcaatttcaagatatgccagcccagtcttccggaggtgcttatagggatagggtatacatgtgtgagttcataggggtgagtgtgcgcacgttatgagcataagtcggtgattcaccatccaggcagtggcttggatggcaagcaagaaggcaagcggtggaactgggccatcactgacacagtgacgcgccttaaccggtaacgcggcccccacggttcggtgggagcggaccagtcgcgtggatcggccatcatcatcctgatatcgctcgcgtgcgtgcaagctgtgcgtggcaggtgtgaatcagatccccgcgtgttgtattccgtctccacctagaagcgtacgtacgcggtgtgtgtataacgcgagcggccagtcggtggtgctgcctttgcctgcgtattttgcgatcgtttcgtgaaggccgcggcttttctctttaatcggttactgccgagttggggttgcagccacaagaagtagaaacgaacgtgtacctgttcagctatacaaagtaaacgataacaaaattctaatttgctacttacaaggatgtgctatttagggtttgtatttatggtcatgttagcttaaggtaataaacaagaggaagagagcataatagcagaacctctattttccctacttatatctataaattacatgtaaacactccactggtttggcaaacaaggtagcagctgaacacaagaaagaacaatctgaaaagggaaaagtgggtgacaggtggccaccagggatgggccagtgaagctgtctctcttccccaatcgagccgctttcccctgtccgaacgctacaaaaactttccacacgccaccctctcccataccaccacatctcccaaagaattccccgttccaggcagccgagttcggtccaaagtccaaccccgcgactgcatacaattccactcgcccagtcctctcccgcgaccgccatttgactcgcagggagccaacgccgaaaccgcgccaatcttttgcccccattttagacgggcgctgactgagccaaacccaacccaacccaacccccccgcccggcgcggccacctcacaagggagcatcggcacagccaaccgcagcgcagcggcagccaaaaacccaccgtttccaattcctcgcccgattttgaaccgctctccgcccgaccgaacctgttccactccgccgagcggaaaaaaaaaacttcttcgccgtctcgaaggaaatttattgggaagaaaccgttgcgggaggcgggcaaactgaagcggcagcggcagcggcagaggcgatggagcggtaccatccctccgaggtgtatgagctcttcgtgcggcacatgaacaccccgaggtaagggttctcgttgctgttgctgttgtggtgtgttccggtttgggatcatcgatcgaacgggtggtgagggtgctgttgttgttgcgcgcgggcgcggtgtggtacagggtggtggtggacagcggggtgtgcgcgacggcgacgctggtgcaggtgcacagcgcgcggaagcacgggatgctgctggaggcggtggcggcgctgtcggagcacggggtgtgcgtccgcaaggggtacatctcgtccgacgacgggcggtggttcatggacgtgttccacgtcacggacgccgcggggaggaaggtggccgacgcggacgcgctactggcgcgcctcgagtcgtcgctgtccgcggaagcattgccgcgggcggcggcgggcggccccgccgcggaggggctcaccctgctcgagctcgtcggcgccgaccgcccgggcctcctttcggaggtgttcgccgtgctgcacgacctccggtgtaacaccgtcgaggccagggcgtggacgcacggcggccgcgtcgcagcgctggtgttcgtccgcgacgaggagacgggcgcgccgatcgacgacgcggcccgggtcaggcgcatcgagtcccgcctcaggcacgtcctccgcggcggcgcgcgctgcgcgaggacggtcctggctgatccgtcggcggccggaaacctggaccggaggctccaccagctgctgaaagaggacggggaggccgacagccgcggcgccgcgccgatgacggcggtggcggtgcaggattggggggagagagggtactcggtggtgaccgtgagctgccgcgacaggccgaagctgctcttcgacgtggtctgcaccttgacggacttggattacgtggtgtaccacggcacgttcgacaccgacggcgatcacgcgcagcaggtgagccttccagctgtttctccccatcatccagctttcaagatttgttttggttggtccaatttccccaagtctcattgttaattttgggttcggtgttaccaattcccctctactctgttcttctctttggttgagctggcttcctctcacgaatctagatgtttctttgggtggttgtgttaggcgaatcgtcttctgtcatttttttcccaaattcttttacctcgcttttgctttctaatgacgtttaccgtttcccttctttttttgtttgatttcactgctattcctatgtcggccccatcgtcgatggaaattatgatttcgaatttggtgaggctgatggaatagttgctatttgcctcgtgtgttctgcttcgcgatgttggattaaaagttgcattttttttgggtatacatgtgtactagcttaacctgagctatgtttgcttggcttcaccgcttgcaggagttctacatacggcgttcggacgggcggccaatcagctcggaggccgagaggcagcatgtgatccgatgcttgcaagcggcaatcgagaggcgcgcatccgaggtacgtgatggagtagcagtagtatctcctttgctttccctccatgccacgccaccgatcgcggccgtgctgtgctgtgcccacttcgcagcaccaagccgcgaagtcactttcgttcttgcccgactttccactacaccccccatgtgttcggccgaaatcccagccagcgcgcgcggtgcccgtccgtctgacgcgatcttttttctgtgtgcagggcgtgcggctcgagctccgcatctccgaccgccgcgggctgctcgcctacgtgacgcgcgtgttccgggagaacggcctctcggtgacgcacgccgagatcacgacaagggacgacatggccatgaacgtcttccacgtcaccgacgtggccggccgccccgccgatcccaagacgatcgacgaggtgatacagaggatcggcacggagagcctccgggtggacgaggagcggtggccgcgcctttgctcggcggaaggcgacgccgccggccgcggcggcggcggcgggctgttctcgctggggagcctcgtcaagaagaacctcttcagccttggcctcataagatcctgctcgtgagtacagatgacgtgtccgatccgatggcatgcttgtgtaaatatgggggcggtccatgggttagtttgtaaattgagtagatttttttatgctctttttttaggatttattagttgtcacgtgtatatagtagaaatgaaaaaggctgcttgtcggtaattaacagcttggaggtttaaagggacgcgttggtgggtcatgcatcttttacatggaaatagacagatagaagatgaatgtaaatagggtttgtacataagtgctacttaatgatgtttaactaaaaggaactatcatgtttgacctgcaaatgcaactagtgtcaattctcatttgatcccttcaggcacctgttgtatgcaatgcaaatgggggcatgttttctgtgaactgtttttgcctgattgttataggagcctagtaactggtgtattagcggcccataaatattaacgtaactcattccacacacgcaatctttacatatcctgtggcaactgaataatttacttttatcactgctgattgtaattgtaaccacttgtttacaagttgtccaaaagcgctgccatgtggccagacaagagaaatccgagaacactaaaaatattaccaactagaatcatctaaagtctaaattaaacgaagtgaggcaacaagaacgattaatcaacggaatatgacagccgattcaacatgcttaggttgaactaaagaactgtgctccaatcctcatccatgtcaaaaaccctttgtacgaacgtcgctttaccacgaagaagtaaccgttttcaatgtatttgccgacaaagcttcactgtccatgcgtataaaaccatttgacattgctacagcctcattaaaaagtcgttttgagagagtccaatggccacttaggtgtccatgcgtgacatatgtgctcacggcttttgtccccgtgaaaagaaacaacaattaaagagggggaaaatatcacaattgctcacacctcgcatcaccgcgcgcggcttaagtatttaaccacgtactcgcacggaccgggcggtgccttgctatcatcgttggaattatggccgtttctcctcttatcaacgcaccaggatgcacacgaagtccgtgggtttaattccttgcgcgacgaggacgacgctgacgctcgcttagaatttttaaccggaccatgtcacgccgtgcggaacgaaccggcttaccggtttctgaacgttctttgcctgcaggttttattacgaagcgatcgaggagaaacccaacaactgccgacctaccgccaactgccaccgatcgaatcgagctgaaccaaaccgaggcgtgtgcatgccttggtgccaacgaaacgtcgagacgatacgatctcggttttgctttcggggcagctgtgcgtggtagtagctcaacggaagaaaacgacctgtaacctttttagtttccgtttccctcttttccgtcggagatgggcatgatgtaggtagctcaagttcgtaccaaaacttaattggggattgatttttgggggtgagccgtagggttccttgtcacgtgaatcctccaaggacgacgggtggatgtagcgtccatagggagcaaaacgtgcgggaaaccgccacggattagccgatttatgatcgaagctagccaagttggcaatttggtgaaatgacgatttgcgagctcgatcagaatcagccggtaagaagactgaaaaaatgaaaagaaaaatcatgaccggactcgaagctcgaattcattgcaagtttatccggacgtgaagcattgggcgaagaacaatgaatagcagtagatggcaatgctgctcatcagggtcccctttccttctgcttgtgttttctgggcccggatctcagctggtccaaccagcctttctgctactccaattgctgcaggggtttggtctggactatgtcggtattgttgcgtgccgcgtgctagacctactcctaccaatctgcatatcgaaacggcatcgttttcagaggacgacccttttcctggcttcgatctcgacaatgaaactagagctgctggcgtcctgtctggccccaagagtgtacatactcacaaatacttttttttctttctgttagtgccttaaaaatgacagctccagttggcaagaactgtcaagtgcctggcaagcaaggtagacggctagacgcttccctctgcctcgacccttgcccgtctggacgaccaaggtaatggcccccagcatcggattccttcatacagcttgggttgctgatcaatcactggatcaactgcatgtcctgattgctttatgctgtactcctgtagagccatcaggtagaactgtacaagttactacaggaacagcgatagtacttgaagttgacagtactttcatggttgcaaggtctgtaatgcggcaatggctaatcactgcataaattgattaacatagtgcaggaaaaaaaatgaaacgaggcaacaactggatccatgcatttcgtgctgcaaaagaatggttcttcccctgctccacaatccctaggagggcagggagaagactatacagtgaggtaatatgtggttctgtacaaatgaatttgcggcgtttgccagttttggtgaagtttgtgacgtggttcacacagatatttacaaccatgcacaaacatacgtatctgagagcttttcagtctaaacagggtcactgcttctaggaattattcttacaggaaggccgactggcgtggggtcattagtatcagatgtgccatgtcgagcatcttcatccttctgcgggagatcagcaaaaggaagattcaacccttcctcaatgtcagagtcgtccatataccttgtagtggacaaatcttgaggtcttctccagctgctgctacttctgttatagcttcgctcaagctcttccacacttccatcagacacatcaccagagtgataactggaacggttaccagcaacatatcgatttccaaattccggaggctccagaaaacttccttgttgaccagtagaatgttcaggtgcttgatcccaccaatcgataatatttcctttggtatcatggtgttctactggagcatgatgaaacaaattgcttgatgtcgatgcatccatatggcttcgaaccctttcatggttaaagttccactcatcgcgatctgctcgaggcgggggaaccatatcagagtcccagccccttgcttcttcaatttcagatgctttaaatgctgctgaacctgtgttctcactggtctcagggaacacttcgttgaaataaggagcctcggttctatccaagtgaggtggatggcagacgtagtaccaatccagaatatatggatgacttctttgatctgtgtcaagcaatcctaacgggcccaaattgtaaacagcaggtgagatggcctcagcacggttatggatatcactagggagtagttggtggaagatatcatccctgtgacctctggtgcttgccacaaagcctgatgcttccattgcttgatattgtgcaagagcctgctgccgtatttgcttttccttgaacttttggaggttagttaagaattgtttgccttctgcatttggttcccatgatggatacacactttgaaaactgtaaacaatcatataatagaattagacctatttttagcattaaaccttgggctgagctagcttgtattaagctaggccatttgtatcttcgaattttgcaattggtaacaaccaattacaagggcgttgtgtcctacgcctggatctacccttggctgcaacacttgtgactaactaaaacctcctaactatacatagtacaaagtggccagtatccattaggcctgtaggacaacagcagggcacattgcatacagttggaagttgggtggatagctaatctagtccctaaagttccaccagaggctcaatttggtcctttaagttctattttgtccacacaggtcctctaagtattcgttttggttcgaaatcatacttgcacccacttgattagccaataataagtcaacatttctattacaaaatatcccttatctaagagaactcattgtacacaaatttcaacagaaaaaaaaaaacagcacacaaccattgggtattggaggggtcttgagaaacaggttcactggccaaatagtacatatttgtctttttcttttcctttttcttatacatgtgaaattagggaataatagtcatttatcaagagagatgctaattagatttagctatatgtcttcacaagtgggtccaacgatgagtttgaactaaaatgaaaacatgaaggactaatggtctaatatggacggactgaaacgtcaaggaccaaattaagcctcaagtgaaacttggagtacaactttgcttattctgttattcactcttgaaaatgcaatgtacatggtggactaaagtactaaaccaaaaatggatgtcgctttcttggaatatgatgtgacgagggcagcaccgtagtgcctatattctacagagtctatagtgctgacaagaagacacccaaaaaagtatcatggtcaagtgttcagctttggccatatttatggacaaaacagtatactcaaataatactctggtaaattcaattaaatgctggaaacacatttgttgtgattttctgagaaatattttcatcatatatccatagttaatgttgacttgtacagtctagaccatatgcactatgctgttgacatgggcaaactacatagacaaactaacacatttcctcgtaaaatgttcatagaactaaaatacccccctagtttgaacaagagtatgaaataacaatagcgtgcaaatcataccacagtacaacctcagagccaagaactactaaagtacaccaaagccatttcaataaacaaatgatggcccttaagatatctttttaataacaatatgagtacaatataatagctagtaagaaacacatgaagtaattcaaacttgaaattaaatgtaccttaaaaatgatttctccattttcccttgggagctcctaagcgttttaagtgcatcaaatggtgaagcatagtttctatttccatgtcttctgaagtcaaacaagcttaggctattgaaacacagagaataaatgatgttaaatgttttaaaaacccagtggcaatatatgataacaaaattcatttcttaagaaacatcaagagagaacctgcacacatctcccaccccatctacataaatcgtgaagtctgagatgaatcgcagaatatcatcaacacgctgtataataaaaggagttcactgtcaaagaactttagaaaaaacactgttgttgagcaagttcagaacattacctttggtacctcaaagatgagcaagtaaggagagatgaaaatggaggccatctcttcaagcagcattactatggtaaactgcatttgtaaaattacttagttaaaattcagagcaatatgatatggacaatagagtattaaacgtaaatcaaccaagatacaaatgtaaggtactgatatctagactgcaaagcacttaaacaaagagaaactcattttcttttcatcttcagatatagcgctttaactgaaagcaatataaaacaactagaaaatgccaagctttgtcattagttctatcagagaatttgaacactattatttccagattcacctagcaaaataagcaagtgagactcatttaaaaatgcaactgctgaatcacccagtggccacgaacaactttaatatcaaatgagtttacgattgtcagcgttactgcgatgtaacttagttgggccgtcactttttcatgtacttctctaaggtgggcattgcacttgtacaattttgttgaataacattctgttgagatcaacatacaacctttcatagttctctcaataaagaaagacnnnnnnnnnnnnnnnnnnnnnnnnnnnnnnntggtgacattccaaagccaaattgtacagcacataggacaagtaagtatgttgattagttgattcagtacggtatatgcacattgcacaattctctcagtcaactctttgccaaaccacctttttttcgtgtacttttgtgtgcgcaccttgcatttgtacaattttgttcaaataagattatgtggacatcagcccagagcatttgcgcagttctttcaatgacaaaaaaataaagagcagaatcacaaataactagaaaatttgatgatggtgatggttgaagttccaaagccaagtagtacagtatacagaacactaaatatctaattgattatatatggtatatgcaaaattctctcgaactgataaaatacctgaaatagtgtttcgaattctcttcgcaccacttcactgtcctctttaccacgccacctcttaggcatataatgcgtttgttggacaacattgcacatagcgccttctgggtcaattacttgaagttcatcagccactacttttcgacttatggcagctattgttccaaaaacaatagtataccagaatagatttcttccaaagatcttcagaagatatgaatgtatgtgagatttagtaggtcaataagacatgtgtaaatgtgtaatagcaaatgagaaaaagtggaagaaataacttacatggccctcaagaacagattcacccagaaatccaatgattataagagcaccagccaaaccaccagaaacaaaagatatgaattttgccattatagaaatcagtggagttggaaattgcttcaggtaatttaaagagtgcacagcgctgttgttcatcctatgtctgaagaaatgatctacctgaaattattgtaagcaactgagctttagacgaagaaaaacaaggctgattgcatagcatgatagtatctataggcctcaacaaatggcagagcttgcagttaatataatacagtaagcacatggcaggcatttagaagaaatactggacaggacaatgactgcatcataatagtaataatatctctgcaaaagaaggtacctcattatactctctaaaaatccaccttgataagtttgaccatcttctagatgaagctgtactggggtgattataaatttcttcagcatgtctcagaatgaggtacactaatgggaatattacaaggcagggtgaaaggataagcattgaaatgcccacaaatacaagtcgcttctttaacacagctgggcttgttagaaaatctttccgaacacagaatttactgcagaagaaaatgatattggctttcagtatagttttagaggttaaaactacacacacaaaaaaatcgtggaacatcccaatgcgatgtgcgagctcttgctagaaggtttcagcggatgttgtacaaactggaagctgggagggtatcttagcacaaatacgtctttaggtgctattgtgcaaaatccacataagagctgtttgatgggaatagatgggggtgaagaaaagcatccagcttttacacagattgaatatctaaattactcgatatctctatgaagtcatcagaaaatcagtaaagcagtaaagcttgagttaagatgtttagaatttagtaaccagctagctagagacaattatgcataacatcaacaattctgtattccacacagattgaacataatgtataacaaaagagaatgataaagattggtagggacatttgcactctcttgtgcaattaagtgttattacatgacaacttaagggtgtcttcacccgctttctcccaaacgcaggattaatgtggaagaaaaagatacctagattcattatgttgacagcagagtatttgccaaacaaatgttatcaaaatactttggccgaataatccaatgttagctagttaaaagtaacagagctacagacttccttacctatcaaacatactttggaagatgcaccaatttaatgtccattctagggctttcgggagtatcagatggtttctcctgttttgcaaatgggatttgacagttggtccagctccaggtacccaaggacgaattggaaatgagataatgcctttattgaccatcccaatcaagtaattttctttcctcattattctcatgataatatcatgctccgagaggtcccttacaacacaaagtttctgagatttctgtagcaggacaaccttctcaattattttgggccatgagatggtttggatctcaagatctgtaattttcagactacacaaaaagaaaagagaaggtggattcagtcattgatgattgcactgagctataaacacacatattaatcagaaatgttacctgttacagtagaagtcacgaatattcaatgtacttctgagttgcacgaaaaacttgaggaagttgataagaccgtaagttgtcaatataaccattgatccaatagtgatcattttaggaaatgtgaatggaactaatggattatgcttaacgacttgcattagatcacatggtttttccccggattcgagtgcctctacaccacatttcaaatggccgagggcattccaatcaacaattaagaaaaagaacccaatacagcataccataaaaagtacgttaagcatctcaattatccatttggtaacaatgcatcgtagcccttttgcacagaaatattcataaagcctttcaaagaaaatatccaagtcagcaattggttcgtccttgaagccttcaccatggagaagtccagatgggctctcgcttcctgaacctggcaaccttctgtagtccgataactctatttcaggtggaatatcaatgagcagttgtgctgataatggtgattcgcttctccatggccaattaaatcgtggttgcacatttctgtccttcgaacggaaggacatcattcatgaaagaacaagccaagaccaatatgtatccttgccatgccacaagaaataacctgtcaccaaaaccaaaaggaattcaatgaatcacactttgcataccagcaatttccagcaagtacaacaaaatgtatgtgtgtaaaaactcacaagtatgggagctaagaagaaactgagctaacgctcttacttgtacgtctatatacagctacctttttcatacaatctgagcctaaacaaaattatgaacaagcttaacgcaggtaaaccgaaaaggcaccatggataataaggctaaaaacgaacttatcctatacatgcactagatgccaaccagggtagtgcctccatttccagaggcagcagcaatgtgatgccaaatgaattcattcctaatgatgaaacggattttgctcagaaatgttgacgaattgatcaatcaactgcagccgaaacgtaatcgcgcagtacatatcaccattcacatcgtctgtgtcgcctccacggaaagcaattcggtgtcccgcacggacctcacggctatctacttaacaaccagttgagctaacttctagccaaacctctccccaccaacacccaacccacctccgcacaccgccgttccaaaccctagatttctcatcccaataacgcctaacaccaaaacgaaaactcgttcatccaaagctaaaaaaaatcagcacgaaagcggcgcggaaggaatggggggagagagagagagagagagagcaatagactccaccgacctggcgggcaccggcgatcgccggcgcacggggggagggggcgcggggcggaggaggcaggcgacttgcggtggactgcggcttcggggagggttggggaatcgcgcggaggacggggaagacgaggcgagagacgaacgaggagacgaggagacgagaagcgggtggggtgtttccaggagacgtgacgggatcggggacagaatggaatcgtactggacgggggatcgtgtttattcgtttcgtttatccatgggtttggctttgctttgcttcgcgtgggcggctgctgctgcgcgcgcgtggcctcgcgttgtgctggtcgccaacgacgccaagtaactgggacctgggggccatggggcttgggcttgccggcgcggtggatttccggatgaggctaactaattaaaaattgactaacactaatattgccatttggggaacggatttgttgtctcttcgtttcgtcgtactgctatatattttggttgggttggtgcagatggcacgttaattttaatctgttgaaatcgaaggcttgaagccacttcgcagatgattcacaatttagcctctctcatcattcacagcagatttcgtccttacaaaaacaattagcaaattgactactccctcgttcgtttcaggttataagatgttttgatttttgttaaagtcaaactactttttattcatatttaaccaagtttatagaaaaaaataagtaatattttcgactcaagataaatttattataaaatatatttaattattaatttaataaaactaatttgataaatataaatattattatattatctataaacttagtcaaatttgaaacagtttgattttaaccaatatcaaaacatcttataacctgaaatggagggagtatgagaatgagactagcgtactatggtggtattctcttctagagaaaaataaggatgaaattagttaggaaagaaaactattagcacatgattaattaattttaattattataaagttaaaatataaaaattatttgatattttaagataacttatatataaaaaaatttaatacaaaacacataatttaacaatttgaagaacatactaaaataaaccgagtttaaatatatatgaaagaaacagcatcgtatatctcctctgcggaaatatgccgcgcggtggaaaagagggcagctagcgcacgggatgccgtgcaaaactaaagtcatgggataattagacactcgataaattaatagatctttccaaccgcgtcacctattgtccacatgattcctcgttgctttcctcagccagatcctcctcagtctcgcgcgtgatacctcatgggcagagcactgtcgcagcaggccagagcaccaatgccctcttcctccaagatccttggtatcgctccccccacgtcttgaaccatgcttccgatacagagagtgacctcggttgcggcaatagtagggaacaaggatcgagccgagtggaagggagaagaggagtagtagggaacaaggatcgagtcgaggggaaaggagaagaggaaagagggcatgtacttgatacctcgtagttagccatacctcgcaaccaaccatgatacctaatacctcgtagccagccatgatacctgatgcctcgcagctagccatgatacttgatacctcgcaggtaccatgtatcaggtttgatacctatgggtatcagtcatggtaccacatgtactaagcatggtacctacaggtactaggtctgatacctagatatcagtgatgataccacatgtaccatacctacggggtatcggctatggataatacatcatgtacctgcacacactccgacaatgagcatatgatggctcaccatcgcgtcgccgccaatgaaagctctacatctagaagcttcatggtcatgcccctccatcaccatcagcaacgcgtctaggagttcgagaagcccacgttggtcaacatccttcccgacagcctccctacttcctggttgcccccttccgccatgggagcctagatgtagtgggtgtccatgcctcaaaagcttgagacggaggaggaggcaacatgaccttgtaaccaacgtgcactcggggtagatccaacagtgaggaggagggggaggggattcgttttcgggggcctgcttcgccgtcgccatgcatgcatagaggagctctctgcaacagagagaagggaaagggaaaaaggagggcggaataggagaggcggatgaggaagacgaagactgggaaagagaagacaaatagataataacgaagcgttacccacttattccgtttccacgggatacggttgggtagtttttctgggtggaaaaagccaacgtactagtccctccgccgcgcggtggaaaaagccaacgtactactccctctatccaagattataagggacaatggccccttggtttgtctctaactataggggattctatcaactcatctgacaagcaggagtagtgctgtttaattttgggaggaatgtttaaaatttgagtagatgtggtggaaaaatatgctctgacaaactcatgtcagatttttttaagttcattctaaacctgccaaaacaatactttattctctaaagtacattttgtagttcgttgaatgttccaatgtatactccctccgtcccattctagtactgaatgtgacatattctattacactatgaatttggacacacatatatttagattcgtagtactgtaatatgttacatccggttttagattcgttttttatgggacggagaaagtccttccatatgtccatttatccgctttttcatcttccttaattaatactaaatagaaaataatctctcataattttggacggatggactagtacgttacaacgcgcggatgcacgcgtgtcgctgcgtacagccgaccgcggctacgcgtcacgcgttacacgcgtccacccgcaaaatccccttggtttgttcctaagccaccagccaccgggccacgcgaggcaagcggtgcgccgccgccgccgccgaggactcgaggtgcaactgtgtgcaagtcccgtgcaggccgtctgatctcatgggccagttgaagattaggattcagtccaaataggggatatgtatctgttgggctgcatgacatggccaggcccaatgaagatggcctcatgaaacaaggcctgttcctgggccagtaggccagcctaatcgtctgaaatggcccgtcgacgcgagaatgctacctagcgatccctgggcgatcagattttgatcccctctctccacctggttttctttgttggcaccgtgttacttttttattttagtaaatttgtgcacctaaagtttgtacacctcaagtttacacatctccataaatctttttaaaaaacaaaaagttagaaaaatttatgtatagaaatatatatatatatatatatatatatatatatataaaatttgaattcaaattcaaatttgaatcgggtatgtaaacttttgacttataaactttgggtctataaactttaggtgtataaactttatatgtatagaaatactatatatatataatatttgaattcaaattcaaatttgaatcagatataattcaaattcaaatttgaatcaggtatgtaaacttttgacttataaactttaggtgtatagaaatactatatatagaaaatatttgaattcaaattcaaatttgaaacgggtgtataaactttaggtctataaactttagatgtatagaaatactatatatataaaatatttgaattcaaattcaaatttgaatcggatatataaacttttggtctctaaatttagatgtgtaaacttgaggtgtataaactttaggtgcataaatttactaaaataggaaaataatgcggtgcggtggagggagggagagggggagggggatcgatcgctacccccatcgccacccattaggtgtaccctgcccacatctgactgttcgtgacactaatatttggtttgttcatccctcaaaaaaaaaaaagaggtttgttcatggctagaagattcgttggcaataccactactactgttaaagtggaatcgtcctcctttcgttccctcctgacaccacatgtagcacccgtacatttcgcgtgtgcatccatgtatccaatatttagtttttcttgatcgtcctctttagagtcttagtccaataaattgctgttactatatacgggatgtattatcttttgaaaaagaaactctctctgctattggaagcctccactcaattaatggcatcccaaggagaatccccctgttgaaaccaaatggatatgatgctcaaagtctctgccatgccatggaagtcagccgctttctcagctgtgaatctccgtagctttccagaataaaatggtgaaggacaatcaaggcgtgaagtctgtttcacgatacctataggtactttggattgctgatgtgctattctccaatttcaactttagcgcgccaatgaccgtatgtcgatttcgatgggcctgcaaaggaacggcgccgtccaggtttattactccgtaagtggcggagagaaaaaaaagaaagaaaagaaaggagtgcaggtaccacaacagaaataacaagttagcacaaccagccacacgccccatatagggatgttgatcttgtggtaacctacgtgcagtaaacaaagccactagaagaacgactaccagaataaaatggtgaaggacaatcaagccactatagaagaacgactaactcaagactttctcagttagatagctgctggcatttagtactaccgtacaggcacccctatttgatctctctttcagacataaacaacagaattgtactagtatatgattttatttaccagtgaagtgttccattcctaaagataacggattgtatgtagcaaggtagcatatggtgatgatcagcttattaaactggtatagcaacagcccggagtggcgtagccaactctagtatcatcccgaacttctccgccatgtccaccccgttcttctcgacctccggtagaagcctccactcaaaccggtgcagcaacgacgcgagcatcaggtacaccatgcgaacagccagcggcaaccccggacagatccttcgaccagagccaaatggaatcagttcgaagtcacggccacgcaggtccacctcgctctgcaggaacctctccggcatgaacttgtcagggtcagaccacaccttgctgtcccgaccaatcgcccaaacattcaccagaacacgggtgcccttgggcaccgtgtagccaccaacctgtgtggtcgtttcggcttggtgaggaagcagaaatggcgccggaggatgaagccgtaatgtctccttcacgacggcttcgaggtacttgagctggctaatgtcggattcctcaatttcttgtttggagccaatcactcgagcaagctcctcacgagctttcgccattgctggtgggttctgtagcagctgagccattgcccattctacagttactgcgcttgtatcacttcccgcgctaaacaaatcctgcagaaagtaacccgggcaatcatgttgtatacttcgataatttaattagagttttggtgcaacgagattactacatggacatatcacatactctaaaatcccaatgaataattcagtagcacgcaccgtaaacagaaactgtagcgttggccgatcaaaaccccggccatcctccgggctgcggtagtcgagcaaagcgtccaggaaatcgttcttgggcggctccccggcagcgcggtcccgcaggcgccgttcgatgtgcccgtcgaacacggcctgcagccgctcgaacaccctcgccacccgcctccgcagccgctgcgggtcgagcggcgcgacggccgggaagaagtccgacacgttcggcaccccgacgacgatggtgaactccgagatcaagtcccttaagtcccccaccgacgactcagctcgggcgtcgccgaaatccgcgaggtcggcggagaagatggtgctggagagcaggttcagggaagccgtgaacgcggcgcggccgacgtcgacggccgcgccgtcgcgcgccaggcgcgcgacgtgggacacgagctggcgcaccttgtcccggcggaggcgctggtgcgcgtcgaggctgcgcggcgcgaagagctccgcggcgcacaccctgcggagcgcgcgccacagggcgctgctgggcgggagcatgcccatggagaagccgtcgtgcccgcacgcgcgggcggcgtccggcacggagcgcgcggagaaggcggcgtcgtggcgctggaggatgtcgcgggcggcgcccggggaggaggcgacgacggtggtgacggtgccgaggcggagcgtcatgagcgggccatagcgccccgcgaggcgcgcgagggagcggtgcggctgggagccgaggtcgaggatgttgccgatgagcggctgcgggcggggacccggcggcaggttgcggcgggcgtcgacgaagagacggaggaggtacagggaggagagaaggagaataacgcacggcgtacacaagaggaggagctccatgattgaccgtacaaaacgtgtgcagggtcggaacgatactcgtatgctagggtggatactcctgctaatctgctagtatatctactcccatatagagtgtgtactggaagagatggcaagacacgccaaagatgtgcaacgtgtttgattttgagccaacgagagagggttttctgatatagtcatttaattggaatcgtaccattatcattttacacatataaccattcgtcttattaaaaaaatttacaattattatttattttatttgtgacttactttattatccaaagtactttaagcacaacttttcattttttatatttgcacaaatttttttaataagacgagtaatcaaatagcgcaaccaaaaagtcaaaatcccttgtattatgggacggagggagtatgtcagtacttacctcttagatgaatttacaaaatgtttgggaccaaattgtcattttctctttccttcatccttctttccctttgtcggtacttaccttcaaggccgccgcctccgtctactcccgcttctgtaaaactatattgtataccttcgtgtggtgtctgttaggttggataagatagagtttgttaggatgttgttagtctcatctatccaactgaacagatcacgtgtaatatggatgtaaaccacggtgatggttgttatcaccatatattaacaaaggtgcggcctctaacgaggttcaacgcttctgcacctctgattttcacatggtatcagagcccttccatccaccaaatcgcatctaatccaactcatggtgagttcgtcgaagacggcggccaggaaccctctcggtggaaacgcgatctcggagaaactctccaaatcaaaccatgtgctttggaaagcgcaggttatggctgttgtgcgaagagcccgccttgaggggcatctcaccggcactaccaaagtccccaacgccctgatcacgacgacagcaggcgacaagggagaaaaagaagtcacggctcgtaatccagaatttgatgattggattgcaaccgattagcaggttctagggttcctgctctccactctagccagggacgttctggcgcaagtggccacctgcaacacggctacagcggcatggcaaatgctggaggagatgtactcctccgtctcgagggcgcgcttcatcaacacccgcatcgccctctccaacacaaagaagggcactctctccatcaacgagtatgtttccaagatgaagactcttgctgatgagatgacggctgctggcaaagtcgtcgatgatgatgatctcgtcttgtacatcatcgccggcctcgacgacacgtatgaaccagtcatctccaccatcgtcggcaaggacttcatgaccctgggagaggcgtactcccagctgctcagttttgagcagcgtctcgcgcttcgtcacggtggagatgcatctgcaaatctggcgaaccgaggacgtggcggtggtggaggacagcaacgcggcgacaatgctggaaacggacgtggtcgtggcaacaacaacaatggcgccaaccgtggcagggggcgcggcaacaatggcggcgcgcgtccaccgggaggtgtcgacaacatacccaagtgtcaactctgctacaagaggggacacacggtaattaattgctggtatcgttacgatgaagattttgttcccgatgaaaaatatgcaggatcagcaacttcctatgggattgatacaaattggtacgtcgacaccggtgcgactgaccatgtgaccgcgaactggacaagctcacagttcgtgaccgctacaaggggcaagatcaagttcacaccgcaagcggtgcaagtatggaaattagtcatattggtcattctactgttaaaaccccgaactgtgacattcatcttcgcaatattctatatgttcctaattcaaataagaatcttgtttctgctaatagacttgtttttgataattctgcttacatggaactttactctaaatattttaatctcaaggatctggccacgaagaagcttctgcttagggggccatgccgagggcgcctctatgcccttccatctacatcatctcatgaacgccctcgtcatctaaaagaagcctttggagccatcaagccgtcctttgagagatggcacagtcgtctgggtcatccttcctctccaattgtggagaaagtcattagcagaaataatcttccgtgtttagatgagtcaaataaacaatcggtttgtgatgcatgtcaacagggtaaaagtcatcaatggccatattctagatcttctagtatgtcaagttatcctttggaacttatttattctgatgtttggtgtcctgccctcacctctgttgggggcaaacaatattatgtgagttttattgatgattttagcaaatttacttggctttatttgattaagcataagtctgaagttgttcaaaaatttcatgagttccaagctcttgttgaacgcctgttcaataggaaaataatagccatgcaatccgactggggaggtgaatatgaaaaacttcactccttctttacaaagataggtatcacacatcatgtctcttgcccacacactcatcaacaaaatggctcagctgaacggaagcatagacatatagtagaagttggtctcacacttcttgcatattcctccatgcccttgaaattttgggacgaggctttccaagccgctgtatatcttatcaacagaactcctacaaaactcctccagtttagcacacctcttgagcgcttgtttaataaaaccccagattatacttctcttcgagtatttggttgtgcttgttggccacatatgagaccttacaacacacacaaactccaattcaggtcaaaacaatgcaccttcttagggtacagtacactcgataaaggattcaagtgtctcgatccttccacaggtcgtgtttatatatcccgtgatgttgtctttgatgaaacaaattttccctttgcaaaactccacacaaatgccggcgctagacttcgttcagaaattttgttgcttccttcacatcttctaaatccagcacctaatcctggggaacaacagttagatgacaatatggctaatattcctgctaaccctgctgatcagttttttggaagcaatgtgcagcctgtttctgcagaaaatgatgaaccagacgatccttcatatgccacagaagatccggccgaagaaatccatccggaattcagtgcagctgcaaaagaatcggcgtcgggatcgccgcctgcatcagatgctgccgccagccattctagcgctgccacgtctccggatgtggtacactttcccgcctctcctcatgtgatggcgcctacctctgctgacaactccacgccgagtcactccggtcctgacaccgccctgcctaccagccatcatgatgttatgtcgccatcacacagttccgcaggcgagccgtttgcgacaggggaggaagtgattccagcgccatctcgcccaaccactcgtctgcagagaggcatacactgatggcacagttaaatacaagaatacttttcttactgtgactgatgagccagaaaatttaactgatgccttgaaaaatacaaattggaaaaaggctatggatatagagtatgatgctttgatgaataatgaaacttggcacttagttccacctaggcaaggtagaaatgttatagactgtaagtgggtctataaaattaaaagaaaacaagatgctcgcctagttgctaaggtatagattatgaagacactttcagtccagtagttaaggctgctactattaggattgttctgtctattgctatgtctatggggtggtgtatgagacaactagatgtacagaatgcttttcttcatggtttccttgaagaggatgtatacatgaaacaaccaccaggatatgaggataagtcctttccagagtaagtgtgcaagcttgataaagctctttatgggctaaagcaagctccaagggcttggtattctagacttagtaagaaactgatctgggttttcaaggatcaaaaggagatacttctctgttcttttacaatagaggaggactaattatatttgttcttatttatgttgatgatataatagtcactagctcaagacaggaggcagtgtcagctcttctgcaggatttgaaaaaggagtttgccttgaaggatctgggagatcttcattacttccttggtatagaggtaaataagatacctaatggaataatccttacacaggacaagtatgcctgtgatctcttgagaagggtaaatatgtttgattgcaaaccagtaagtacaccattgtctactagtgagaaattatctgctcatgagggtgacttactagggcctttggatgcaacaaattatagaagtgtagttggtgctctccagtatctaaccttgactagaccagacattgcttttccagttaacaaggtttgtcagttccttcatgcaccaaccactattcattgggttgcagttaagagaatcttaagatatttgaaacattgtactaaacttgggttgaagctatgcaagtccaagtctatgcttgttagtgcttattcagatgcagactgggcaggatctcttgatgatagaagatcaacagggggttttgcagtttttctgggagacaacctggtatcttggtgtgcacggaagcaagctacagtttccaggtctagtactgaatcagaatacaaagctcttgctaatgctacagcagaaatcatgtgggtacaaactttgttgacagaattacaagtgcaaagtccacctatggcaaagttgtggtgtgataatctaggagctaagtatctttcttctaatcctgtttttcataccagaactaagcatatagaagttgactatcattttgttcgagaaagagtatctcaaaaattgttagagattgattttgtacctacaggagatcaagttgctgatggctttactaaggctttgcctgttagacagttagaaaattttaagcacaatctcaacctaggaaggttgtgattgaggggggctgtaaaactatattgtatacatgcgtgtggtgtctgttaggttggataagatagactttgttaggatgttgttagtctcatctatccaactgaacagatcacgtgtgatatggatgcaaaccacggtgatggttgttatcaccatatattaataaaggtgcggcctctaacgaggttcaacgcttctgcacctctgattttcatagcttcctctccctcctcggcggcaagcacaacatcctccctaaggctgtccttgagctcaccacacaggacctccgccagatcagggtctcccctcgcaaggcctcctacctccacgacctcgctcgcaagtatacctctgggatcctctccaacgtcgttgtcgtcaacatgaatgcccgctcccttgcctgcttgccaccatggtcaagagcattggcgcctgaagcgtccacatgttcattttttccctcaatcgtcccgatgtgctcctcgttgccgaccttagggtgcgcaagggcgtgcagcatgtctacgaccttgatgtcgtgccctagctgccgtagatggacaagctacgagcagtgacgcccttaccgatctgccggggcatggtacatgtggcagtaggctcatcgaattcaaggcgccgtagctgccgccggccatccctatcaggtcacctgcactgcctaagcatggtgatgacctcatgctctagcagcagcatcagcaacagagtgtcttccaaatgattgatcctcttcagatgctcccaaggatgggttgaatttggtatatgttatgtagttctactcattacttctcggtattagttgggtcctaactctgtcaatccaatgattgttttatgtacctatcgttctgtgttgggggagattggaagagagtagaactaaaaatgagggcagcggggaggcatcgccggcggtgggattcgggtggaggacaagaccaagagtaaggggaaatgatgagggaagagagaggtagaagacgagggcgatttcgtctaatacatgtgaaatatgaatttcagtggcaccattgagattacaaacaagtaacagtggcatcgttacaaatacacaaacagtaatgacatatttccaaactaggatatttttaatgctatgatccaattaaccaaaaaataaagtgcttgtttatcgtcacttacaaccttaataaattttggtactgctctttccatttcatatatattataaattgttttgactttcttttaaacttctttaagtatgactaaatttatagaaaaagttagcaatttctataacactaaattggttcaatcaaatataacattaaatatttattgataatattattttttttatattgaaaatgttactatattttattataaacttggttaaagtttaaaaaaatgactaggaaaaaactcaaaactatagtatgaaacggagggtgtaccaaattttggtaacgcaacaaactaaatacagtgctaccaaaatttattaaggttcctctcttaaaactctaccaaaatttggcaaaggcataaaagcaaacaaaaacaacacagtcgaaatttggtaatgccaatacaaaatttgatatgattgattagggcaacaaattaaacaagctcaacaataattatactctagtagtatcgatcactatctccatcctaaatatatatgtttatttttctatgtgaatattcaataaccggtgtagattaattaatatatttgatcacaagatacaattgtatatagggaatgcatgtatccagcaaaaagtatcaaacaagtgaaaactggagctcaaatttctataaattcctaaaacaattattaggtgtaaccgtgaaatatatttttaccaaatttaaagttcaaactcaactttattttggagtaaaaaagacaatttttggataaatagtaacaaaataatatttacctgaaatttgtcatcttttttgcaaagatgcccatattattttcaccactgtttttaactgggttttctaccatttccgaccttactgatttcaggtggttcggtcagtgaacatcagaaacaagtgttgatcggccggtaatttttgtgtacggtttttatacatagtcaaattggtgtagcaatagcttggaggggcgtagccaacgtcattacgatcccaaatttctcctccatgttcaccccgttcctctcaacctccggcagaagcctccactcaaaccggtgcagcaacgatgcgagcatcagatgcaccatgcgaacagccagcggcaacccgggacagatccttcggccggagccaaatggaatcagctcgaagtcgcgaccacggaaatccacctctttctgcaggaacctctccgggatgaacttgtcaggctcaaaccacaccttgctatctcggccaatcgcccaaatattcaccataacggtcgcgcccttgggcaccgtgtagcctccgatctctgtgtccgtctcggctcggtgagagagcagcaacggcgcgggaggatggagccggaaagtctctttcacgacggcctgaaggtactcgaggctgtcgatgtcggattcgtcgatttctggtttggagccaatcactcgagtaagctcctcccgagctttcatcatggatgatgggctttgtagcagctgagccattgcccattctacagttaccgcgcttgtatcactccccgcgctaaacaaatcctaccaaaaaatacccagacataagtcagataatttcatatttgcacttacacttaccagtggttagctacactacttcaagagtgcaactctctcgtttgccgtggccatcgcagtcgcaatgacacccacgttaaggttaaggtctgtttggagagcttaaaattctaagaaacaattagttgatagcagcttttgaaaacatagaaaaactgggtttatcagcttctgacttctattcattttctggtttatataactacagtttctcataatctaaaaaaaagctgaaccgtttaggaagcttccgattctgaaaaaagttgtagcaactataagctccctaaacagagatggagataaggagagcaccagagctgaccaatgagaatgagctaaaacgctattgccaactcacaatctaaaacagtgttcgggaggtggagcacatgaaaacttggtggtttattaatggttaattaactaagtattagctataaataatttaaaaaagaattaatataattttttaaaccactttcgtatagaaattttttgtaaaattacaacattcaataatttaaaaagcgtgcatacggataacgagacatatgagttggaaaagtaaagaaaaaaactcggcctaatataccggtataccgtaaaccgtgaccgtagcgtttgccggtcgaactgccggccatcctccgtcgtgcggtagtcgagcagcacgtccaggaagtcgttcttgggcggctcacccgcgtcgcgctcccgcatgcgccgctcgatctgctcgtcgaactcagcgaacagtcgcgtgaacaccctcgacagccacctccgcagccgctgcgggtcgaacgccgcgaccgccgggaagtagtccaccacgttcgggacaccgacggtgcccgcgaactctgcgaccgtgtccgctaactcccccgccgatccggcgcgtccctcgtcgaggtcggcgaggtcggccgagaacagcgtgcaggagagcatgttcagcaaggtcgtgaacacgacgcggcggacgtcgacggccgcgccctcgcgcgccatcctcgcgacgtgcgacacgagccggcgcgccttctcgcggcggaggcgctgctgcgcgtcgaggcggcgcggcgcgaagagctccgcggagcacaccttgcggagggcgcgccactgggggctgctgggagggagccagggcatggcaaacctgtcgtgcccgcacgcccggacgatgtccggaacagggcgcgtcgagaaggcggcgtcgtggcgctggaggatgtctcgggcggcgtccggtgaggacgcgacgatggtggtgacggcgccgaggcggagcgtcatgagcgggccgtggcgctccgcgaggcgtgccagggagcggtgtggcttggcaccgagctcgaggaggttgccgacgagcggcagcgggcggggacccggcggcaggttgcggcgagcgtcagagaagagccggagaaggtacagggaggagacgaggagaataacacacggcgcatacaggagcaggagctccatgattgaccgtacaaatgtgtgcttactgcttagttagccgcaaaacggtgcggcggactggcattgtatattgagataaggttgggggcgaggaaaatgagaatgatagttatgatatgattaattaagttttaattattaaaaacttaaaaaatatatttatcttatattttaagcaatttttatataagaagtaaaaagcattcgtaggaaatataagataaatactaaatcaatcttaatagagaaaaacaaaggtttgagtagtgacggttttctcttgccatggttagtccttgtactgttctttatctttacgggccaagcttctccattatactttccatcctataaaagcatctcaaacaacatctctattctactctctaagctaaaatttagctagtgtagataaatttacagcttcaacagacttgctagctggatggcttgtccatctggttggccaaacccatcccctcgctgaccagtcgtgcacaacaaatggcatggggcaagacagatcgagaaggctgcaagtggcggcgtcccacgctgattcccgtctaccgcttgcctgccgcgtgccgattcctgtcgtcggccaccccgtcgttgtgcggaaagaaaaacaaccaactgcagtgctgccggctcaagaaggagagtgagaagaggtagtgtgcggactctctgacgtcagagacggggatcttctggagcaaggtggagccgtcgccgccgctattcgactacctacccatcgacgcccacaccaagtctgtcaccaccgccggtctccgtccattcccttcgccgatttcctcgcctcccctaccaacgcgagtagcagtagtgtcgctaccattcatgccgctgccgcagccgggcgcggtcgctggagcggcaaagctttgccgctccgtctgccatgcctattgactacctctctctttctccggcgttggccgcctcacctacatcgtcgccttcgacagcctccccctccggcgctggccactccgccatcatcttagcgctgccagtggtgaaccatggtccgtggatagagattatggagtggagaggttgtggagagaaggggaggaagaaggaaagatttggatggaagaaaaaaacatataaagattgatatgtgggatccattgtcagattggagagcgtaatagaaagattattaggttgaagataaatttggctgggggtgtttagatggggctaaaactttttaagtccatgtcacatcgaatgtttggacgctaatttgaagtattaaatatagactaataaaaaaactaatttcataaatgagagctaatctgctagacgaattttttaagcctaattaatctataattatgaaaagtttactgtagcatcacattgtcaaatcatgatgtaattagactcaaaatatttgtctcgcgaattagtctaaggttatggaataggttttataattagtgtatgtttaatactctaaattaatatccaaacatccgatgtgacaggtacttaaaataagtccctgtttttcaaacaggctctaattattttgcaggctgatcaaatgggtatttgaagggtcatatttagagatggagacgttttaaggctgtaagtgggatcccttagcacctgtcatttttattttaaaagacatttccttccggactaaaaatgcccctgcagcaatctgtgctaatagtacaattaataatacccaaggagcaacaactcaacagtcaacacaaaactcgcaaattttctgccatccagactctgttcatccgccgaatgaactcttcggctcggagcataagctcgtcttccagttccacgtcgtctccgtgcttctcttgcgatgcatccgtagctgcaggctcttcctctcgtgccgcacttctgccgttttcgctcgccagtgtctcaacgttgtccccgtcgcctgctcgcaccagccattcttccgcgcggccattgacgccggcaacgggacccttgtgtcctccagggttcatttccctcccttgcaccactgcatcagcttccaaactgcgatctccgtcagcgcggctgctgatctccggggcagcgcctgcgccgctgccggcgaggaggaggagagcgattatgagatgagagacgcagaatgccagcagcgacgggctggaagaagacgcccagagcgcgatcagctcgacggtggagttgagcatttttggagaacggagtgtgtgtgcagctcagcagcttgatggtgatccttggcgccatggctcttatatatccttggtgttcgaatcgaattgtgcagaggaagacccggacagaatcgaattgtgcagaggaagattctgaggcgtggaccctgtggccttgtggggtcgtggcccggtggcccctggaccttttcattatcgattccttcctacgcaaaaatcattttcgctaattgaagaggtcagcagatgagagcacgtggccacgtgggtggaccctgtaaagtctggatcagacgggagacccatgggtcttccagcggaagacagctgagggcatgtttaaatcccattttttaccctgtcacactaaacgttttaatatctttataaagtattaaatctaggctaaaatataactaattatacagattgtgactaatttacgagacgaatcttttaaacctaattgctctatgatttgataatgtggtgctacagtaaacatttgttaatggcggattaataaattcgtctcgtgatttattgacggattatgtaattagttttttattagtgcccgaataccctatgcgacaccctgtatataatacctgatgtgacacgccaaaactttatatctaaacacccccttagacaaaggatttggcgacacacacgatgagtcgatgatttctatactcgaactataaacttcaatttcctcgttttcaacatgcttcaatttcctcgttttcaacatgctttctaacagtgcatttttataaaattcttttttaataagttacaataactaatatttaattaatcgtaaaatcgaaaagagccctcttgatttagtcataacaagcgaccccatcaactattatctagatatgtgttaattggagaatcttacttaactgtagtactaaggccatcaagcaaatagaaaacctatgcttcaataaaaattttctcttaaattactcatacaatctacgaaccgattacactgttgtattcgtaacaattaaatctttataacaagatctcacatgattatattttgatgaaaaattataaattactttcatagggcatgtttagatcaactggcaaaatttttcatgcttcaataaaaattttctcttaaattactcatacaatctacgaaccgattacactgttgtattcgtaacaattaaatctttataacaagatctcacatgattatattttgatgaaaaattataaattactttcatagggcatgtttagatcaactggcaaaatttttcaccctatcagataaaatgtttggacacatgcatggagcatcaaatataaatgaaaaaaaaactaattacacatattacgtgtaaattggagacgaatcttttaagcctaattgctctatgatttgataatgtggtgctacagtaaacattctaataatggattaattagttaataaattcgtctagcagtttataggcagaatccgtaatttgttttgtttttgtctacgtttaatatttcaaatgtgtatatgtatatttgatgtgacacgccaaaacttttcacccctagatctaaacaaggccgtaatatatctaaattacttttagatttcactaaattacttcttatagatatataaaattaaatttaataaagtctaaaagttatttaaatatattataaaaagtaacttaaaataaaaggattttaaaaggaaagtaattttgtcatgatattagaagtaaatccgttgtagggttaaaaacatgactatctataaattaaattaatcagcaaaaatgatggaattgattaaaaacaacaataaaagtaatcaccttatagcagtatgaatgtacgggaagtaatttaatcaaatttaaaagtaatgtatgtatacgataaaagtacgtatataataaaagtgatttacaaatataaatattttttccatcataatataattatgtaagatcttattgtacagatttaattgcaacgaatataacggtgcaataaaatcatagatagaaaattttatttgaaatttacatcggtaacgaggatgccattatttaagagaattttatttgaaacttagatgggtaatgaggatacagtaagaagtaagaagggtaacgatgtttttttggtaaaaatgatggtagctggttacactatactttttttttgggtaaaaatggtcactggttagcactggtgcaactcgcgccctcaattaattattaattactccctcctgttccgcaccgcaaattgtaattattaattacttaattttttttaataaaataaatggtcaaacacgtactaaaaagtcgtactaaaaagttaacggtgtcaaacattttgaaacgaaggtatgttctaataagctttcctgtttcgcaccgcaaatagtcttcccttgccatcaaacgaacaaaaacaaagccctagatagcgtaacgcagtttattccctaaacagctaccttcgtgaaacacaaccatacatgcctccgggtgcatcagcgtcagctggcagccagggcaaccttagcaaagaagcgggtgccgctgtcagatccaaacatggtgttgaactttgcttataacgtttaatataatcatttgtgttccttcaaatcacgcttgcgccacgcaacatcaaaattaagcgttttgtgggagcatgtccacccacatctgaccgtggggaattattgctcaaaccctcacaatcttcacaaaatttacggaaacgaagtggttctattcccatctagtagggctccactggtgcacggaatttggctccggcatagacggcagcagcaccaagctcctcctcgatcctaagaagctgctccaatttaaagaggggaaatatgagttagttagatgcaccaaaacctcaaaaattaaaagtgtcgttagccaacaccaggcaagtttacacaaacgcactgaaatcaacatgtacaaagtatagcagcagaactagtgtaattttgcacatcaaccaacagtacagaagtatagcaaaagagggttgaacatattcttgcctggttgtacttggcaaggcgctcagatctgcaaggagctccagtcttgatctggccctgtttcatgacaaaacattgatgcatttccaagttatcatcaccattaagagcggatctcacaagctctttcaaaagataagcggcctatatttgttgaagcacactaaagaaggcacgcaaagtatataccgtggataaaccaactgccagatcagcaatgaatgtatcctcagtttcaccactgcaaccaaatcaaggaaattaaatattgaagtcaggaaagaaggtaggacatacaagacgcagaacagtaaataaaaaaaacagcatatgcatacctcctgtgactggtcatcacaccccagccagcacgttttgacatcttgacagcctcaatgctctcagtaacagatccaatttggttaacctaaaccatataaacaggtcacaagattattacgctggcaaaccgatatggctaatttgaatacaaccttaaacagtatgtaccttaaggagaagagcattgcaggccttgtccttaattgccttggctaccctctgcaagtcaaattggtttgaatattgaagccaacaaggaaactgaaaaaagcagtatataagtcatatgattagcaagtaacatacagttgggttggtgacaaggagatcatctccaacaatctgcacttgatctccaatttcttcggtcatcttagcatagtgaacccagtcatcctgatcaaatgggtcttcgatcgagacaattgggtattcactaacaaatgacttgtacacattcttcaggctatctccagatatcttctgggaaccatcattgttctaaacaaggaaacaagcatcataaatgggggcattaaaacttcaaaaaatttcaaggggaaaaaactgacatttacctcttccttgaagttaagatcataggtttggtcctcagtgtagaactctgaagcagcaacatccatcccaatgacaacctggcatatcagtacaaataacattccataccaaatgtcagaaattgaagtgccttagcccataaccatcaaattaatttagccagttgtatgctcaacaaaccttgccagtgtatccagccttttcaattgcagtcttcaaaagctcaaggccctccttgttttcctacaattccatagatggcaaatatataaattcagaattgactactagctaatatctaatattttataacagcagattggacaatgcgattccttacttacacagttcaaaattcaatatgatatagagatgctcttgtatatccaaaataatagtatgaaacaaataggacaaaactcttaacaaacttttatggtactgaaatatagtttctgagctcacattttgaagagactgcaactaggttgcaaaccgaaacaacatataaattaaagcaagaaaaaaagataaatatgctttggagtgttggagggaaaatataacaggtaatacgtgtaaaagaatttgaaagtacatatgacagacatgtgcaaacaaacaaacaacaacctgaatgtttggagcaaaaccaccttcatcaccaacattagtagcatcttgcccatacttcttcttgataacagactgtagaacatgagatatattgagtgttaatttttgcacaacaatccagttccttaaagaaatgtcaagaaagtgacctttaagttatggtatacttcaacacccatcttcatagcctccttgaaagatgaagcaccagtagggaggatcatgaactcctgtacagaatttcaaacataaactacaatctctggaaaaatcactagagaagaattattatatgtgcatttttgttgaggcattgcctgcatagctagcttgtttccagcatgtgatccaccattgatgacattgaaagcaggcacaggcaaaacaagttgcttgttaccagcaaggttagcaatgtgctgcaatatagaaggcacgtaatggtataagaaaactggttagtggaaagaacaaactgtgtgcattcaaatataaaaatataaaacgagttctcccatacttgatacaacggaattttcttgataatagctccggctttgcatagagcaagtgagacagccaggatagcattagcaccaagctgaatttcaaaaaattatagtcagatagcagttagcactattaaatgagtgcagtgtcatgcagcgctacaacataacacaacatccacaacaattctgcagtaccttttgcttgcaccagccccactcgtttttggttccatccagttgctgaaccatgaagttgtcaatgacagtctgttctgtagggtcctgcaaagccaacagaatatgtaaacatacatgaatttaatactgtaatatgcacagaaatatggtagggaacacataccttgccaatcaatgctggtccaataatagagttcacattgtcaacagcctgttgaaataacaaacggcatgtaaagatgaaggcagacatccatagaaatgttaaaaatttaaaagatcgcacaacgcatgatgcaagagggggggctaagtaaagtaggtcatacaattgcacttgcacacaatgactatctcagagtagttggaatgaaatacaaaatattaatagcactttctgtcattcagaccaaaacattcagaaagagacagctctaagaataatgaatgttgaatatattagctggtgaaatgaaagtgaaacttgcttgtgcaacgctacatatagaaaacatctaaggtgatcattccacaatctttattagtatagactatagaatatacaaggcctgcattgtgagtgcatagctgcataagcaattaaataatcatccgtgctagttgtaaagaaccacaaaaatgcagcacaaatgaaaaaacaataacaatatgttaggcacagatgacaacacggaagtagtggatacaaaaagtcacaaagctatcaaagatagtatagattaattgcagaaaacagctaaccgaaatcttctgacaggaatgtgttaaaggacaaaccttgaggacaccctttcccaagtaatcagagccaccatccctcaattccaaagcttcatatacacctatagtgtagcagaaaatagcatcagttcactttctaactaataaaattgtcacccgaagctttccatatagttgatataagctgaaaaggactatcaaaaactaagttggttcaattaaccagatgcatcaaggctagaaccacagtagggaaaagaagttgctgataaacaaacaactcaccagtagatgcaccgctaggcacagcagccctcgcaaatgttccatccgagcagcaaatatcaacctggcaacacaagcatcatattttagtaagaccatttagttgccaaaaccattcaaaactattgatttagtccaataaaacaaacgaattctgtaacaactgtatgctcatatcatgaaatcctggaacaaaagcaccaagcaacacgatatctaacagtggcaatatgttcaaagcaaccatctgttgcagatatagcgcaaattccaaaatcaaagcgcagttcgacgtgcaactaatctctaggtacacagcagtagattggatcgagtagggatcgagcataactcaaagccaaagccgactgagccgacagaaataaaccgatcagagcccaatccacccttcgcatggccaaatcggagcagggggcatcaacatttacaattcacaaaccacacaattcaggactctaagccggttagccacatcgcacacagtgattaaacaaaccctactacgggaactccaatccgaaccgctctaaccaacagaccaagatcgcggaaactccaatccgaaccgctctaaccaacagaccaagatcgcggcatcgcgctaagaaagcacccgattcaatcgccgcgacgccctagacagaacgaaactggacccgcggcgtacctcgacggtggggttgccacggctgtcgaagatctggcgggccttcacgctctggatggtcgccgccatggcctggatcggatggatcttagatcggggaaggggatggacttggagaggaaggcagtgacgaacagaggatataggaattttctgaggttttgagaacagcgtcgcctttttatgggcagcgtgtgcgtggctttcggcggaggaagtgagggcccacccgataaccgaagaagtggcatcgccgtcctgcggagagcatattcgcccgcgccgcggggactgcaacgccgcaattgccgggccgttggtgtggtggcccgtttgtggtggcgtcgttgcatgcgtatctccttgggaataagttcacctttcatcgctcaactttatgctgaatcagtatgacatccctaatccctaataccagaaatcttcactcttcaaatcttcatccctaatcatactgctgtgagaaccacacggttttgtatagtttatgggtgaagatttctggtattgaagattagggatgtcatacaaactcgacgtaaagttgagggatgatatctgaacttattcctatctccttgcagctggtagtccagcccacggggaaccgccgcagcagggccgcagcttcacatcttgggctgtattactgttcgttcgtgtcgatgaatgccaatctggggtcactatacgtgatgttgcaagttaagttttttcttttggtacttcgaaatttgaatcacgtcgaatatttatctgatcttggtaagattggagtacacagatgggaagcacacacatgtcactgcatcgagtgagaaaacccgaggatctgctactgatatctcctggactcctgccatttgcttggctgtttctttgcaacctcctccgaattccaatccttctgaaacggagaaaaacatggccgctcagtcgagcatagagacgcttccatctcttagcttgagcacacttgtggattcaaaaaagcataaggatctgcaccgttttttcacaggttccactgaaacgggttttccaagtctatagttgtcaaaatatgcatatccaacctgcatatggtgcacactgcactgttggtacttggacggatcgatatctcctcgtgcttggagatgttcaaatgtgtatcatcgaattcagatttcaggtgtctagttgcttaataacatcacggagcagtattttgttttacctgtcggtagtctatgggctatggcagtctgcattcctgaataatgctcatacagatatgaagctgctctgaatttggaacatttttttctgcatgtttctaccgcaagcaagaaattaaacagcctgcattcctgaataaaggctgtgtttagatctaaagtttagatccaaacttcagttcttttccatcacatcaacctgttatacatacacaatttttcagtctcatcatctttaatttcaaccaaaattcaaactttgcgctgaactaaccacagccaaagacagactgtggcactgtgctgaactccaagacatggccgtggtttcaccacctcttcgcttctttcagacgcagggtcacaatccaatcggtgttgaaatccaaaatcaaagggtgcttgttttttaaaaggaaaaacgtcgagaactgggggttgatggtacatctcagtatcgtgcaaacactgtaaaactgttcctactgtgatcggcacagcttgggcccgaccaagctctcgcagatgatccgaactttgacatcgtagcaggtactcctccaatggctccaatcctccggcctctggtgtcagcgcgcacgtaccaacatgacgtgataaaatgcactgtgataggggtgtttatatcggagtgaaaaattttgacgtgtcacgtcggatatacggacacatatgtaaagtattaaacatagtctaataacaaaacaaattttagattccgcctgtaaactgtgagacaaatttattaagcatgattaatccgttattagcaaatatttactgtagcatcacattgtcaaatcatagagcaattaggtttaaaagattcatctcacaaattagtcgcagtctgtacaattagttatttttttagcctatacttaatactttatgcagatattgaaacgttcgatctgacacgatgaaaatttttggggtgggatcatatttccttcgtaaagtagttgacccacatttcttttagtacgagtattaacactcttccatcagctttcattgaccttggcagctataatcatttcgcgagcttgagacatgtaggcctggcctaagcaacgtcgtcaaaagagcaatccgtgcaccctgtacttagagaaaaagacgatggcatgcacacctggacactgatggagtagtcgagtagatgtgaacgatcatgtgatcgacttgtgagggttgcacagtgcccgtctccacgcgagttggaatcggagaacggaggttcccccactccacaaaaagctcacttgctttttggacttcaccggggtatgcgtgcgctgcggcacaggacgctgctggtgtcggagagggagcgctagcgatttggaccggcgcgagcgaaagggagcgcggggccgcacggaagttttacaatttacacacgcgcccaggcggccgcactggcgagtccactgcctacattgtcaccacgcacgcatgcacgtaaacgcaggcgctcgcaaaccgcacggaagttttacaatttacacacggggctcgtacgtgtaccgtgcgcccgttcgctcggctggctaggcggctagtatagctgcgtttgtttgctgacagtgcgtgtacgttgcctgcagctctccctctccatccaagcgctgggcacacagtataacggcaacaacggcaggcggcgccacagcgtacgtatggcgaagtcgtcgcgtttgtccgcgtctcggcctctgcccacccggagaccactacctgctagctttggcggtgtggccagtggacagtggtcctccacgaacgagccagcgaagctaagaaccttgcttgctttgcgtagttaatggtaagtgaaatcatgtgggggaatggggatgtgcgtcccgcggcatgtggtctcaattctcatcgatctgtatccggtggtggagacatcctgctgttaaccgggacaacttcgacttttcgagggggatactactactgtagcggtagatttgggttaggccggagtttttcccaattgtgaattgtgatcttggtcgcttgccccaacaaaattttcacggagaaaaatacagatgcaatcatgcaaatatccagttctttaaactctgctgatctgattcaaacctactggcctggctcagtggtataactcacaacattcactgttacagaaaaacacatacaagtcggcactataggtattacaagtttagaacagttaaaaccaacacatataatgttttactcgtctccataggttaaaaaaaatatgtaaccgatacttttgaacaactatatgtgtcggttcttgagaaaaaacgatataggtatcggcacctattatatattataggcgttgggttaattaaaaaatcaatacttataaaatattataagtgccggtttttttaaaggcaacctataaatcgagccgagccgcatgggggagggagagagccatgttgttcttatccgttcgctctctctcgcgcttcacccgtccttatctccttcagtccttctcctcctccctccccctctcccacctctctctcctctctctcatggtggcacggtagtggcgccctttcgtcagctcctcacgcgctaatacaacgggctccttctccaacctcaaggtggccattgcgagctttaggagtccatatccggtcgccacgagctcggggcggcctcctcctcacgacgcacacggtggtggcagtgtgccttccctttggcggtggtcctcccatcgcacccttctccaacctcggtcttttgtgatgaatttttctgtgtaatttagatttgcgatgaattttctaagagattttgtgattcaatcttggtataaaattctttgctcgaagcttcgcatcgagcagctttttttattattattcggacatttttagaaccgatactttttatttttcttatccgtgccttcttataggtgtccgttgggaaaaatggcatctatgccgtcttttattccaaccagctatcgcaaccgcagtccaggtccacacaactcgcgtacgctcgatgtgtggtaacggtggccctcgcttcagagcgatctcccagaatgccagtggactgacggcacattgaagcccctcttcctattttcctatttttggcacggtcgaacttgcgtccttttggccgccctacacacttaactccggtggttggattacgacgatactcctgtatacccgacgttgatatcacatggcggagtcatgtacgcggagccatggcgccgctgatgccgcgtcggccgactctaaatttcggatcatatcaacacccaaaaattcggatccagccagctgcgcacatgcaaccgtgtgtttgaattccgatgattcgttaggatatcgcatgcagttggtcctcgaacgggacctcgcctgcttgcccatcggtctcactggctcacggcttctccggctcgcttcgctagccttggcggtggccggggccggaacgttactgtagcttcaacgacggacatgaatgctctgtacgatcgctgtgcatgcaagctaggataattaagcaggcagaggcaggtgtaggtgccggccgatacttcagcacactgcacacgtccctccgctgtcagttcctgttttcatggtatgcagcagggcagagcatgcatgaatcatgatgcatatggtcgagcccgagaagacgacgattagactgtctacaagtgacctataagggcacccaaatctaaaatgggtcttcgataggactatttcagcctccaacagagtacctatacagaagacccattttgtgtgctataagaagcataacctaaatctgagtattctctctcctgaagacctatttgcagtaaaagttctcttttaggtcttattgttggagaagaccaaaaataggtattgaactctttgactgtagcgctatgcaaacgtgaaatgtgtcttgtattttgggtttcattgttggagatagccttagagcggaggcggtgcatgaaaaacagatcatttgcacaacacttaaaacaaatatgtcttctggaaatacttagggttggtttggtttgtggcctaaataggccttactaaattttgtcaatgccatattttggcatgactaattttggtaagacaaagttatgtttggattgaagccaaaatagcttaagttcactactgaaatgacctattttcttaggcatgacaaaatttggcttcaaaccaaatagacactacacactattgaaattgctaaatattggtaagcctaatttagacctcaaatcaaattagcccttaaacaggttatcaaaattctgcaacacttaaacccgtttaaaaatatttattaagttcatttgtcaacatttttaattgatttcttatagataatctgtgatcataattcactacgtaatctaaaacaaatggggcttaaggatttcagttgcacacatgttctatttttgctagctatagacacaaatgaatgttctacataattttcttctcttacataatttaggttgtaggtggacataattgctcccggctataaaatccgctcccttggactcggttcaaagggccgcatgcgattgattggtgaggtttggcatcagtggcgagagaaggaaagaggacgcggatgcgatgtgagaatggcatcggagataagggaaaggaaacgagaggactatggtaggtgaactaggggatcgatgcagttggcaacaccgagcaaaaatgacggtgttgaatgagagatgtagcgaaaagaaaaaaaataagacctagaaataatagttggaataggttagaattgtatttaacaaatctttattttgtatgatctcgatttatgtctacaaagttgcataggctaaagtatataacataaattggtgccacttcaagccacgatgtactcactagtacagatccttccatctgtgacggcccataacaagactggaatttgcgggccgtcacaggaagtaatctcaattgggccgaagtttcgcccgattgagatatggtcgcacagccatggtatatcggcataaaactaaagcccgtaccggattaaatnattnttaaannnttttattaaanntnaattaaaatttttttttttnnattaaaatttatttttttaatggnnttaaaaaatattttttaaaaaaataaatatnccttaaaaattattgattttttttnaaaattttattttttttttttaaggttatagggg

SEQ ID NO: 7973 - DNA, 1249 bp, Oryza sativa
ccaatgcaagagaatgggaaagaaggcagcctactcgttctcggtaatacgcacacgacaaagatacaatctcgtcagacttcttaagccactaagtgtgactgttgggtggaaggaacagttagaaaggtgaagatattggattgagtctccactcccattcgacagaagagagcatgggaaattgtactttgcctggaactgggtcagtgcaattatgagttcttcaatccctggtttaacagcaatctgaagccaattgttgagatatgaagagcccttcccactataatctgaatataccttaatcgtcagttttttcacgccgatgcctgagtgccttttgagaatgtggttgactttgctgtagaaaagtccagccaattcttcgtttccatatgcatttttgctcaaccccaatgcttcactactgaaattgaggttggggtggcatctccaggaacttagaaaggaatgagacacacaggcagctcgggcagcatcccgcattggcatcaaggaatgtataagacgccagatgtcctgcttgcacaagcatgggagagaagttaaccattggaattgtgaagacagatggttgaattagatggaagaaaaaaaatggtaacttatggagttaacactttaaccggtccagtgctacctgcctgattatgtactattgtactatgaattgtatagttgacttctgctaggcaaatatggtcttacccaaatcatgtattaggtgctcggcactatttgtttctttgcaattgtgccagataaaatggatggaatgatgtttaattgtctaatagcatgttattcaatggcataaaaggaacagaaatggacatgcactttgcatagggtaccaatatctgaatatataaacaaccagaaagatcagttaaatatgtaacagaactaaaggtgtgtttggttgcttgcttggattttcatacactaggtcaggaactcaggatggggaagatgcggggagtcaggatggggagatgcggggaatcaaacaagaatgccatcctacaaggacatgtggctcacaaaattaccatgtactgcctgcaatggcctaccggagataacatgtcacatttgttagcaaggaaccatttttgagatgttaaaatttaaggaagttagaaacagtatggagactagtggcaaaggctaatcattgacgttgacttgagaaactcccagcctaagaaccaccagcttagaa

SEQ ID NO: 7974 - DNA, 14587 bp, Oryza sativa
aattcctgcagccctgcctagcggaagtcaactatataattcatagtaatagtacataatcaggcaggtagcactggaccagttaaagtgttactccataagttaccatttttttcttccatctaattcaaccatttgtcttcacaattccaatgtttaacttctctcccatgcttgtgcaagcaggacatctggcgtcttatacattccttgatgccaatgcgagatgctgcccgagctgcctgtgtgtctcgttcctttctaagtttgtggagatgccaccccaacctcaatttcagtagtgaagcatttgggttgaacaaaaatgcatgtggaaaggaagaattggctggacttttctacagcaaagtcgaccacattctcaaaaggcactcaggcatcggcgtgaaaaaacttaagattcagatatattcagattatagtgggaaaggctcttcatatctcaacaattggcttcagatttctgttaaaccagggattgaagaactcataatttcactgacccagttccaggcaaagtacaatttcccatgctctcttctgtcgaatgggagtggagactcaatccaatatcttcacctttctaactgttccttccacccaacagtcacacttagtggcttaagaagtctgatgagactgtatctttgttgtgtgcgtattacggagaacgagttaggctgccttctttcccattctcttgcattggagcagttggaaatcaggtactgcgataggatagtttgcctgaaggtaccttgcctactgcagcggctcatctccctgaaggtgtttgggtgtgacaagctgaaactgatagaaaatgaagctcctaatgtctccatttttgcatttcaaggggacaaaacggaactgaaacttggagaaactttgcaaataaagagcctatgcatggtccgctctggttatgtttatcatgctcgtgctgaacttccatccatcatgccaaatcttgaatctcttgccataaagtcatgcaaagaggtatgagaaattttgcctgacacatgaatgataggcatatctaatgagactagattctgtcttatgggttgtagcataattaatttgacctctttatgcagacggcctttgcaccgaagctgtgtagcaaattcctctgcctcaggcacttgagcattggccttattggatttttcccagcctatgactatttatccctggcttcttatatttatgctgcaccttctctggagacttttgacttgaatgtgagtagctgttcatatattattactgctatgaatgaaattagtagctgtgtggtggaaatgtcacttaaaatttctccctttcacatcctaggtaatgcagcggaacgtgcagagtgtttcaatttttgcacatcctgcagatctgagatcaatacgagaagagaagcatcacaaccttaagagtgtgacggttacatcattcatctctgtaaagagcttggttgagctgacatgccatatccttgagagtacagcttcactcgagtgcttgacattggatgcttctcagactggttttaggtgtgatactccaggcagcaaaatcagcaaatgccccccactagatagggacattatcatggaaggtcacagaggggtcttggctatcagaagatacatccagcctagggtaccttccacagtgaagctgactgttttggagccctgcagctgccattccactgaactttagatgtcatgtttatcttagttattcgatgtttaatcgtgctgctgctgatgatgattctgtagattcttagatgggtcatggtttctaaagtttgctcttaatgattactactagttgatatcataaccaatgcacatgatatccactagtaactctagtttccacctagcagcagtgttgtatgcacattaaaaagttcttcttccttatcttctcccttctctcatctgcatgtggcgttggtacttggtacacgctggtggaggcgcaccccgcgcttgctgactcattcacgtcgatgcccgtgtcgcttcacctcaccctcgtgctgctctctatgtgcgaggacatcgacaccgcagccgccacactcatcatcacacatcaacttcacgctgtcctctagatccgagttagggttcttgtcctcctcgctgactcgccgcgttggagcacgtctatttccactccttcaatccgacactatatcatgtaaaatgacagttttgcccttatattcgagatacatgagattgctaaatatattagtgattatgtggtagagacatattatgatacatgttatttattagtttgatggtgtatgcatcaaattggacgtggtagtcatctctagttgtataaaacttgtccttacgctctgttctattttttctacctttctcaacttaacccctcatttttcgcgcgcatgttttctaaactgttaaacaatatttttttttttgcaaaatttttcaatacgaaagttgtttttaaataattataataatccatttaaaaattgctaatatttaattaattatatattaataagtagctctggtgtaccgcaacgaacacagtcgaggaggcgaggggcgtcgtgggagagaaacgcggggagggcggtcttgcggtgcggggcggacggcggcgggtcagcgaggaggaaggtggtcgggtagtagaggccatcgacggcggagaggcggccgacgatgcggtccatcgccgcgggctccatcatggctgccgccgccggcgtcgtgtcgtgtactcgtgttcgtgtcggcgtggcgaggatgccttcctcttttagccgggccggatttgggctttaggcggggggatgggcttaggtcggtttggttttgaatgggccttggcccatggggatatgtacggggaattggatagggtggtggggccgggcgtggtgtcacgtgacggtggtcaggtacagtagctgtttccgtgccggtccggtcggtccaccggttgatccggctcggtgaccgtgatctttgttggcgtgtgaaagagagaatcgatgaagcaaagccatcggtactcgacggtacatggtgttttttctttttattttaccaataacttatatacggtcagtgaaaattaagtggccatgtatcaagagtttatttacaagtttatattactacaagtgtctaaattttatttcaactaatttaaacaaagtataagatatcaagcatattttatagtttgatttttacagttgttaaagctgcattgaacatcacagttgttcggtcatcagtcaagaatgcatcttagccgtttggtggctgtagccactgctagttatctactctctccgtcctataatataagggattttgagtttttgcttgcaacgtttgaccactcgtcttatttaattttttttgaaattattaattattttatttgtaacttactttattatctacagtactttaagcacaacttttcgttttttatatttgcaaaaaaaaaatgaataagacgagtggtcaaacgttgcaagaaaaaactgaaaatcctttatattatgggacggagggagtacgttagacgttgtagcagttgttgcagccacagcgctgtagcagacaactcttctgaacaagttcattcaatggttatggtcatatatttgttggttaaaattatatgtttaatatttctgacattaactagtataggctaataaaatactactccgtatagtggtagaatttattatttactggtgtacgtgtattaatcaattaatgtacaactcaactaatctacactactcctactcctacaagtaccatttatctactactccatttgagattcaatttttaattcaggtagaattttgaaagtgctaaccaaaaacaaggcaacagacagcctcacaattccaaaaaccgacagccatccgcctccatcgctctctcacagcctcactctcactccaccccactggggaaagccaaagccgcgggccgaagccaacgcggcaaaagcccaaccccccgagatccctccccgccgcgccggcggaatccccgggcctcgtcgtcgtcggcggcggcgatggggtcggtgtccctcaacgtgccggcaccccgccgcggcggcggccggcgcatctcctgccactgcacaccgtcgctgctcaacctgctcatgttcctcgccctcctctccaccaacgccctcgccctcctcgccttcttctcctcctcctcctcctcctcctcctcccccgccgcctccgccgccaccgcggcggcctcgacgatctccgaccacgtcgcggccatcgcccgcgagatcgacacctcctcctcctcccacctgccgtaccgcgcggacggcctgccaccggagctcctcctcttcctctccccgcacgcgctcccgctgggccgcgacgcccgcacggggctcacccacatgccggcctccgtcgcgcactcctgcttcaggtcgcccgccacgctctccctcctagccgccttcatgtcctacgacccgcacgccgcctgcccgcgcaacgccaccctgcagcagcaccgcctcctctccaaggcctgcgagccgctgcctcgccgccgctgcctctccggggggccccgcgcggcgctcccggcctccaacatgggcgtcgacggccgccgctgggtcaggccgcgccacgactacgagttcctcctcgacgacgtgctgcgcctcggcgccaccaggatccggattggcctcgacgtcgccggcggcgccgccaatttcgccgcgcggatgagggaccgcggtgtcaccgtcgtcaccacggtgctcgacaacgccgggaagcccatgaacgagttcgtggcggcgagggggctgttccccctcctcctctcgccggcgcaccggttccccttctacgacggggtgttcgacctggtgcacgtcggcaccaatgcgctggacgaaggtggcgcgccatcaatggggaattccggcacggaggaggcgctggaattcttcatgttcgatgtcgaccgcgtgctccgcgtcggcgggctgctctggattgatagctacctgtgccagagtgaggagaggaggcaattggttgtgaatctcattaagagatttggctacaagaagctcaagtggatggtcggagagaaagccggcacggggagcgcaaagacggcattgtacctctcggcattgttgcaaaagccggcgagggattgatactgaactgatggatgaattgctccaagctcatcacttgatccgaggtacgaatgtacctcacaactattacttgtagttcagctgttttgatggcaaaaaaaaaaaagaaaagaaaagggaatgccatttaggttccacggaacacggattagcttgattacattggttgttcagagatagtgaagtgacttaaaataagtgcaaaagtggtacaattcttctacttttgttattgtgcaataggttgccattagatgggaaacatatgttgtaatagtaggatttgttgctcaactgggggactgaaaacaggacttccattccaatgatgtgttctttcatatcaggaagtaaaggagagtaaatgatgatgatcatggagctttttatttgttactagtatgtgtcttgtgtggtccctctgaagctgaatttcccttttgtgttgtgaatacttgaatagtgtattgcatagcttttccagtggatttgttcttctggaaagttgaggacttgaggatctagattccactctttctcttcttttttatagtgctaggacaaccagaatcctttggtctgtaaggaaagctgaaaggtgtaggaaaccacatgacacagaagaacatgtcaaagaattacattcctacttgtttgagcctatgcttggatatgaaaagctttcctgacacaaatcatggtatggactgctcatgtatagtattgaatatgtatgatatactttgttcctattttctccttgacaatctctgttgtatcatgtaacaccttcattttagttataccagtcaatgtacaagtgtagcacaaacttttccccgaaaaacaaacatgctaactgtatgggaaaggagctgcgcgtggaaattatatagtttttgtggtttcatacttctgtatctactggctagatgctaattcttttgcagttctatcacacaaaagggaaatgtggagaaataattgggaatgtcaggaaaatgtaccagccattaactgaggggcctcatcagtaatttctaaaactgctaacaaaatttgttagatgatgccaagaaacaagaaattgctacgtcatatcatagtaattgaggatctctcggtcaattgaaccccttcggttgacgttatagggtaagtttgcgactttatatctcaccccttcaattgaggcctcctctggaatggagaaatttcaaagaaatttttggtgagttgaactaaatcctgtaaaattcaggtgttataaaagaagcactgttaggaccttagttgatctgtaacatccatgtagtgaatctgtgaatggcccagtttcaaactcatgtttttgtgttgaaagtttagacgtgtaatgtaaatgaactagtggagagcagattaatgagttgcatcaacagttcttttttcttttcttttttttttttgcaacatataagttgaatttagttttacatgtttgtaaggtgatatatatcatattaatctatgttgttaaactttttcaatttttttattactattttggtgacatgaaaaaaacgatgggatgcccccctcgagtaattaaaatccatctaagatgattaggtcttctgctctatgcctgtttatttaagctagctctgatcggtcacagtggattttttttttgttatttttctgaacacttttaatttgtaatttttataataaactcaccaaaaattttaaatccgtacctttttaccacattagtaaaaagtcatggtgtggtagacaaatgctatcacaccaaatgagtatggtgtggtagtgttgtcctgatatcctgccacgccatatttgttttccatgggtttgttttttttaaggtttaaaagtaataaaattttgtcacaacttaaggtctaaaggctgaatttacggttggtcacattagtttatttagttgaattagcttaagcaaagaagcacccgcgcatccatcctggttagtattcctaaacatcttcctatttcatctcgctctgttttctcaaagcgaaaaagtagctatatgctatagagaaaaggcggaaaagggtcgaataatgctcaaaccctattcaaaatcggacaccatatccacatatgtttgaatttggtgccgaatcagatcgttgccccaattttgaatacaagtacacacatcaatgcttcatgaatcatgatcaagaaacttgtaaaagaaaagaaaaatccagaacagaattcaagaaaagtaaaacgatttagttatctatcacactaactaatcactccataattccatttttttttctgtagaagagaaagctaatatacatgttagtgttagtacttatagtacaagttgctacactttacgaggccatcaatggcgccggcgtggttgaggacgccggagttggggaagaagcggtccaccatggcgtgcagcacgtcggaggtgagcaggctgtcggagccggcgttgtgcgcgcggccggcggcgcggtgcacgccgagcgccgccgcgacgtgctccaggccgccgcggatgccgccgccgccgccgcagaacttggcgaggtgcttcacgtcgagcaccgccggcccgaatatcttgctgaccttcgccatgaacccttccagggtgctcggcagcggccggccgccggtgagcaccttgacgaggtaggcgaagtcgtaggagcccgagaacgccgcccacgtcaggcggccgcaggcgagcttggagcggccgaacgcgcgggcgaagtcgccgtggtcgatgccgtggcggcggagggcggtgaagtcgacgccgtgcgcggcgagcatggcgaccgagctccccgagtgcgggtcgcggcgggcgtcgaagccggcgaagttgaactgccacgcgacggggcaccggccggcggggcccgacagggcgaggccgagctggagcaggtggagctcgtcgacgttgcgcttcacgacggcgtagctctcccgcggcgtgcggaggtggcgcggcgtggcgacgtcgtgcaccgtgccggggaactccgtgtccatggacacgacggggtaggtcggcaggagcgccccgatgctgcgcaactcctcctccaggttcgccgcccacacgtcccgcacctccacctcgtcggcggcggcggaggcggcgggcgaccgcggcgagaagctgggggcgtcggagttgagcttagaccgggcggtgacgatctccggcggcgccgacatgtgcatgaagcccaatccagattggacggcggcgatcgggaagaacgggagcggcggcggcggcgcgagcatgaccgggccgacgtcgccggggaacatcggcatggctggtcgcggtggtggtggtgacgaggctgctccggcgatcgcgacacggcggcgcgtctcgtttgcgtcgtcgtcgtcgagcggcggcgaggtcggtggcggcgtgcgtggcatcatgtccgggttttataaagggagagggcacgtagacgcgtgggcgtggcgagccagtccgacacggactcgagcagccgaccgagttggatcgtgaatcggattcggcgcgtatgtgcatatatgcgacgtcactccagatgcgatctctatttttattttttttaattaatgatttttatcattaatcattaatgatttttatttttattttttaattaatgatttttatcatatgcgatatatttattaatactacttctacattcgtagttgtattgtactcctgtaaaaatttgatataaagcgtgtgttgtgaatacgtatccagagcctcaagacaaacgaatgtttgattgatttagcatgggataaaaaaaaagtgtgcaatcgtgcggtcggaaacggtagtatctcttccaaaacgatttcagaattcggctataataagacgctgaaacaaaatcagaatttatatattgttagaataacatacggtcgaaaacggtagcactttatccataaaggatactcggttggtcgggaatttttatagccgttttcatctttacatcgtatctaatttgtaaagataattaaatcataatagagtattgactacgtgatactccattcgtcaaaaaaaaacatgtgacatactacgaatctggacagtccatagcaccccctgttaaatgggggatggtaggtagtaggaggatacttgaggataagatgagaaaatatttttagagcaaagcttaaatatataattacacttatcttagaacggagatagtccaaaagaagaaatgtggtaattttgtgccctctaacacaatgtgtatgcttaaagctttcattaattgtagtgttatacaaaagaagaaacttgtttggtgggaatggcaaatagctaaattccccgtattcggagggatcattttgttcatattttatagaaaatatgaaattttaaaccactatagtttaacttacaaactatagttatttttaaaccactatagttaaagttattttttgaagcttgagatttatggtgtgcttccacaatatttgaagtgttgtatttaatgtttaagactacttttttgatacattgtgaatacccttatatttgatccagatacaacctccatctgagaatataagggatttcccccatataattctataaaaaaaatccctcatattcttatactgaggtagtattaagttgtgtcaagcattgctgtgtactacagtaatgtgtccgtatcggtcacgggctgatgcttcatgctttgcattctctcttatggatcacaaacaagttggttatcttcagacactgattgtgtagaagactactaattcaacatgcctgagagattatgagtaagagttttagtttaacatagcaaaacttaagcatgaacggggatgtagctcagatggtagagcgctcgcttagcatgcgagaggtacggggatcgataccccgcatctccacctgttgttgttttcatttttgaaaaatgcaatctttagttttcttccatgcagcaatcatgtaaccgccgcatcatctacattctcccaaattattttttaaaaattgattcttgtttgtttttcttttccaaattgaaaaatgcaatctaaagttgtctttcatgcagcaatcatatgtaaccgccgcatcatctatattcttccaaattgaaaaaaatgcaattagcagttttctttcatgcagcagtgatccataatatacctgcaccatctacattctctgatcttagaatattaacaaacgacagcataacattcaacaaagttctgttgataacagcactgcaataacgatctgtttatcacaaacgcccgaagcaaaaatacaccaaaaatgctggaagaaatgttgtggtcacagtggaatcaaattattgagaggtcctcattcatcaacgagaaatgcatccatattaagtcacaattacagcattcccaaaaaatactcttatctacagaataggggcctgactatcagctgacaaatttcatcaaatcaatactaagtgttttagtaagttatatctgctggtgttctggtcacacctcctgaaatatacagcgcaagtatgctttcaggtatcaacattcccaacagcaagttcacagttttttttttcttttttagcaaaagcaagttcacagatttgagtacaggcttggcttgcttgcttactcatccaggtttaccctggtcctccttggcttgttgtatagtgttcgtacgcttacacgagtctggtcagattcatggctcccgattgaaagggaatccatatcatcgttgatcgtgcggttgatcatcaatatctgtctgtgctccattcgctgcctcctttcctgagattccgtgccatcgtcaatcgaattcatgctgttaccatgcatcctctcttgagccaaccaatttgcccgctctctgataccatccatgttagattgcatgccaggtgcatcctgctgatatcttgactctctcaatggaccaacagggcgtctttctctctcagcacttgaaccagagatggtaggctggccatggaagttttgctgtgacgaaatgccagtgacttgagcttgtgcatattgaggaggtccatctccgagaatgccgccccgtccaccctttccaggagatgttcttactttagatttcttgttcctgtgtgctttgctcggatttctgatctgtatgtcaggctgcttgcccttaccttcatctgatgatctgccagtttcttgtacagctgtttctagaggaattatgttaagcaattctggatcatctcggaaattgaacggacgcttcgctggatccatctttctgaaggtaatggatatcctgtgttttaattagtgtgtcagagttcaaatgttatacaggcaaaggaattgagttccaaaagccaaatgatagaacaggatatcagtatcacaaccttttggtcggaactgcaggaacacaatgctttgctacatcagcaccattgccatttaggataagcaccgacctgtgaatgtttgtatttagtatataagagaactaaagagctgcagaagaaaactgaaagacatgatgagacacgaataattgaatattattaaagtggccaatgcaaaaattacatacagttagtattttagagtttatgacaatccaatgagaaggaaacacagcaacaaacaagtatggagtagaaatctctctcagcaaaaacttcaagcaaagtctaaaggagaaaagttcagggcctgttcggtaggactaaatttggctgcaatacagccatcagctacagtactgcgcatacaatctctacagcagcagcacagctgcagaagtatgacagccagacaggcccttagtaatcataccatgcaataccattcaagaaatcgaatgagaagtctacacagcctttgaattcatgagtaatcaagtttaaaacaataataaataaaatcaatttgttaacatcccaaatagcacaactggctaccacaaataatctatcagcacagcgaaaagcatgagaacatacccaacaggcagaggaattggaagtgaaccagtgaactctccagggccagcaattttcagagtagatccaaaaagaatgttgcactcactgaggaatgaaacagtacagaatggccgaacaaaatcatgactatcaatatgtggtgggatgcaatctccagggtcatatatattgacaatacaactgtctggtatgcaagtctttggtagaacatgccaccgtaccaatctcttgatcatgatcttaaataagctaggcatcggatcagaagcaatagttcgaataatgcctggtgggtttccattcttgtcctgtcatcacagattcaaaccttagatggattcacatgtgaattaaatcagtaccactgcagtattcaagctgatgggatcagaggataaaactagagtatgtaccgtggcataattataacagcatccaaattggattgttactcgccctttaccacgcatccacctttggggttccgtatacgtacgatctgacagggggatattatgcttggatttagatatacaaaaatacaaataaacaaaacatggcaaataaataaatgcagctgtgagcccaagaaaattcatgtgcgtatagcatttgtaaagcagaaagaaggaccttggatagcactaaatagagtaggcttcccaatatatagtatacactcacccaaataaggatgagaaattctattccggtccaatggcctaaggtgaatcaaacaggcttaggtgcttcagggtactctaaagtgtggccatttgttagtgttatactgggccctcagtagataaatagtgcatagcttgaatattaaattaattaaattgaaaagaagaacgcagatatgtaaactggaatgaaggtcaggcatctcactcaacatgttacatttacttcaatcgtggttattgtggtgtgcacgactgtaagaagcacagaaaatcatgcatgtctgttttaatatccatgctgagaacgcttatgcagcatataagcaaagaaaccaaaaacactcagagattactgtaaataatacattgaaacatattgaggtttacacaaatggggaaacaccattatgacagaatcatgtgtacagaaaacaatgaaaatgttttgctatccgctacgcttctcctggacagacagatttcggcagatgcttctgattgtgtagtagggtgaaactgtgttatttttgtcaaatatggctgattatgttatgatggcaatacctataatttatcaaataccatatttatcttcctgcttgaaatcacaaaagctaatctgctacttgtggtaggtagatccaatgatttagtagaataattaccaaaaaagtttgtagctttgagtgcataccacatagaacaagacatgagaaaaccaattttataataattcttcggctttctactttgcacgagaacactatacaagttccagttctacacgatagaactactgtggtgcatatagacatctaaatgtttgcctatgatccatatccccacaactaccatagcctaagtagcaaagcatgaccttaattacagctaaaacctttgcctaaaattttacataatcctgacctaaaacccttttcattaaagcatttctcaaaactcaagactttacatgaaaatttagccaaattcaactagcgccatagaaaaacatatcgaatctccatgcagcttaaatctcacctccaagctccccgtgcttgcccatctcctgaagatcgtatacgtagtcgacaatacgcttctgttcggccgcgctaaacacaccgcaatgaagttccaggccagcgaggatattgacgagccgaccattgaccctctcaaaacagatgaaatccttcctccgcaccacgttccggaaccgcctcagctcccgctgctccctcgtcagctgcacacccggcctaccagcctcgctcccttcctcgccgtcatcagccgcggctgccgccgcgtcctcctctgccgcggcggcgagctcgtcctcctgagccatgtctgcccacgacttccgcggcttctccgccggctgcggcttctgcttctgctgctcctgctccggtggcagctgcggcggatccgagtcccatccgctcggctcgaacggcagatgctgcgggtgagccgtagccggatcggact

SEQ ID NO: 7975 - DNA, 2491 bp, Oryza sativa
caatagcaaccaatggaagtacccgaactcctcgcattacccagttgtacacctatgccaaattggttggcattatgccataccgagatccatcggtgttgaacaatagagcccacttctccttagggtcattctccatccactgagagaaatttttgatggccgaccctgacctccttctcattgttggtgggtcatcatgtaatgcaccaagaggtatgggaggctcgtcaccttcaacttgtggttgcgagattgctcatctgtttgcttcgttgtcaactcatccaacttgtcccacaactcattaaatttcttctcttggttctgtgcacagagcctcttaaagagctccataagatgcttgttcttgaattgcttgtagaaatttgcacccatgtgacgcatgcaccaccgactccgaacatcaggccacttagctggaagtcccttctcatcccaaccgttctgcaagtagtcaatagcccgcaacatacccgcatgacgatcatgtataaggcaaacgttgggcctcatacgcaccactgcaatgtgcactctctctaggaaccagtaccagctttcagtgttctcactctctacaaatgcaaaagccataggtagaacctggttgttcccatcacacccaattgctgtcaatatctgacctcggtatttacctgtcataaaagttccatctatgcatagaacaggtcgacaatgcacaaaagcattgatgcaagcacccaatgagaaaaaggctctttgcagcacactctttgttctatcttcaaccgatgtaaatgtatgtaggtcatagtaagtattattattcctctgggcaatggtggctaacaaacgaggcaaattatcataagaagcttcaaatgtgccatacctcatctcaatgatcttttgtttggctctccaggcctttgcatagcttatggtgtacttgaatttgttctcgatgtgcctaataattgattttggttcaaagccaatgttaccaacaacactgctgtacatctcacttgccacaaaagctgaagtgatgtttcggtgatacttctccaccccttgtaagtagcacttgtgctcggtcacaatgctaactttccaataatcattccatttacccttatatgcatggacacgccatggacaatcttccttcatgcacctcacttcatacacataatttgttgacttgaccaccctaaactctctctgcaatgaaactgcccaatgcttcaccgcctccttcatctcatccttatgagcataccttgcaccctcaattacctcgtactccttatactcccagggtacatgatcaccctctgatataacaagaccagagaagtcctcatttgcccaatcagtggccattacatcaccttcctcatcggatgatgcgtcgtcctccgcttgctcattatccgaatcttccctctccatttcatcaacaattataccgactctctccccctcatccgccatgcccatggcctgctcctcccttggttgattttcctcattttgcatcgatggtccaacaacatcccctgcattgctaggaccctccacatcttcggtttgcattgaaacatttgtatctttctcttgtaccgacacaaatataacgaggggccatgaccgttcaaaagccatttccacataccgtctccaagcagcagtgctgtccatcggcattagttcccaaaaataaccttctattgcacgactcactacaacagatactgacattgtgtagacttcttggtctattctaaatcctctcaacaaccaactataaattgactgaaatgttctctccgcaggcctatcgatgcccttagatgtcattacaaaatctgacagatcaacaccatctggaccaaatctaatatttccttcaccgtgaactatctgaaatgtgaccttacttgacattgtgcctgatgaaaacaataactgcgttaacctcgcatttctgtactacgccctaagttacattctctacaatattgttctctaaatttctaaaagtaggttacattctccagatcaaactaaactacatcttacaattaacactactgtctatgtctcaattcatactattatattctatgctctggatctacacatatgtgctgtgtgctacagatctgctaaaatatatggaactaaaactaaaacgcaacatatgtactcaaacgtaatatattagtacaaatgcaaaagatgtatgggagcatacctgtgatgaagtgagcgaaccagcagggcttcgccgctccccttctgctgccctcccctctctctctctttcgttttttttggatttttagtgaatataatgaaatttcataggggaggggctgggctttataggggggaggcaaaaatcgccctcccccagggcggcaagggggccgcctgcaaaattccatgccccctcgccgcccatttgcaggcggccccc

SEQ ID NO: 7976 - DNA, 23869 bp, Oryza sativa
ccactctcgccacgccgacacgaacacgtgtacacgacgcgacgccggcggcggcggcagccatggagcccgcggcgatggaccgcatcgccggccgcctcgccgccgtagacggcctctactacccgaccaccttcctcctcgccgacccgccgccgtccgccccggaccgcaaggccgccctcctcgcgctcctctcccgcgacgccccgctcttcctcgagcgctacggcgggtcgctgtcccgcgacgagctcgccgccttcgacgcgctcgccggcgactacgaggtcggctggcacctccgccgcctccgcgcggcctccgaggggggcccctccgcgtcccgcgtccgcaaccgccgccgcgcctacctcgaccgcctggtgcgcgagggggagtacttctccgaggaggctatgcgggagcgggagccatacctgcaccacgagtaccttggcaggttccaggatcccacgggacgggccatggcgaggccgggggagcggtggtccgagacgctgatgcggcgggctgaggaggccgtgatcgttgagaagattcgaggggagcagattaggagaggggttgatcccagcgagtgggtaggtggtggcgctgaggaggccatggaggagcaggaagaggaggaagaagaagaagaggaggaggaggaggaggaggaagagagcgaggaggagcaaggcatggacatggaggagaaaggaagaggtgccgataattcttccgagaatccgagtgtgactgaggtttgtcttacatgttctgacttgattgtgcttgctttcttgctgttaaattgcttgcacttgcatggaattgggaggatttggtttgcggtgatgctggatatgtatggcttgcatataattggtagattttctgataactttgctgtgggaatcactcacttttaggaatacaacatatgattgttggtccttggaatactagttttgttctttatttttatttgcactcttcactgtctacatagttgaagtatttggtccttgaaatactactagtattgaagtatttggatgtagaaaaatagttgctttacaagtttaatggtttacgatacatcgaattgacaacatggagtagatgaaaattcatttaatttaagtcaggttagctgctttcacaatttgcttaccttgggggcatcttatataacaagaaccccttcttggttatgttgtcatgtgccaaagtataagggcatatggagctggagcctttagaaatctatatattcttaggttttttgtggtttgagtcttaatcttcaccatggaatgctagttacatacttacatactagttatatctttatgtagcagccatttttaggaactaggttaaccttttacttgaaaaagaactttcttccacttgtatgatctgactcccactgctgaatccttttatcctgaactctgctaatttcctatacgaagcctaatgttccttatgggacaaaagtgcattcaatcaattcttgtgtcataggtgcaactagatcttttgggggcattatagtgtttcgcagcacaaatatgcagttcagcagttgattttatatattatcatatttctggaaaatataaaatttctttggccagtactttatacctgttgatccaacttatgctgctgaactccttttgtcccaaactcctccatacatcgataattttctattttctcgtaccctcattgaagtctaggaccaactgaaggaacattgatactataatagttttcacctggtaattattgaggtacaaataagatagtaaaaggtacaatcttgtggtattatctctgaccattggaatgactgttaacttggacagctccagtgtttcacatttgcgttgaatgatctactgacttcaattagatccacgctgactgcatatttctttgtctagtatgagagattgacacaatctgttgcatatgtgaagctcagcttttattaagcttttctattgtttctggtttttacattctgggaaaagaacatttcttgttcaacctgagaacctcttattttctaacgacaataactccccaatttccattgcgagtactccttatgtcacatcatcgtaatcatatgttctcgccctgagtccttgctttcaatctgtaactgcaggtggttgactccaacaaaactgcaggggcttccaagcaaacattatctgctgaagatatggaggatcaacttgaacagtttaccagcttgatgcaacagaagttcctgtccggtgaagactctgagcatatggactactctcggatcgataacgacgagatgctggatgaccattggtcaaaagaagccaactatgatgcggaggagaagtatttcgaagaggattagttcaaagttcaaactaggctgctgttatagcatcagttatgtagtgcatcatcgcatctcgttttttttttgttcatgttcagcacttacttagtctatcatgtacatatatctatatatgcagttgttgcccctctaatccgaataagttgagtaacttgcttatgaaaactaccgtatgtgttggaacatcaatcagaaaatagggtcctgtcttgtggagatgtttacaaattgcaaaatatttttatgcactacctccaggatgatggtgcatgcagggaaagtaacatgtgtgtattctatatttctaggggattacttgttcagtctgaaactgtgaaccgcatgagggaagtttccttcaaagcgaagaatgtatatatgggaaggcttagttagaagcagcgtgatccaaccagggtttgctttggttggacgaattggtcttcagacacttcaacgcaagctttagtattttttttttctcttttggttttgtattaagcccctgcctcgtgtgctgttctgatgcacgctttctttgtaccaaaaaaaatggagacaaatgacttattcctgaagtttttgtgaaagcttttgccgtgtcttgcctgttccattgtttttcttttcttttgctgtgtttgtgctagtgtattgcctaccttcttctttttattaattttctttcttttgcattagtgccttgactaccttcctcttttctttcctttttcttttgttatcggttaccacagtgtcttgcctgtttggtgcaagccgagaggcaaaaccacctcggttaataaagtcttaagagaaagggactaccatggtcaccgtgtgtacgggccaaccggccaagaaaacataaaagtctatgagaaaggacgatgtacatatacccctattaatgtgtatagtagatttctttcagaacatttaatccgtttgcagatagtgcaatttttattgttttgatatcccccattagatgaatatcttaaaacacatattctataacaattgaagaaaaaaaaggaaatacatttcttttttcaggaatagatagatattcaagaacaaataaaaaaagaaatacatttttcaggaatagatagacatttatgtaccagagggataaccaaactattccctctaaaaaagttagtttttactctgtcatttttctttaaaaaaatagctttgctcatttttaccctgcttcaaagaaaaaaaaacaattatagcatgcttgtactgtgaggagcagaggccaacgccgtcggtttgctgaatcagcaaaagccgaccaccgaccccacgttccgcacgcacgaaacgaaagtacgaaacccgcgccaacacaacccaaccaatcgtttaccgccacgtgcacgccaccccccaaccaaaacaaaaaccaaatttaaaaaatactacaatataaatactagtataataatttcttctcccataaagcttcgaccgaatccggctcgcctcctattaatccctctctctcctctccttttttcgatttgagaaaaaaaaaatttgctcgccttctccttccctcgcggcgaagacaccggagccaccactcgccgcccgcctatttcacgccgccgcgccgcgcagaccgacctcgtcctccaccccacccatctccgacgccgcggaccccggcggccgctcctcctttgctccattcatcgccatgacgcgccacgccggcgcccgccgccggggcggcgccggcgtcgtcagcctcatcgtcgtcgtcgtcgccgtcctctccgccgctgcaatcgccgcggagggtgtcgatgctgcggtgttcgacgacgcgcacctcctgccgcgcccgctcgtcatcgagctgcctacgacgacctcgtcgtcgtcgccggccttggcggaggagggggagggggaggcggtgccggcggaggtgaggtgcgcgagctggaggctggcgggggaggcgaacaacctcgcgccgtggaagtccctgcccgaggagtgcgccgcctacgtgcgggagtatctcaccggcgtggcctaccgctccgacctcgaggtcgtcgcgcgggaggcctccgcgtacgcgcggaccgcccgcgtcggggacgacggccgcgacgcgtgggtgttcgacgtcgacgagacgctcctctccaacctcccctactacgccgaccacggatacgggtcagttttcttttggtcacccactcagctccacaaatcccaaattgcgaaatcgttgggcggcgtgtgttcgaattggtcaatttccatatgctgatatgagcgcttgattagttgattttgaattatagggaacaaaattgcgaaatcgttgggaatgtgttcgaattggtcaatttccatatgctgatatgagtgcttgattagttgattttgaattattgggactaaaattgcgaaatcgttgggcgcgtgtgttcgatttattcaattgagatgctgacatgattgcttgcttgatttgaaaatggcaggctcgaattgttcgaccaccgggaattcgacaagtgggtggagaggggggaggcgccggcgatcccctccagcttgaagctgtacaatgaggttcgcgaccttggattcaagaccttcttgctcacgggccgcagcgaggggcaccacggcgtcaccgtcgacaatctcaagaagcagggcttccatgattgggacaagctcatactaaggtaactattccatgatttagccatcaccattctctaacaaaaattgctcctttatacatttccagttcgtcatgagtcatgacatttctatcaaaatttgcaccttgcaattgcgctaggcatgatattttctaagaagatttgattgtgcattatattttgcgtttagccaggacatttgtgagaaaatcagaggcatacccctagtattatttcattatttgccattttcattgacctgtatgtaatttgcttcaaatatgtggatgttatcaggatgtctttataatagggataattatgtggatcaatcatccattagggcgcctaaatcgccgaattgaggatgaggcagagaacctacgcccattgccaaacaatatgctttgcttgctactgtaggctttttttctgacagatgcttaatatttcccccatcccaaaatataatggattttgaatggacgagactgtcatatccattcaaaatctcttgtattttgggacggagggagtatctatttgttcaatgcttttgtgctacccttttgtccaatgctcatataacattgttgcggccataatttagcatctgcaaagtttgcttttcacctcattctaaaccttcaccaatcagtcaattactacagcattattcgacattaaaccatgagccatcaccacattacgattggtagaagtagaactagggactgttgctgaatatcgtttgtcgaaactactatacatatgttccacatgttcaaggacattaaaatttactttgcaagctacatactgaacattttgaacaacacattctttttcacaatggccagggcgccagctgatcgcaagaagacggcgacgatatacaaatcggagaagaggaaggaaatggaagaggaggggtacaggatcctaggcaactccggcgatcaatggagcgacctgctgggtttctccacgagcgctcgctccttcaagcttcccaatccaatgtactatattccatgacggaacagaagagggaaagagagggcgggtgagaaatgcggcgtttatttgatgcattttctcacccagcccattcaaactgactggtggagaaaaagaaattcacaataattcttcaaaggaattccaaactgtacaaaatctcactgacttcatgtagaatacattaaacttgtaaagtcgaatgtaattggatgaaatgagagactatttattgagttggtagttcatgatatactatattcttctcttgggaaggcttacttgaagcgataactgtttttgtgacgctgaaacatttcactcgcaagctgaattttcgttggagtctctgcactgtccatcgcttaacttatcttatttgcaagttccatgtagaaggcgaagcacgcaatcgttcgtcataaacaaaagaaaatactaacaaaggagaaagaaatatgagatagattgtttgaaagcgcattgcaaaaacatagccaccccattgcagtaaccgggctaccggaccaatccaatgtgacacacttcgcattaccgagcaaccgagaatttactaagttaaaataataaagagtaacaacaagtcggtgtggaacaattctgcagtccagttcagtaaaaatctagagcaagtcagatacagtagaaagttggaaaagaatggtggtgtatggctgaatcactggaccatcggatcagggttcccagcagcaagtatgtcgagcaacgagttctggggctccatctcttcatgccagagtggtagtttgtcaccagggtgaaatttcctcgaaacaccatcggcatttatctgcaacatgatcatatgcataagtaatccaccaatcctttggaaacatgatgggtagaacgaagagaacaggacatgtctctaaacttaaatctgcattgccaaactgccaaaccatagttgtactgaccaaacatattcagcaaaagaaagctacggaaaatgcaaccaaaacagatggccaagaaagacatgaggttgtccactctacctcactctagcatattttagcacaagagtacagcatgtctgaatgaagcaaagaggtaataccacactgaaatattccgtccttggaagttaaaaggccgatagttttcgctttaagattctttggcacagcatgccaaatatagcacagaaatttatatgtttgtatgaattccactaaaacaatcagttcaggtctctgaagtctgatgtttcaaaatgtctccaataaaggaacaaacaaggacaatagggatgaaaaaagagagcacttacggtgactgtacgaacaacccctccactagcaccatcacgggctatagcaagggaaaccaccttcaccacaaacttctgtagagatgaaagagaagaatcaagttaagagatgaggtggaacaagcaaaaataattatacagggggcactgaagtgatggaaaatggtgtttgcactctatgatcctagacttaacgtgggaagaactgaacataacgtaggcacttcgttctacctaacgcatcgaagaaactatctcttattacacatggtttacaagtaaagcgtacctcagcttcttcctgggacatgccctccttccattcatggtcaagcagtccatacaggtaactggaaccagaacctgcaatactcagaaataacggctagcgtcagaaactgtgattgatataacatagggtaaagtagggactcggacaattttatgatcaatgttctacaactaagccaggttacacaggagtatggtaatcaaagagtatggcaggacattaaaggaagaaatggatcgcgctaatttcaaatgattgcttatgcattgcttaaaaaaaatactgctcaggtaagtttgcaaataaatctcattaataggcttatactattgaactgataattattcttatgtgatacatagatatatagacacaggtggagactacatttcttatttgattactatgagcccaatgaaaagacattcaccataatatttctgggggaaacatacctccaattgcaaatggttgcctcagaattgttccaccaagggggactgagaaaatttggccaccctcatatttatcccatccaccaacaatcatgccagcttgcaacatgttctgaaaattggtgaaaaaaccaatatggcaattagacaatagcttaaaatcaatgtatgaaagaatcagagaaagaattcatctcatgtattagtgaaattcttgtatcgtagaatgctacagaaaatataccttgttctgataagccaacaacctaattaagttggctgcaactttcacagtagctggttgcccaagctgaattctgcaaatcgagggaaaatttagcatgggctatcttgcacagcaaatattcacagtaactactagttcactgtgttaattaatgaaatctaagtttattattgttcattcagtgccatcctacttagcttaaaaggagagagcattaatagatatattataattacacaagaacaaacttacgtgtgttggtggagaaaatagcgtacatattccgaaatgacttgtgtgtcggcagcctgtgagacaatgagaaatataatactagtgaactattggaaatgctgtatctgataatacttacttacttagtactggactattaacaactatgaaaaagaagcagaaaagaaaatattgaaaatgtgactgtaactcagaaggtataatttcccgctacatcaggcaagccaagacaaggggaaaatgaacaagataagatgcaatggtaaaacaaaaataatcacatcttgcttaatgaagagagtatgttttttacagcatataataataacacgaagcaacaacataaagaagggggcccaagactctaaacaatgtaggcacttacagatccagagcggcagacgtacacattgtcagtcagttgagtaattttgtcagatgcacggttcgccacatacattcctaagaattaacaccacataacaaaggcaattaaattaaagggaaaaaatagacaagcagacagagcacaccaacttaatattgatttcgattggatcaaccacatgctccaatatttggctaagttaataaggcaacatggctaaaacaactaagcttactagtctatgtaagcaaaagatcctaggtacaccagaatcaccgtaaacaccaatgggatgatacttttctcattctttactgttgagtgttaaatgagaaataaatgaacagtgaactcaaccagaacaatagaggttgtacccaacttcccctaattctacatcaaccgaacacacgacaataccaatttttcatatatcaggtcacaccaatttttgtacttatccatccataatatgctgatttaggcagaacacattagtggtacacgaaccaatttccactgacagatacattatccgatccggcagcaaacgctaaacacgtcgcctaatctcacaaaatccatgacctaaacatgggaagcaggatggatggcaggaaccagatgcgctaataacaaaaatccaccgcaacctagcataaacaagggtcggatcgggggtgggggatcgggggagcgtaccggtgctggtccgggagtcggcggcgaggacgacgccgccgtcgtagcagacgccgacgatggtggtccccatccggtgctccccggaggtgggggcgtcgcccgcggcgggagagggggagcccatgagagaggcgtccatggcggcggggagatcggcggatgcggcggcggaaaacccctaagcggcgcggcggcgagagagctcaggtgttcgctggctttggccgccaccgcaagaaagaaaaaaagaggaggcgacgcgatgcgtccggtccgagtcggttcgggcgttggtgcggctcgaccgctctaggatgagtcgtactttgatctgttcattgacgtgggacccatgtattataacatccgtctcattttaaatgcaatcataacatctaattttaaatatagtcatgacttacttttaaaaaatatataaaacttttaaataagatggacaattaaatattaaacagcatttaaaatggaatggaggcagtagttattatttataaagtccaaaaataaagtattactgctgagaatctgtttcataacaaggaactgatcggactttggagtgtactaacaatctgctgtaatcttttcatttgtgcgattatatggaaggcacatatgcttgtaacagaggtacaccacacgcacacacatacacgagaacatgtccttaacccttatcatatggttaaaacaacggaagctagcaataaatactctattcgttttaaaatatagtaatactattatattagacaccacataatactacgaagtctgttaagatctataatacaattaaaaaaagtactagctctaataactcgtatattgtccttaaaagggaatacaagaaaatatgcattgactagggatggtaatgggtcaggagggttcattggtcctttcactacccacctcagtcttaaaaaaaaaattagcacgaaaaactactaaattcaaaatttcagtccaatcatttcaaggctcagccctcatattttgtagactaaaaacttgaacccattacaaccccgtgacatgccattgaatctctaatgttgatgatagcaaatggtcactctcccaagacaatcaagtgagataaaaaaaaaaagacaaacacttccacgctgtaaacaagtagaatattcgtgtacaggcccacttcactaatctaaaagaattaaagaagtacacttcactggaagtctggaacatcagaacccaacaaacatcggcacacattagtcatttagtatctctcttgtttgtgtgttgctgccattgtctatcacacaccacctagcaattgtttcaatacaaactaaacgcaacaccaaaatgaagaagaattcatgaagaaagtggacataaaagaagactcatacagacagactctacataagctgatgcacattcttgtccagtcattaagacgaatttagaatgatgtgcaaacgccattgcatatttgatttttttttttaagccagcagtttcaagggcaaactttcacaataccgaactttttcccactgttttcttattcaccttcttctccagtaggatcatccagtgaataactttctcacatgtggagtcgacgaactggaaatacctcttgcccactgccttgctgcacacaagaagccaccacacagaagaaaatcctactccgaagcccaatcctgaaaatatatacagccagatatcatggacatcattatgctctgcttgatcaacatggttatctttctgttcaaaacagctgccagaagcaagatggatgcagagatacttgttgccagcatagatgtatggatcttcatcaccaagggtttgaagctgagagccctggggtaccatcccggacagattgttgtaggacatgttcaggtggctcaacaagtgcagtgatgtcatgctttcaggaattatgcctgacagtcggttccatgagagatcaagcgactccaatgaactcatattaccaattgtctctggaatatgaccactcaggagatttttcgagagattcaggtttttgagccctacaagatctccaacttcagcaggaattccacctgttagataattgttagaaaggtcaatgctcttcatcagataaaggatcttagaatacaatctttcttctcctttgatggtaatgtatagactctcattgtgatagagagatccaccaaaactatcaccagaaatctgcatcggtataatatgtcttgacctctgtgaagccatttcactaaaatttccaataccttgtggcaggggccctgacagcttgttattggcaagatccaacacttgaagaccttgaagctgtgacaattcagacgggatgcttccagtgaaacgatttgatcgcaaacgaagaatcatgaggtattgcatgttatctcctatccattcaggtatggaaccctccaaattattatctccaatatcaaggaaaaccagaagcccgcatgaacttagagaggaaggcaacaacccagatagcctattgttgttcaaatgcagggaaccaagaaaagtaagagagccaagacttgaaggtatgtgtccttccaggttgttgtacgagaaatccaccaaaaatagttctgtgctgttcttccaacaattaggtagctcgcctgataagctgttgtttgataggtctattgctgacaaccatggcatgttgcaaaagtacgcaggtatgcttctatttagacgattgcttgacaataaaatgtaacgtgtcttgttccctcccacactattgggcaatgatccagataaagagttgttggagagatctagcaggtctagactttctggcatatcaggaatctgaccttccaattggttcgagctgagccccaagaactgcagtgacttcatatgaaccagggatgctggtagcatgccagtaagcagattgtcagagagatccaagttaatgagagaggtcaatgacgtccaaagccaatcaggcaattgacctagagtccccgttctgtgcaaatctaatgtctgcattccaacttgtgtttgaagccactgcgggacttgtgattgtagtggggaagaacctaaaaggagttcataaagttgaaagggtggtaaccaatttgctcccacagaaattctcaaggaattgtaagataaatctagcttttttagcttagttagatttgttaggtgttgttcagacaagacatcttcgagtgaattgtgagaaaggtccagttcaattaactctgtgagctgactgatattggtatgtacatgacctgatagtgagtttttgctgagatcgactgagaagaggtttgggaaggatccaatccacccggatagacttccagatagattattattccccaatttgatcatagatagtcccttcatgcagcgggtcattgccttccccaaatcagcaatatcacctataaggttgttgttcgacaaatcaaggatctgcaagttacacaacttagatattggaattgctccaatcaaactgttgtcagccaagtaaagggtattaagggcagttaaatttcccacagattcaggaattgagccatgcagctcacaatagtccaaattaattaatgacagagtgtatatgcttgccaaccaattcgggaatctagagctgaagttgttgcctgatagatcaatttcattgagaactgtgaagttagactgggatagagaattttgattagtgggtggaagattggtaccagacaaacgaagcactttgagggaagcaagcatgttcaaagactgcagccaatctgaagccacagaaaggttccacaatgacatgtcaaggtaaaccagtgaagaaagctgagagacccaaagaagattgtcaacagagctactggaagtaaagctgctaaagttgttataaggaaagctaatatccaggtaattcagcttagataagtttccaagctgagggggaattttcccaccgaaattagcaaaggacaagtcaagatgcctcaggttcttcagagatcctatgaacgcagggattcttgcacctccaaaatcattcgaacgaagattgaggtacatcaaatgagttaaatgaaccaatgatggactgatgtcacctgttagagcatcctccttgctgatattatagtttgcgaggttgagcttgataatatgtccagtcctgttgttgcaagtcacgccataccagttgcaacaatttagacctacccaagaggacagcatgcctccagggtctctcagggtggccttcaagtcgaatagtgcatctctttcctttccaatgcatgctgctgctgctgtgattttggaggccaccagcaacaggggcaacaaagaaatcagtgcaaggcgcatgatgatcacggtgttggtaagtggtaaccttgaagctaatggggatttatatgagaaacacagactatatgagccacctggctcgcatcagcaccctgcaggataagatgatcaacaaatgccagctttcattattatgaaaactactcttagtattgactcaaatttaacctggagttgcatttaatagagacatagttttatcaagataatgttcttgcaacaagaccaaagaccagagcaattaatctacatttatacacggccatatctcttatctcagataaaaaaaatgttataaacttataatgatcttctggcttgatttgactacaccctaatgaccccgctaaattaacaaatcaaccaatagcgaaggtttatttggtcaatggtcatctctcatgagtcaatacgagaaattagttatcactcatcactggggaataaaagcaggaagtaacttaaacatttgccgcatctgtgcaacgatttgcattagcaatggagcagaaaatagtggagaggttaccaagtaggaggtgctcgccaccgctgtttgcatcggagacggcgaggaggtggtaggagggttgggctggtccgccgcggagcacttgcccgaggggctagcgccgccgcgcgcccgacggccgcctccgcgaggccgccactgccgccgcccatgggagccgggtgatggggccatgggttggctcccagcgtcaaatgcgggggtggaatggtgtgcgggatgcgcgtattcgagctgggaggagtatctcgaatcccggtggcctctcgcggcgggggatcgccggccggccgccgccgtgttgagagcttgaggaggaggcggcggcgggaggactaagacaaaaataatagttccaattttcccaaaataataaggaaggccagggtctaatatgaaaatatcccactgaatcgatgaattttcagcataaattgagccaattttcatgtcaattttgagccggaccaattgaaagagtactacatttcaagtgattctgttatcatttgagacacagcaattcagctaggcatttgcaaaacagaattaagggcaaagtttcgcatgaatgtcgcaatattccacgtgttttgctgaagtatctcaggttgcaagcaaagtttctgtttgagaagaaacttcagcaatttcagttgaaaacaccttagtcacacattatcctgcaaccgcacaaaaaacactaaaaatgcaatgctccatttttcatcaagaaaagtaaaacccattgagctacgagggtttacaaatttcagatactttgtagctataaagtttgcaaaaagagaagttgaaaagccttctggaatcagtaatctctgccttgttcgcttaatcctggttttgttccatttcatttttactccgtttcctgatttgtagatgatctttggttcatcaacgagaaacatactcggataagctgtattattgaacaagcagagataaaaccaaagacagataaaacgcctgaacggtaagacaatacttctccagaccatacaattgcatgacgagcccatacgaagggtttggaaacgtcagaaaaaccattcagctaaggcagaaaagcaacatacataacaacatgacaatcgatacaaccaagtatctgcaaacagaatatgtacaatgttgttatagccatcatctctcatattctgccaaacatttcacacacttcaagtacgtttctctgcataggaaacagtaggaattcccagttgaatttgtctcagttcgatatcaaaaagagcacgacgagtgctagtccttaaacccaaaatcatcaaacaggccctgaaagtggaagagacaactaatggtcattttgtgtacacttggaatcatggacagagcgtaacgaaggtattctgtagagaacgtttggtcgctgatataatagcatgctaaccttggcatcatttattccataagccacacaatagtgttcctgagaaaagagacaatgtaatgaagaagtggagttgatacacaagctgctagttttgtacgggatccctcaccaataagtggaaattctcatgaacttacctgcatcatatgccactcttcgaactcatcaaacaattccaatcgttcaatcctgcaaccatgcaatttcatgggtgttacaaaaaaaaaatagatgttatgtgaggcaagatttaacataatgtccttcgtgaagatcaaatgtaaaactcagaaactcagcatcatacatcagaaatattacctgcgtctttcttcactgtcaatgaaatcattgtatatttttagcatatcccatgcaacagctctctgcaaaaccaatcagtaaatccctagaaacaaatcatattcaaactgtgtcttgagtcttgaccaaatatacctgccatccgtgatcaagaaaaagattttccttgtgacttagggttggtgtagcatttataccaaggagagggcatcctctactctgcattagcaggacaacaaaaggcattgagctatagaataatgctatgaataaagtaataagcacctcaatatatctgtccatgagaaacaaaaagacaggtaccaaccaaaaacaagcaaaacatcacctagcttaaatcatacagtaagatgccctccataaactaagatccacaaacagaagttatttacacaaatgactacaaatatttcatctcaaacttcaacttgtcatgtttgtaatttcaggctgccttcattatgtgcataataagctaataacttcttatactgcctccttcaattgtcatgcagcaataattagcagttcattgtttaatataggtccaacagctcttgtataaggatagtttatgagaatcaaaggccacaaccgaattgttcaatcaggaaacctgcaatatgcccgactctttggaactaagtaggcctctttgactccgctcagagatatttacccgactctttggaactaaatatgcccgactctttggaattttaagatatatatgttccttcttttaacaaaggtactataaaggtactatgattggaagcacaaaaaataaggaggtctattttttaggtattgtatagttggttgtactttcttgttggcatacaaaaaggtctgcagttgattaaatttacttctcgaacaaatccatgtggcaatcatgcaattctcctataaacattccattacacctcaggggcaaatggctcatgcaccacaagggaataaaggattacaggttacaaaggttcatggacaatctacaagaatgaacaaaggtacctcaaggtttataatcatttgctctccaaatgcatcatctggatggatctgcatcagagtagaagtcaatagtgcaaaaatatatcacatatgagagtggaagagtacaaatgagagaatgatttcacctgctcatataagaaaaatatggcagtggagaacttatcagatgcccaaataacaatagaactggttgaagctgggtctaagtaaattagcacacactctgcaattataaaggtcggcaagctgatgacaacagaaagatttattaagaacttgaaaatttgatcatgattcaagtgttagagacaaaggctacgcgatgcaggtatctgacttgacaatgttcctataggcaagaggtgtacagcataagttcattggctgattaaatgagctaactcctaaaaggggcacttgaataattaatcaaacttctctaaaaataggacaagctatgacatatgaaatagaacaaaacatgaacatttatgttctgacaagtaaattatacatggcataacaggaaaatttagttataaaatataacataagcgaaaaacgtagagggcataaattatgaagctaactgaacttgcactcattgtaaaccataaagatataccacaacaacaaagaacaaaaaaaaaaaaaaaacttacgtagggtccatttcagccatctgaataactgaatcaagttttggtatgtcacgaatatcagcagaaaagagcttgtaatgcgcacttctcacttcacctttttctgaaatatttggccattatcaattaatatcagaacacggaaaatagaaaatagcaaattctgtgatatggaaagttcacttcaactcacaattctggccagggtataaatcattttggtcactaagaccattatgctgtcaattaagttataccaagagaaacattcttacaaacagaatgaaatagctacctccaagagaaaatataacaggaactttatacaaaaaaggtactgaataaatcaacataaacgtggagaatggcctctagatggattcaggcaaacaaaaaacaaataaattagcctctagatgtggagaatggcctctagatggttgaagctgggtctaagtaaattagcacacattccttaattgtcattagacacttatttctgctaaagatgcatataagaaaaaggcaccaagtattacggtagatacatatagaaagaacatggtagaaccattagtggggaagatccttagatataaacagggtaggcattaatcgacagtatcatatgcaaatgagagaactaccaattgatatcgaagcttctggtcctaacttttccttcatttgactatagtggttaatgatggcagcctttttgctggttacctgccaatcatcaaaagttgccagaaaagttacttatgcacaaagagaacaagctgctccgctgccattacatgcatcacattatgcagagtactatgctacacttgaaaatagcaaagaaactttatctacctccttgaaatccaactcaacataaaggtatggagcaatgccttcgtcctacagtaacaaatacagcacagactgagagagatgaattgatattaaaaatataccaatatactttgtgaagtttgatcttaaacactgcctccaccaaagcaggatatgattaagatgcaaggcgtactggaacctatttaactagtttatagtaacaaagggcatacagagttaaataaaaatgatataaattattcagatcaaacagtagatctgataatgggccgtaagcatgtgattgtgatgctcatgaatagtgagtaatggataacctgcaactggaagaatgtcgtgtcaaagccagcaccaagagataatatttgtttccggttttgatcattactgccatttccagcaccgaggaactgatgcagaagcttcctaagaacagaccaacgtgcatagtaccctttgcagagttatttggaaaggtaaacaaattagaattttcaaacattttcaattttagagaagcagataaagattcaatgaggcactaccaacctcgatttattattggagccctttttgttgttcgtctgacaaagaagtgcacataatcatccttcatgtatcctttattaacacatgacctgcaaaggaaaaatgaaaatgagtatggcatatagcaagcagcaacagtcaacctctactttgaaaactacaatgacatctatatgtataagcaatacaccacactttccatgcatattgaataacatggaccgtgttacatttatctgttcattgttcaagatagcggcctctgcaatgtcataggcagaagaggtgaaggtagatcatttgctctgcataccaaggtcagtaggccagataagcactggaagttgagatgcccaatcaatttcttcaaaccagtacttaaagcatcaattcactccaaacaaataagcaagaaaatatcaagaaatttcttctgaaacacacaagaatatataaagttgcaagctagctgatccactcaacagaaggacttcattcaaggcaattggtaaaagaggcacatagctcttttcctaccattacacactgatttattgcagagagaaataaaaatagaatcagttcaaaggagtggttatacgacattgcatggtcctacgcagaaaagggtcacctaagtggagcgcgattctggatcttcacataaaaactgtataaaccatccctcttgcttagtacaataattgcattttagcatcacgattcagcatggctttggcttcattttgtcacggtattccattttgtcagggtattcactagcgcaacaaacagtagcagcatagcgcgaccgcggattgatccaaacaagcacaggggcgaccgcttcccgatggcgcctcgtgcaaaggagagaatatcacgcggagcacacgagacctggtggtcatgcggatgcgactacgcgaggggaaggagagctggagaggtagagggggggagtcggggttggtcactcacagcttgctggccgcggcgtcgtcgttggtggcctgcacggacgccgggctgctccgcgccgcgacgctaccgcctccccctcctcctcctcccgccgccgccgccgccgccgccgcatccattccggccggtcgatcgctgggtcacggcgtgaaggggagaggaagacgagagacgtgatggaaacgaagggactaatgggcctcgaggaataaagctcgagaactcgacccgatttagatgggccgcacgtagctggcattcacggcccggcccaacacatgggtcgcacgtgggcagctgtcccgttcggattgggctgcaggataacgggccgttggagtagcggggtccgttttctgttgggccttacaaaagaaaggcctgaataagcacacggcttaacctacctcgacccgagtacacgttcttttctacgggtgaaaacagtacgaaaatttccgagatttccaactgccgttttcagtttgcaccaaccgtttcagtcggtatcaataattattggtgtcaaaaataaaaacggcaatatcttttggaaatggtagtggaaatgagaaggaggtttttccgactgtttcgtcgataaccgtatttgtccggaaatttccgtcaaatttccgaaaaaattttaaatgttccccagtggcccagccagcccaacccattggaagcctggctagcttgcggcccattaggaacgggaagtagctagggaaaaacgttgttaaccctaaggcatggcatgtgaactttgttgaactttggtctacttaatttatcaatgttgaagtattgttaaactttgtttaaattgttcgttgaacttattatcgtatcattaatcatcatataacagtgttatatgaagtgtgatgatgcaaaaatgttataaagtcatcttcatgcatagttatgtcacactccgttgttttcgacttccgacttccaacggtgccatttttgatataccaatattaccgatatcgttaccgttttcgggtctaccattccgattccgttttcaagaaaaaaatatggaaataaaaatggtagagggtttttctgaccgttttcatccgtattcgtttccgacgcatatacttcgtttttttttctaaaaactttcatccgaaaaatttctaactaaaaactttcatcgaagaagctaatcttctaagtttttgaaaccatggtaaatctcgcggttactgcgataaccgccttaccgtggggtggtggtaacaccattcaaaacggtttggtgaaccctggtgatgacacaattttattactactacataggaagaaaatgacgggagtgatggcgctaccgagaagaaaattacgtagacgggaagtccttcaaacaaggacttctagttatgcacctggataacggagataatactcgcaaaagaaaaaaaaacagaaaaaaaaaaactctggatgcactatattaaaacatggcaaagatacactgacgtagtgatgcatgcatcttgtatacaacaaggaactacattggttgtatctgaaccagaacccagctgtccagaattaccagatgtccagatgtccagaattacctaaacttggatctcctatctgaaccagcagtctacagacctactccctccgtcaaagacaaaccctggaattgcgtgtctaactttgactgtccgtcttatatgaaacttttttataattcgtatttttattgttgttagatgataaaacatgattaatactttgtgcgtaacttgtctttttaatttttttcataatttgtttaaataagacggacggtcaaacattgggtacggaaaccagggtttatctttttttgggacggagggagtaccatacaagttatacaagaacataaactagttaccttccgtagtatatccaaattccaattcgtagcaggtgattgagttctggctgccaagacgataaatttccatggattggcgtcttcctgctttgatcctgttgagttttatctgaactatagcacggaactcatccaatgtcttgtcagtgaactggaagtaggcatttcttgcagttctgctgaatatgaggatggcagaaacgacagataatccatatgcaaaccctagcagagtgcataagtatgtccccctgtcaatcatattctgatgttttctagtagtagtatgttgcgagcatattcttgatagcgaggcaccacaatttccacaaagatctgcattgcctagatatggttcatctgtgaaagttgaaaactgagagctacatggtatcactcctgacagatcattgtaggacaaattcagaaccgatagattaatcaaatctgtgatgctcggaggaattgatcctgacaaatcattcgacgagagatcaagtgcctctaaatgactgaggttcccaatttcgtcaggaatactcccaagtatgtgatttcctgatagattcaaggcaagcaaaaaagatattgctcctatttctctggggatttctcctgtaaattgatttcttgatagatcaataaagtttagcgggtaatcgtacgttgagctgtaactctcaagtttatcagtgtatacgtgtatggccaaatatgtacgtccatcagtataaactgtagcaaatttggcggaaggaatcatgacagcatatccatgatcaacgcacatggatgttaaatttcctagaaattgtggtacaggaccagataatttgttagaagcaagatctaaattttgcagggcatgaagttggggcagtgactcaggtatttcaccagaaaattgatttgagcgtaaagatagagtaatcagagagcccagactatcacccagccatgatggtaagcttcctgataaactattagatccgagatcgagaatgatcaatccattacatgactgcaatgaggagggtaatgtgccagataaactgttctctctaagagataatattgcaagggaggttatgaaacccatggttgaaggtatttctccatgaagattattattcgaaaagtcaatggtatgcagtcttgaggaattcttccaacaatctggtagaacacctgaaaataagttgtttgagaggtcaactaattccatcgaatccatctcgcaaagatatgctgggatagttccattcagttgattatctgagagcttgatgtaataagcgtacttggctcct

SEQ ID NO: 7977 - DNA, 10583 bp, Oryza sativa
caagttttttatattccagatccatctaagtttagggtgaaaaagggtcgacgccaaactagacgcatcagaaatgatatggatgagtcagaagcaggtgggaggactttacgctgcagcaagtgtgatctgcgcggccatacttacaagacatgcccgaagaatgcagaagttccaagcggcgcagatgctagtccatctggacaggcaagtgatggtaggcgaccacctggtgaaggaacaacaagcaggcgcgcaaggccaaggcgtcgtcgcgcagcaggcgattccatggtgtaacaatgctttcgatttaggaaataaaatgatgtaatgagtgttcggactaaatacttctatcgtgtaatttcaattcaatcttgttgtaatgagtacctccgactattgttgtactagtagtattgcgaactattcggtgttgtatcataatgttatcgtgatgagtgttcggactaaacacttttgtttgtttgtactcttgtttaatatgtgttagtaattcgcttatgaacatttattacttatgttgaactaattatttatatgtttctgatcaacctatttgatgcaggtatggcgtacgacacaccggcgctgttgaaccgtgggattgacaggaaccaccgctcgttcctgtcagcagtcgagggtgcacagctcggcaccttccgtccacgcacgtcgcgcgagtggttgcgtgtcgacccccgtcacgttccttggtacgcgtatgttcacatttcaactcaactttgctttgttttatacttatgtttgaagtttgctctatacaggttgcgtgcggcaggccttctaccactttgtaggcttgttgaggcggcggcggacgaccgtgacccagcgaagcggtgggatgcagaccggtcactccttgccgctcttgtagaccgctggagacctgagacgcacacgttccaccttccctgtggggagatggctccgacactgcaggacgtgtcgtacctgctcgggctaccgctggcgggagcaccagttggtcccgtcgacggtgtttttgggtggaaggaggatatcactgcgcgcttcgagcaggtgatgcgccttccacacctaggaccgaccaccacccttcctccgtactctacagtcgggcctagcaaggcttggttgctccagttcactgtaagtaaataagttgttattatcatacgtgcttatttgcgaccggatcagtgttttgtactaacatttcattcttaactgtaggcggaccttctgcaccctgacgctgatgattactcggtccgacgctcccttgaggcgtacctgttgtggttgttcgggtgggtgatgttcactagcacccacgggcacgctgtggacttccggctggtccactacgcacggtccatcgcggatgctcagccacaggacgtgccgcagtggagctggggttctgccgtgctagcagccacgtaccgtgccctctgtgaggcgtgcacgaagactgacgcgggagcgatcatcgctggctgtcctatgttgcttcagctttgggcagccgagaggtttgccatagggcgaccagtggtggacagcgcaccctacggggttggtcgcagcgcgcagtggccagaggacggtcccacgatggggacttactggtgtcgacgtggggttagtgcaacttcgctgcgttataagtttatcagtcctcttctttttttttccttcacataacatgtctaattccgatcatgtttattgcagcgtcgttacgctcacgtccaggtgagacgtggttacccggacttcgtgttcgagtttgaccgtctccagccgagcgacgtcatctgggagccgtacacagaagaggccgtcgctgcgagagcaccgctaggactttcgtccttgtgcacacgcgaccaggcttactggctcaccatcctgccgatggtgttcgacattttcgttgagcctcactggccgcagcgtgtgatgagacagttcggacttaggcaggtgtttcccggcaacgtgcagccgaccgtcccccctgccgaccactcgtgagttcggattgttcatttctaaatttttatgataattacatcatcgagccatacaatttacctctcttcacaggttgactcgacggggacagctagcaggcgcactttgggctccacgtgtacagcagtacgttgacgactgggtgttagctacagaggaggtgatcaacgagctcttcccacacacggaggagaactaccgtgactaccttcgctggtaccttcctcgcactcgtgcgcgtgtgaccttcactccagacgccccagagccgcacgttgccgctgtcacggacgcgtatcccacgcaccgtgaccgagactacttcgtggcggtacgtccaatttgtattacttccaacaattatgtcatttatcttgcataatataggacaactactgaattttttatttccatcttgcataggctgatgcggcacgggatatcagtgccgatatcaccgcagtccaggtgaggttgaacagaggtttgcacttgactgacgttgagcagaggtcgaccttcgaccggatgcaggagaagatgcgtgcggtcatgcgcgtcttctcctgtcgcagcgccgtggacgtcgtacctccagctggtccggtacacccacggcctcgcggtcctaccgtcggagcaggacctcgtttgtcttcgagcgcccctagcttcggagcagtgcgacctacagcaccggtttcgcacggtacagttcagcccagatattagttcatttttgtttcagcttttgcacgaatgtgtcaccatgttttaactgcacgtttcctcatcgcaggacctcgtatgccttcgagcgcgttcgcaggcacgaccggcgcttccgcgagctccgcaggggcgttcgccacctcttcaggcgcgttcgccagctcttcctctcacggagcgtcgatccctcgcccacacggtactttactttttattaatactgttaaatacctatacgaaactgatggtccttgtccagcaggatttgcagccgggatcttcggtactggggcctcttcgtctcacgccggtaggactggtcctactagccagttctacgatgacgacttgcacggtgcagaccaccaggacgtactaggctcctctcagcttggaggagctccagaggcgcacactcaggagcagccagaggtcacacctgtacaggcaggacgggttggccgtgccgtacccccggaccgactcacgtactcccaggggcacattagggcgcagggtaggagggacaggggtaagaggcctcgtcagtagtgttctacctcttcagtccttatgtgaccgtttcttttggcttacaaacttgtaaagcagtactacttttgctattactactgcagtactacttgtgtttgtctcgtctacgtagttcttttcattcgtatggtgcttgaacaacttatgctcacaacaacacactttcggcgcttcacggtagtgccatatccagtagcgcgcacagtccacaacagcacacatgaaaagcggcagctcgagttatcactatcaactttcggcgctgcctgttgacataaagtgaatcacgcccacgcgtgatcgtcttgtcacatctaatgaataatgtatctcattgagttcacatatattgcagtgaaaacgacgctatataattgacaatctgaaggcaacctcttcatatcttctttcccactaccacaccacacacgaaaatggaagcctattaattggtaatacgtaatctagaattgagattatgtacaacattcttcactacaattttacattttggcagcaaaccaaatatgatcaaatgcaattttaccttaccaaatatttggtagtgccaaaacttgcttatattttggcattaacaaaatatttgtacggtaacattccaaatatgccctaaaaaataataaaattgtattttaccaatcttggagattttaatcttgtatagttttcaatataaaaagatttgataactattgatatttatataaaaaaaatatagagcacagtacaaaatcgccctcccccagggcggcaagggggccgcctgcaaaattccatgccccctcgccgcccatttgcaggcgggcccccgcacagtgcaaaatcgccctcgcggagggcggcaagggggccgcctgcaaatttccatgccccccctcgccgcccatttgcaggcggccccccgcacagtacaaaatcgccctcgcggagggcggcaagggggccgcctgcaaatttcgttgacggccgtcgcccgagagcgaacggccgtctgccacgtcattttcgccgccctctgggagggcgatttttaaaaatcgccctcccagagggcggtaggcgactatttccgtcaattttcaaaatggaaaattatttttgtaaaacttttaataaaaaaaattataaataaaaaaaattctggggatatgtacggggaattggatagggtggtgaggccgggcgtggtgtcacgtgacggtggtcaggtacagtagctgtttccgtgccggtccggtcggtccaccggttgatccggctcggtgaccgtgacaaatgatatggtgttttcatctaggaataagttcacttggtcactctcaaagttgattgaaatttagtccataagcctaaaccacaaaatcggatacctcgactctaaactcttaaaaccggaacaatttgactccctcggtgatttggagagcggtttcgcttacgtggcgcctacataacgatattgaccgagtcttcgttacacgtggcgttgacatggcacttacgtgtcattagaatttaaaaatatgcgtgggacctattagtcattcagacaaaaagaaatgtggggcccactgatatgtggggcccatatgtcagtcatccttcttcctcctctcccttctctctctctccccttcttcccttcggccggtggcgcgcggcggcaggaaagctagggctgcacgacctagcttcggctggcggcggcggtgggctggagctgatgcgggagaggatggcagcgccgtcgccgacgcctggaccaccaggtcgcagctcgctgcgttcgccgtcgaaaggagctcatcaagcaggtcgttgtcggacagctgcctctccgccaccgccacgcccatccgcagcacatccttcgatcttctaccgttggctgtacgtggttgatggatcttcgttgccgttgccaaccatgccgtcgatgatgcatgcccagatggaggagatcgcgccgccgccaccggattccgggctgccaccggcggcgatggcgatggcggcgccgcgggcagactcgatcttctcgacgaaaccgctgttgcagtatgggcacagtagtacagctcgccgtcggccgccgtcttctccgccattgctcccgatttcctcgccgccgccgccaatgcagcagcttggattcctctcttgggttgcgacgaaggattcaataaaccgagagatcaaaacccaatgcaagatttttttttcttttcttttcttctcttttcttttgctttccatcatcaaaaggcactcagatccccaaatccaagaacaggttccatcaacaagaaacaaaaaccactcagatccacatgtggggcccaaatttgttttgtgtgaatgactaatgggtcccacgtatagtttttaattctaatgccacgtaagtgccacgtcaacgccacatgtatcaaagactcggtcaatatcgccacgtaggcgccacgtcagcgaaaccgccctccaaaatcgctgagggagtcaaattgcactggttttaagagtttgggggtcgagatatccagttttttggtttagggtcacggattaaatttcgattagttttgagggtcacaaagtaaacttattcctttcatcttaagggcttgttcggttgggccggcaacggccgggatcggggcccaatcccgtggataatcccggcgtggaaaggaataagttcactttgtgaccctcaaaagtgatcgagatctaatccgtccctaaaccacaaaaccggatatctcgaccctcccaactcttaaaaccggtgcaatttgactccctcggcggttttggagggcggtttcgctgacgtggcgcctacgtggcagtattgactcgggattctgcccacatggtgttgacgtggcgcttaggtggcattagaaatacaaaatgtgtgtgggacccatttgtcattcaccaaaagtatgggtgggacccactgacatgtggggcccacataaatcatatcctccccctctctctttctctcagcgagcgtgggacgggggctagcgacggcagcagtgggcgagggccgaagcaggggctagatcttcgacggcgccggcggcggacgggggccaaagcggcggtggccggtgcctcctccaaccgcatccacagcctcctccgtccctccccgtggcgtcgttgccggcggtggcggtgcggcggcccgcgagcggcggagacccgggagtagcactagagcggcgactgcggcgtgcgggcgagggccggagcagcggcggcggcagagatcgagaccgccgtggaggttggccgtcggaaggaagaaaacgggccactagaacggctgcgtcctcgccatcctcggcctcgccaccctcggccctgccaccgcactatccaccgatgcgctccacgccccctctgccagccacgacacacccacctcttccgctctcccgccgcgcccacgaacgggtaagggccgcctgtgtctcgcgtcggcatcccctcgaagatggcggcatccggtggtggcttcttctgcacctgcagcggcggcgttgaaggtgggaggagcagcgcggacgggggaggcggcggcgccgccgatggatgcggtcggcgtgccaagccggccgacaacgacgcgaccccacgggagttgggaggcatctgcatcaagcattctcttgctggttcccgagtcaatcggcaaggggcgacagatgaggactgagctagcaagcagcagcaacagacagtgcatgtgtgtactaacatcaagcggcaagccaacaagcaaagggctgaccgaccgagcaaagatgcagataggcaagcagagcagcatattcgcacggacggtggcgcggccacggaggaggggacgcgagggacgggagcctcgccggcccttgagcaccccccccatcgccgacgctctagctcccgtccctgcaaccgtgcgaataagggtgggcagaaaaaaaaaaccgaaccgaaaagatcgagacgagaccgagaaatttggtcatcaattcggtcatagatagtgaaagaccgattttgttcggtcaatttagttagtctcctcggataaccgaatagaccaaaaagactgaattatcaaaaaatgtctaaatacaacctaataagagtctttactcataagtgcttacgaattttttttgtgatttttgtgttgataattaccattatttctttgcatatatgaaaatgttattgaatttcggtcgggaccgagaccgagaccaaaaagaccgaaaccaaatttgtcgttactgatattttttcgctgaaattcggtcttcacttttcaaagaccaaagaccgaaaccgaaattttcggttagaccgaatgcccacccctatgtgcgaaggggagagaaaagagaagggagagagagggaggaggatgaagaggagagaggataatatgtgggctccacatgtcagtgggtccataaaaatttctttgagtgacaaatgggtcccgcatatatttttttaattctaataccacgtaagcgtcacgtcaatgctacgtggacagaagaccgagtcaatactgccacgtatgcgccatgtcagcgaaaccgccctccaaaactgtcgagggagtcaaattacaccggttttaagagttgggggttgagatatccggttttaaaagtttagggccacggattagatttcgatcacttttgagggtcacaatgtgaacttattccgcgtggaaaggataccggcccacagaaaaatatgcgttcggttaagcccagtctagattttaacccggtccatcccggcgttttccctgcgccccggcccgggaataaatcatctagtcccgaggtgtggaaaaaaacctcgagaggaggcggcggcgggagcggcgcgcggcgcgacccgacggcgacagcgacggcgacagcacggctctctcatccggccgccaccttctctccggtgagcacgctgcctttcctcctctcccctcctcttccaaatctagggttagggtttccttctcttctccctttcctgtcgtcgccgccatcccatcgagcaccgctcccggtcgcagcatagcgtcggcgcatccactctgcagccgccgcccatcgccctcgcccacggcgccacgccgccaccggcgtggcgccctcggagaagaagaggcggaggagagcacaaggcgattctttggctattcttgttgttcttgctgttcttgtaaactccaccttgtcgatagcgtccttgagctgcagcgaccagttcatcatgctggggtcgttgatccgctgcttcttcactaaactcactacgctgttcatctcctccaggaaatttgccacgctgttaagcttctcctggaaaccgtccatccatttgtgcctcttttctctgttaagcatgatgatctatttatcctagtttaggattccaaaattttgattatttgggtgcaaacattttaagtagtactgcaggtactgccattgcaaattcacaatttggctttaggataggtgaaaaaagattcaataccatataatatgcttgtaattgttgaggctgcaaagcgggagctaggcagttacagctagctgaagtgaaaatctagtggatctcctgatatgcagcagttgatgctgaaggacatcatgtgaggcttctatttgagcagtttttgtcatcttacaagctgagtcactttcatttcaatatctattttcatttaaaattactgagcctatagaatttttcacaccaagcttcactactaaacttgacatttggtataatagaaccgcttcagtaattaaaatgtgatgcctataacatcttattgctttaccttgatcccaaaattggttaatttggactaatttgccaattcttagagtgtgaagacaggttgggttgtactgcactaatttctttattgttgttccaagcataactgtcttgttgaaaagcataacatgtgaagtggcagacttgttgcagagacatgcatctgtgtatccctcaaaaaaagacatgcatctgtgtatgatgagaagtagagatggagcagggcttcttgtgtactgcaatcctgaatttacagcattcactgcaatcaccattgcttatcatctccctggttccatgccctctcttttttgttactgttaaattctgatgatcaattggcaattgaggtgtctgttccttttgaagtttttataattgataaggacaactgcttgatattcgtatataagcatctcttcttggacttgcttgttgaatctgtatctacaactttcctgtctagtttttgctacaatgctttcatagatgttgtacagaagggaaaatttggttgttatccactgcggttttgcatacttgtttactgtgttctgcaaatacttgtttactatggagctagtagtgccatcttattaattattggttatccttttcagtcacagaaggctatagttcgtcatttggagcaatcactgatgttgtattttatgtgattaaaatgtgatggtagcagcttcatgaagtacttaaactctcattttgggataccctaggagaagtttgggttttgttgtgtatttagacttcgctagtgcaacctgttttgagtttgctatgtgagatacttggaaagtgaaaagaatgtttgcgatgtgctccttgcttgaagaaacagacgcatacactgttatcttcactgttatgtgtacgacttaaaaacatcaaactgtcatccttgttgcatgcatgaatgacacggttggagttaaagaatacccgtagtcgctttcatgcatgattgatggattaaaaatcaaataaaaacatacagtattcaattgtccttgaagaaaaagcaacagatgagtatacatgaagtataaactctagtctgccaaaactgtcagcaagtgcagactaattttcatctcgagtgttcagtttgagaccggtccgtattggagaattatttgaaacaagtgaacaatgactataaatgtggtacacaatgctctttagatcatactaagagcaagtttaatagtatagccaactactagctctaatttatctatagccaatctaatagcttatccatacaatagttacatactacactattaatacttagt

SEQ ID NO: 7978 - DNA, 49352 bp, Oryza sativa
  unsure (1)..(49352): unsure at all n locations
cgggttggagtattgactaccgttaaaaatccagtcaaaatttgtaaaaaatagtttgaccaggaaactgggcagtttgtgttctcgaacaagcccgagaagtcttattttcatgaaaaccgactgatttttgttggttttgtaaacactggttgcatgcctttcttttcttcataactacgtaaatacacgtacttggctatggataaaagaaaaaatgtcataacatttttctaaaataaataaaagcatagtttccatgaaatttgttgtctacatttttctatagggaagactaaccttaatttattttatatgtgactatccatttaaatttactagttgttatgtaatactaagaaattgaaagggtaatatgaaaaaaatagaatgatagtaggtgggtgacatattcgttaccaccaccattaaaatcatcttaaaaatcatatagatgagcacatactgttgctcacatatcaaaagaggaactacctgccatatataattgtacttggttgggatttgggtgcaataagacttcttttttaaaaaagaaatgcacatgcacaccatcactcagtacaccacaagtacacacctactagtacgtcctttgtgagtaaaatcatatttgtcgtagaaaacaactcctaattaaatttcctcttttcaaaagaagaaagataagatattggctacatagctatagcaatcatacagggaaggaatgaaccatacataatggtgaaaatgatgtaactactttccatggttgacaaactccacaagagagcccatcacttcctatgatcagttccagagtcaactgaggtcccttcgatcttcaatacaacaaatagtcaaataaaactaggaatgtatactaacagcctaaagattcatcccatgtggccatggcatttctttaccagtgccgtcgtcgttatggaaactctcatggtagggaagaatcttcagtttgattaggctttggtgcccattttcttttccgttgctagagactagagtggtgaaacgcaatacccaaggtggtggatggtgcccaattattgaccaaattaatcaagggtggctccaggctcatttgcttttcggattaatttcgtcagattgcaccataggatgcggaaatcaacttgtttagctccattgaaaattttacaagctaaaacctagctttgtagacacaaagcactcttcatcctagcatgatggtgtgagccaacaaaaaaaaaagagtaaaacaaaacgagtgaaacagtattctcttctctatacacttgatggaaatgatagattaactcttccaaggaatcagcattttcaacagcagtgttcaacggcaaagcaccaacagagaattatacacggaaagcttttaacaccacaatcatatgctacatgtaaactttgtccaataacatgaaattacagtggatggccaacgaaaactttgatctcctagaagacatgcgatggctatggtaatgtggcatatactacacatctctatagaaattattaagaaaacccttcgttacaaccagctctgcacccaaacccactgatttcaggacgtgaagagtgggtatgaaaatgttgcaggacgaaagaatcacctatattgcagcaaaaaagaagccggtctggattgataccattggacaagcatgcttccatgtcttgagtttggagttcagttgaaggatatgataagatcaaagctcaaacggcacagcatcaccaatgcaaaacggcacagcatccttggtccttactcatgttcagttagcactgcaaggagaaaagaaaagaataaattcagttcaataattagaataaaaaaactggtttaagaacaaaaaaataagctagctataagcttgaccctacatatcaggcccaaatggtggatggatgaatatccttgtcttagcgtcttagcagccaatatacgctatataggagcaaataaaacagcagaacatacagaatatttttttttaaaaaaaatataataatagaactcatctcataatgcatatctatatttcaatttgctaactgttggtaatggtctataattccaaaggggtcagatttactttttcaaaaactgaagtactagaaaggttcaacagtcctataatttgggggcaaagctagtgaatcaccgcagacaaaatttgggtttttacacttgccaaacaattcttttaggctgacgaagttccttcattgttcgtaccccactgttcctcaccctctttcccatttacaagaacggtctcttcaggctcatcagcatcaacttcgacagcttcatctgtgctctcctccactttgttctcttccaaaacctatgaggaatcctatgttattattttcagaacatgatgatgaatatagcactacagacatttaatcaaggagaaaggataaacggaacaatggttgagtgacacggtcatcaacactagaaaggaaagttgaaaaatttcataataagttgaacatggatagcaaaatgcacactccacacgcaatacctcttcatcgggctctccattttcatctagtgcatcttctgtttcctcatcttcaatgacctgcatccttttgaaagcttccacaagagtcatgtctgacttttcagcatggttcaagtactcatcagcaggaggataatggaccctgaagaaagagaccttatcattgtaccaggtttgtttatacaatagtttcttccaaaagaattggtagcgttacatggtaataataaaaaaagcagcttctctggtaatttttacctccgagaagcaacattcttttctacagtaagtgcaacctgccagtcttcaaataaatttggatactcagaaggatctgccagagactctgcagcttttggattaacctgtacagaaggaacatatgaatagataaaaccagaacaataacagaaaatgttttctggatggaagcacacttttcaatgcaaagataagagcagaagattaagaaattactttactgaggtcatttctccatattgctactatctcagaaactttgctgggaagataagaacgtgccattaacgcagcttcaggtatacgattgctgtataatacatagatgaggtttagctttgaaaaatgatttactacaatggggagttcataacagcaaacaggatgtacatgtacctgtctatcagcaattgtatgcaatcttccaatttaccaagcataaagagacagaggaaagcaacattgtttttgccatgctcctttgcttgagaagcaagcttctcgattccctcagcatctccaagagatgaatatagtagcaacaggccacttaagtccttcgcttgcacaaggcactcttccgccatatctagctgttgaagttgtgaaatgatttaaagtcagaaaacaaggtaacaaacagaatataaatgatttgcattaattgtcatcaaatgatgtcaatatgaactagtgtagtagtgtcaactattgccatttccatatttctatgcacagaaactagatcgtgaaaggataaaggacaagtctcagctgatttccaaaagcatgtctagtttggtttttcctctaagtctaaagaggacaaaacctcgaactcaataatgcactccaggtaatctagcaccttgacaacaagcacctagatactatggcactgtcattacttttgaaagcatataccaaaagtctttcacaagatttatgaactaaccttgcctgtggacatagccagttcacccaactgcttccacttagattcactttgcgcttccatcgcgatagcctgcacagaaaatgtccagaatccattctgtttattagcaatgaacttcacagcatggaagacctttcagaacattatttcaataatgtggaacaaaaacacaatacaacatgttctgtacctttgcaacttctaattttccaagttgcacagctaggtcaaacctgtaatcagcatcagtagctatctcaagtgcttcctccagcatacctcttgactccaagaaatgagcaacactgccatatgaaaagtaatgggaggagtaagaaaccatcaaaacacaacaggacaaaatgcactgctaggaaattttttatgattttgttatttggcacttccattaatcagtactcctttacacgactacaatgaagatagagtagaaacaatatatgtatttttgtttcaaaaaactagatgccaatactcctaacagttgaatctattttaggtgtgatgtgctacataacagtcattcaataaggcacatcatgatagctattgaaatgtaattgtaatttagcatataaatgtattttcacgcttccatctatcattgttttgttacttttaaaaaaggaacaaaattattaagaaaccaaatcaacaggttcaaagagaaacaggtaccaaaataaaagaaactcattgttttggatcaaaagtcagcaactaacttattatattgcgcctttggtatggatggtaaaatatcatttgcacgttcaatatccccacgcatcacaagtgtcttgtactcaatcaaactaagaagtaatgtgtaccccatgacactgcaacaagaaaaatatgttagttcaagaattcaacaccagacaataagcaggcagtattatcaagaaaacacacttgaattccttgtcaataagataaactcggctttgattcgctagatatcccaacaagtacatagggcgatccaagtgatacatcgtggtgacctgtaaatgtacaacgggataaatttgtagtgcacaaaatactacaatagaaaatacattaacaaaataaaaattcttgcatggagcacacaatatatacctcgccaccaacacaatagttcaggcgccatgatgaattgttataaataaagcagtctccaacccagatccctgtccgcactcgctcattaacctcatgaagcagctcaaaagcatcttcaacgccttcctcatccacaggttttccagattctagataagacgcaacgacatctctctgtaggaacacaaattacaaacataacttcatgccatggtaaaaaaagaactttcacgcaataacacattcaagaggagaaaagaaataacataatgaacatttagataatacaataacttacgttgtacttcagtatgtagaatgatgtatcacttgctattgcaactaggtcaccgctatcagcccaataaaggttctaaaaatacagtgacaaaactagttatttcagtatgaaattcgttaaaagtatcaatctataaatatcaatagataatatttgactcactttgacattcacatcaatgcggcgtattagtctacagtcagcccagtcataaaagcaaatgaaatcactggaacacatcgccaataatattccaccaaaaatacgttcagctgaaaatgtagggcgaatagttttcttctcctgcatattggatcattcaaaccagaagatacaatattgataaatgccaacagaatatgatgtgcaattctttgccaaattcattaataaaaggtccttagaacatagtaactaattaaatcaacctacgcttaaattgtttctagatcaatgttatagctaaacataaatggagtattcatgtaggctgattggctgaatgacaacagattgtcaggaagtaagatatatagtgtaagaaaaagaaactgtcatctaggtgactaggtccaatgagatgcaaacctaaatcagtatgtaatttcctttcaccaaacatgatgattgatgaatcatgaacagacattaaaatgcacaacataaaacttttgattgaatgaacgctcgtgttaaccagaaacctttattgattaaataaaagttaactcaatagttagccaaacaatagtacattagacatctcaattgaatattgcaaggtgtaaattcacggttaaaggcaaagtgataaacaggtgaagatggtgcattctccagagtggtgattgaagaaatgaaacactacagttttactgatcaaattcataaaaggaaaggctacaatcaatgtgggccaaacctgaaatgatttactgaaaatctttattcttgatgtactttccctgatagcatactctccttctgatgaccaaacaaactccaatgcagatccaaatgacctattcctccaagccaatgcagtataaattatgaattcaccatctccacaaactacgacaaatcttccattggggttatgctttaagctctgaccaaacaaaaagatgacacatagtaagattgaatactattcaagatatgacaaacaactaacattacctagtagaaagaaaagaaatgttgtagccatctcagtctaatatcacatcaaggaatcacaaggaacacaaaatagaggtagtggttgtgtgaaaactatcaatcaaagcaattaacactaattggacaatgtcacctattgaactacaagttccatatgttctttcactaagcttattagcataaccatttacaagtcatcacaattcacaagctgcaggcatggatgataaccactatatatgctgatgtgagattaatggatgctatttatgcagaagttcaaacacataggttactgcagcactgctaacagtatcaggagtaaaatataaagagcgttgtgagttgtgacattcaaaaatacctgtgggtaaagatcacaacttcctaattctttaacagccaatggcaatctttccccatctgtaacctgaataagaaaacatagtagggcatgagatcagcttctctgtttgattgatcgattctgtttgcaaacaggccaactgacctcaaagcctgcaccaacagttttgatgttcacagtctgtatctcgttatgttttgcccaaatgatttttccactggtatccatgcttgccacaggtacttcacgtcccatttttatcattatagttccctcatcataaccaattaccatcctacatatcataaaatgtcgaatggtgttaaaaaattgaaaggaggagtgacgcagaacagtagtaaaagcaattgattacaatgcaacacaaaagcagaatgcaaaggatcttctgtttaccttcttgaacccttcatgtatccaacagcccagactcgttcaagaccatagtttagcgtgttctcaagtctacaaaataaattaaaaaataagaacacctcaacattgtggcaatcataactgacataagtattaagtagtgagctgccaacaactaacaaatattccagaccataagaaaaaggaacagataaattaatgacaaaaacagaccgaatggtacatagattacactgtcagctaccctcttttccaatgtctaacatagatttggagcttttctatgtaagaatagcccatgcataatatgtttaagagttatgagataattataccaaaaagctatattggggaaaatttcctctaagaaaatatgtaaaaacttttggatcaaattttgaacccaggacttgagaggttgccaagagaaaaagcaaaatatccagaatccagaaatgagaaccaggaaattacaagttgtttctttcgtagagagcacttgaatagcaaacaatgagaactaggaaacagtccacatcaacaagcaaaaacacaagtgaaactgtgaaagcaacctgtaagttgtcgaatgccatatgcgaactgtgccatcttcagatccagtaatgattataggaagctcaggatggaaacaaacagcagaaatgttgtgtgtatgtccttcaagtgtctgaacacagctcttcgtttggtaatcccagacctggttcaccatgaccacaccatcttaggactgcacagaatcgtggatacttggaacactcaaaagtggatagaaaaaaaaaacctttgcagtggagtcatcagaaccagtgatcaaatagggcctgtcaccaccagtgaagtagtcaacacagttcacacccttttgatgtccatcgagtgtgaaatttggatccggagaacccaaactccatatctgttgtttcagttttagaaccattagtgcacaaatcacctcataaaaagccatatattgtgaataacatccactgcataagagattgtgaaacagacctttgtagttcggtcaagagatgcacttgcaaaagtgttagtatcctttggattgaaagtaacttgcatcacgtagtgtgaatgtccctcaaagatttgagtgcacatccaccctttatcccagtcccacaattttatcaacatgtcatcagatgatgaaagcacatatggaagtgttggatggactgcaacacatctaatataatcagtatgagcctcaaaaaccttaactttgtccatcgtgttgtagttgtagacacgaatgaacatatcgtctgcaccagctacaacccattgtttccgtgaaataaattttgctgaccgcactgaaattaagatcagatacaagttagcatcaattcaacctctatgacagattttcatttcatgtgaacataagcagatgagtacctggcaattctgaaacttcaaatgacttcaccattgtctgcaaacatacaccaaggaaaacatgttaataatcaaatggaacgctaagtatagattatgcaggattgcaggagcatgtgatggaatacgctgatttgaaatgcagagtcaattctatgtggttcaaatccaaacaatgatggtcatgatataagactaggcatcaaccgatcatcctataggtcaatgcaaaattgtaaaaggcttacatgttacattggagtaaggcaccaaagctttgacggccaccaaaaataacatattacattggaataaggcactgaggctttgcagccaccaaaaataatatatattacatataatggatcagttagccacagatggcattaaacttcagtgggagtataacataagtgtgaagatgtaataatgtggtgagaaatgcttctatgttcctcccatagtgatttgtactaactggaaagcatgatttaaggatgaatgacaaaactacttagcatataccccttcatccgtcatgtgattaagttgtaaagcaaaatttgagctcaagacatgcaaaactaataagaaaccatatagattatagaaacagaagccctaattttatgcacaatcatgcttcggtcaattagcatgagtacagttttgaatattcatatttacttcaaaagtagttgagtcttagtcttgcttaatggggaaacaatgaacctaaaatgcaactagaactcttacctgcgactgatagtcccagatgcacacgctcccggagtaaagactcgacaggatcctacaccaatgcaaaaacagcttaataatcaaataatgaagcaaaagcacatcaaaatggtagtacgaacggctcaaatcaggctaaaatgtgctaaaaccctcagaaatgcaggtcacttgccatggctccgtggggtgcagatccaccgacttgaccctctccgaccgttgcgcaaacttcctctaatcacaccatcccaaagacaaaacaaccacaaaatcagcacaaaactaaccaccaactgagacagcaacaaaccgagatctagcggaatcgggctcgccgagcccgagccagtggcgcaccttgatctccaacctgagcggctgcaggaagcacaagcagaaaacaacatttgatcagatctctccccaaaccacacccaattacttcccaacacacacaaaaaaaaaaaacgggcgagcggattgatcggaacagcgagagcgcgctggccaaagttcagatccgcgtacgtaccatggtggcggcaacggcgtgggcagagcgggggagccgggccgcgcggggggggctaaaccctagagatccgccgcggcaacggcggcgcggcgacgcggaggcggaggcggaggcgaagcgaatccgatcgcgagctcggcgggggagcgacgaggagggtgggaggaaggaaaggactaaactaaacaccaagatgaggagggggttttgtgcgtaattttatttatttttgttattactccatttcaaattagcccctgagaattattaattaagtccctttttgcaaaaaggttaacgtacgggtacgattaccaacttttgggccccagctgttgggccgcgatgtgggcccacgtgaactaaggcctggcccatattatattctttttcctcttttcttttattgtttttgcgacttaaaaccctctccttgttcttcccaacttcgcaagacgcgattcaatggtggacgagattggagcggcaaagaaggggtgaagaggtgaatcgcccctctcttttctgtaagaatcttggtgtccttgatttggttctgtgcgtgttcggagtggattttaaccagagtttcttccgtgttgaattgttctgaacagtgagttcttggtcaggttcgtagtcagtatgcctgaatcgagctcagatcctaacaacgggagaggaaagtcatccaagaggaatctcccttcttggatgggttcgaaagacggggaggaaaatccaggcaagaagaagcacatggccacccacgagaaggtgcagaaaggatcggatttctccaaacttttggtacttattatctaaaccctctggcggtctaatcacaactgaaccgaatatatgttgttcttgatgtatgtatgtatggctgaggcgattccatgtgtttgttttgggcaggatggggtggtctttgtactttcagggtttgtgaaccctgaaagaggcacattgcgctcccaagcattggatatgggagccgagtatcgacccgattggacatcagattgcacacttctcgtttgtgcatttgccaatacccccaagtttcgacaagtcgaatcgaacaatggaaccattgtctcgaaggtggatccttattttagccgttcttgttagctttctttaatatagttatataatttatatcagaaggacactgatatttcacttatcctaaaaactagaattactatgcatgctaccatatatactaatacagtgcacgacagagttgacagaatattacctttattttcattgattctttactgcagcaaaaagttcttcctacttgatgccatgagttctagattgatgcacttttaacttctgaatagttaaccactgctctgcaatatgaccaactgaccaaaattccatttagaaattagaatgccaagaaagaacacaaagtcacatacagatcatgttaacttgcatcttccatcgcaatagttccattgcctccacctggtctttcagtctgaaacataggattgcaaataggaatatagtatattcttttttgtacactgtggcgccttgggtactagcttgtactgttttgtttctgttcaagagaagccatgtgccattaaaagccagtctgttcagcaatgccacgtataaagattgcagatgttcttccttgtctctgagcaagtaatttgtatcgccttgtccatgttatgcctaaaaatgttaaatgtaaatctctcggcaagttggcaacattaaatacatatcaggaaatcatgctattttatacattggcaatttggtaaacttaaaagattgacctagcatatcgacagaaatcgtaatttaccttgtaataccatgcgctggcagccatcaattaagttgaatttaggattgcttagagaatcacaattgctctctttccttgtttcaggactggatcttagaatctcacagccaaagaaaacttgttgatattgagccttaccttatgcatgttggaaaaccgtggagaaaaaataaagagctagttgaatctgacgaaggtgataactgagtgtcccttatgtttgatgtttatttcatttaggtggtccgttttgcttcacgaaaatctttggagtaacatgaaaactttaaatctttggaatttttctttggtctatggagttaatgatcattttattaatttatcacttattattattaggctgtggtgtccttaatatatgtcttatttctaagttcttatgcttatgggtccttttgaaattcagtgatatgtgctaactgcatgcctatattgtgttgtttatgataataattcaataagaaaaaaactactatccttcatgttactaatgttttggccatttccatgacaaatatattctaaaataaagctaagcatccatcatatttcctctccaagttgaaagaatctaggtttaggacatgttgtagctgcaacatttttttctcgaacgtgcaggagagctgcgcatcattatgttaagaagaagggaaagagtggaaaaggacaaattttagtacaaaaaagggcttgccaaagaaatagaaaagtactacgacattctatggccaaatactactaaggcctttggctcctgtcatacaacataacttggcctcatctctaatatcctacatgatgacattggagactcatagtaattcagggatactcatttattagacatagctttataccgagatgagcgggccagcttctttccctcaatgaagcactgactgatgcctataaactaacttgtgaaagttgagtaatagtggaagctttggagtacttgaatattctatttgtcacgcaacttgaatttgaagtagttaacaaatgtataagctatagttttctaactatgttttgatcttctgttgtagatcagaagaagccacataaagagcatcagaagcaagttgatcgatctcatatcaagacatctccctctgcaggcatagaggtatgttgaaaataaactagtgatatagccacaaggagcgcatatgatttgaatttatgcttggtaactattagctggctgcttgaacagttggacttattcacagtaaactgtataattagatattgactagctggtaaatcaaacatatttccagccaaaacctgaatacttcaattatgtgatgtctttagatgtgcttaatgctagggaagtcgtttgttaattttttagaactatcaacttctgttaaaaaaacatatttctgaaaaaaaatctgtcaacacttcgtttcgacaggaagtcatgtccaatatttttgcctacagactcttctctcaccaaacgtccatgtttttgctctgtttttttaccttgttaaggtggcctaaatcagagaaatggttctagatagaataagatgaatgcagcatgtgttcctgggagcatatcaacatgctcttcttttgtaacaatgaataccttcttcttcttctttttcatgtcttctttctccaacagctaataataatttctttatttacaggcaaaacattcagatgttactagtaagcaattttctccaacaaaaataaaacaatgggcaaagaatgatttagcacagacaatatcatggttagagagccaagaagagaaggtgagcattttatagggttaaaaagtttggtgaaagttgagttacatttttactgctaagttcaggttatatgttccctgaagtaattcaacaagcactgacatatgccctcaggccgtcatgagatcatctgcacttctaatcaatgtccaatgattttctagagagagagaaaacatgtatctgtttggcatttctttgttgttttaggtggtgtgaatggaaattactccagattaagactgttaaggtggactcataaaaatcaaatgtgtattgtgtgtgatgacaaaacgacagcaaataatcttgctatcagttgacaaatgctagtttgtagagcatatctggtagttttttttagtagtttctctgcctttcttagccctctttacagccagagttattcttgattttctatctgactttctttcttcttttctgaagccagaaccaaatgagttgaaggcaatagctgctgaaggggttatcacttgtttgcaagatgccatagaatctctcaagcaagggaatgtaagaatgcaatatccttccttatttaaagggaactgtttgctttatctattactaataaacaaaaactctgatatatccaagtgatctgtggactgagccgctaactttcaataatctaaaatgattgaattccttgttaggagatgccaaaatcttaatctgagtcaaattgtcattataatctagttattcttccattgtgatccttaagagaactcaattcagataatcaacaccaatgtaccaaacataatgttcctttcacacttgttgttactatcagttgaccatggtcaaccttgtatttaggatgtcaagggagtggcggagcagtggagctttgtcccccatgtcatcaatgaactggcggaacttgatggaagaagaaaagagggatcgttatcgaaagaacaactctcccagctagcaatcaaatgcaaaaagatttatcaggctgagtttgcccacatgcatgataatgacaagaagcatcagagcaagcctagatcagatgatgctcagtatgacagtgatgacaccatcgaaatgacggaagaagagattgatctcgcatgcaggcaactccctggggtatgcgggaggcagtagttttaggtccgttcttcagaagatgcagtaagaatactgaatatccatctttcccaatggtgtatgtgtctgggatctggatagctgcatgtgtaaactgaacaaaatatggttaatctagatcaaaattgcaccatttcctttgaaacttatgtcatgatatccattcttcaaaacagtttgcacctataccttcttgaataatttgctttcttagagtgggatcttaatctgaaattgagcaggagtttacaagatcaaattgccagatactgctcccttctgtccaaaaatttatgttccatttaggcctgctatagtaaagaaggtgaactgttgtggactcagtttgggctaaataaggtagtaggctgaattgggtaaggttgaataagtcaagtccacaaggctcaaacataaggttcacggtctagactggttactggaggttacccggactaaaatgaatcaatcagtggatctagtgtgttaatgcatcatgatcgtgatcattatcatcaaaagttcttaaaactagcatgtcgaaccgaaaacatcttctccgtagagacttctaagaacaagcagtccaatgggaggaagcacacttcgtccaacagtggtgggagaacacagcaaacacgcccggccttccgaagaagggacttagatccctcattctgttagttgtctgggagatctggaaagaaaaaaatcggaggatctttgaccataaagagatggcaacgagcttccttctaacgaaaatcaaagaagaggccagcctctaagctttggcaggggcaaagcggttacgtgagttcgtcccgcactctgtatagtgtataaaatacgtggaactctttttctttttacccctaggggttgtattttcttctgctctgtatagaatacatggaacttcttttctttttacccctagggattgtattttcttttgctctattcaatgaaaaggcactcttatgttgttttccgttaaaaaaaaagaacaagcaggagaccttttctttattattgtaagtcaaagtttattagtaggctagaaaaagaactaaataatagggactaacatgaaataatgctccctctattttatactataaattgtgttaaacaattattttaggtttgattaaatttatagaaaaaataataacatttaaaacatcaaattaatttgatcaaatcaaaccttgaatctattttaataatatatttatttcgtaattgtattatatttttattataaatttagccaaacttaaaagaagattaaataagaagaaattcaagacaactcataatacgatgaaacggggggagtacatcatgtacatgcacatatgatgtccacaaaatggagacctaattaagcctgggaagctctatatgctgcttcttccgcaccgccggcgatcgagctgctaatctcgagctgccggagaccgtcctcgagcagctcgcgcacatcactaagctcctcgtcgccgtacaaggcccggatatccctcaccagcaagtccaccgccggcgacatcatgtctcgccggcacatcgggcagctcatccccttcctccccacccgcgcccacctcgccacgcaccgcgcgtggaaccggtgcccgcacgccgtctccttccactcctcgccgccgccgttgttcaggcatatcgggcagtcgccgccgtcgccgccgccggccggcgcatccaccgtcttcatcatcgccatcatcagcccggatacattgtcgtcgtcgtcgttgacggccgccgccgccgccgccggcggatcatgtgactgaaggtccgcgaagctgtaggaacgggcctggtctagcaactcggcgatcgccgtcatgtcgccgtcgagcgactcggtgatcgccgtcatgtcgccgtcgagcaactcggtgatcgccgtcatgtcgcggaggtaagcttctccgtcgtccatggcaaacgacgacgacgacgacgacgccatgatcgatcaaatgatgagcacgtacgcactctgctccacgtacgcctccctatttatcgacaaggtgtgcagtccgtgtcagtgcaggacgcgtaattaagtagccatttgagtcggattcggagcacggatatacgtatataatgtacgtttttttttctcttttgagaattataaagttttacacatgtacaaatttgtcagattttcatatatatacaaattaaggcatggttaattagctttctctcgtcctcttccatatcgttgctgatatgtctagttaattagcatggcatgccgacgtggcagttgagcgtgccggcgaacttggtgagctggccgacgtacttgccgtgcttggcagggatgaagtcgagctggtcgtagctgcgctcgttctggccgccggactcgttaaagaaggcgccgttcatcatcacgtcgccctgcgacttccacacccactccttgtactcgtcgtacggcgtgtactccctcttggtcacctccttggcgttcaagtcgtcgggcgcgatgaacctgttcccctggctgatgatcgtcgggttcatgttgccaccgatggcgtacatgagccagtgcgtgtagtcgttgttgacgacgtggaagaatccgaacctattcacagaggtagggtttacgtgcgtgcattcataggagtgagtatgcgtgcgttgtactgtgtaattctttaaaataaaaagaagaatccgaacctgcagcgcggcacaaggcccttgccgaagtggttgaacgccacggtgatctgcatcacctcgtcctgggcgtcgctgttgctggcgccgaagagcatgacgtggtcgtgcttggtgaagtggccgttggagatggtgatggcggtggagccgctgacggcgtcgatgaggccgtcggagcagttggacatggagacgtggtcgatccagatgttggaggaggacatgatggagatgccgtcgccgtcgctgcgcgtgcggaggccgtagtggcgcttggagtcgcggatcatgccgccgccgtgcggcaccgagtggtggatgtggacgttgtggatgatcacatgctggacgccctggagcgtgatctgggcgccggtgatgtgcacctgcgcgccacggccgtcgatggtcttgttgtggttcacgatcagctcctgccggagctggatgatcatgtcgcgcgcgaacacgatccacatcggccggtcctggatcacgccgtaccggagcgtccctttcctcgggatgaccatctcgtcgtcgctggcgtcggtcaccacgtagatcttgccagcggcgccgccgacggtcctgtggccgaacccacggacgcaccgcgccagccgcttccggtcggtggcccagtcgtcgcggcagcgccagcagcggtcgatggggttggtcgccatgcacgggccggtgtacctggccagcgagcggcgcgtggtggcgcggagcacgtcggcgttgaagcggttcagggtggcgacggggtcgctcacgtaggcggcgcggttgaacgagcgggcctcctcggcgcgcttctcccagtactcctcgtcggcggtggcgttgtgcgccgtgtgcgccgacgccgcggtgaccacggtggcgacgacagtgaggaggtagaagagaatgcagaggcggcggctccccgtgacggaggaggctgccattattgtgctgtgatgtgatgtcgtatatatatccatatgtatcaatgtatgcctttatttgtggtggtccggctcgccggctgacgacgcacgcgtcaccgcggggaaggtctcagggaagtgcgtaatttcgtgagacctcccagccgggtgacggacgccgtacgtgcggacgatggcaccaccggccggcggcgaggcgaggagcggtgcagcgctatatatatcacggcttggggtatgcatgcatgctgttgctgcctgctgggcgctgtgctcagaatggactctcacagcgacaagggaggcgaaccgtacgttgtgggcgttttagttattgcaccgaaaatatgcatgtgcagttgtaacggataaaaacgtttttttttataatataaccgctaataggaactgagcagcgaattcactatgcattatactagtatggtgtcccgtgcagattgcgcgctagcatcattatatttttttctcatataatagcatatatgttttctcaatgtatttttcaaatatattaaaatgacaacataattttcaattttgtactaactttacgaaactactaatgtgtaatattcatattgtattttatatacatgttagttattaattatttttaatatcaaattttagttatttgtaaattatattcctatatatggaatctagactcgtctttccatatttatttttttaattcctaattttcgttatctgtaaactgtatttttatatagactctaggctcttcttccaatattatttatttttaattctaaatttttattatttttaattgtatttctatgtggactctaaacacatctttcaatattctttaatttttaatttcgaatttcagttacttctaaattatattccaatattgactttagactctttttcccatattttttaatttagaattttagttatttgtaaattgtatatttatacaaactctaaactctacttttaattttattatgtttattctgaattttagttagttttaaattcctatatggactctatactctacttctaatattccttatttttaattccaaatttctattatttcttaattgtatttctatatggactctatactcttcttctaatatttttttattttgaatttcgaatttaagttatttataaattgtatttctatatggactctagtctcctcttccaatattctttatatttttaattctgaatttcaactatttctaaattgtatttcaatatggattctgtttttttctccgattaatatgagaatttctaggtcgtgagagcgaacacagaggctcctttttctattcttttaataagttaatagatagtttgaaaaggttaatgaaaattggtccttggttttgggccgcctattctttccttctttttagtctcaacccagtctgttgcctccctctgttcaaactgtctctcttcgatccagcccagcctagtagagctacagacccagttcgtatagcccaccgccgtcttcaaccttcggctatggatgccgatgcaacctggaatggctaaatcacaactagtcgtcagcacctccccgcaagactgaacaggtggcgcgcgtggagaggggggcagcgaacgacgcgcgcggtagagtcgtgcgcaccccccgcaagactgaacatgaggtctcttaaggagtcgtatgcgataatgaaggttgatttttgcagatgtcgccagttacggtacgtttgcaacccatagggggctctcgtaaaaaaaaatcgttttttcagtagtggatactttttaatgtttgatatttacataaactttatgagtcttaaactaattactataaaaaatcccaagttccaaataatctctagattgtattacacgtgccccaggtaaaaaaaacacaagtatatactactgtactatatatatatttggagcaaattaactacttataaaatggataggaatcagagggacctggcataatactagtaataaaatagataggaatcagcgggcgtgagttgtggcttaattagtgagtaaaatagatagataccatgtataattgtatatacatcaatacattgcatttctttgttgccgttactgcttatatatagtggtaaattctcactcgcgtccaaccattgacatgtatcttccgtagtcagaagaatattatatcaaagccatggagcctacaagcacagcagctgtgacgcctgtcctcctggtcagacttgctgtgctgcttgtggtgtttactactggagcaagggctttggttcacaaaaccatagaggtataatataattttttttgcggaatttttatttcatgtcgaatcgagaatcgaccagtgggtttaaatatttttgtgtcgatatatatgttcttctgagaaatgtgtatattgagttgatcgatgtaaatgtgcacaatccaacatgcgctttttcctttctctactgtataaaagaaggttgtgcggaagtatacaacttttcaaatttagattttatgatattattcatctgagattttctgcgtgcaatttatgagtatgtttgactagcctgttttgaattcatatttggtctgctggtgtgtgtgtgtgtgtgtttttcttccccaaaatcagagcgacgatggcgatgtgattgactgcgtggacatcaacgagcggccggcactgaatcatcttcctgatcatgaccgccaaaaagttcaggtctccccttactctaaaaacgaaaagaaaatattgatctttctttactcatgatcaagacatgaaaagatataataaaatccatgctattaattaattttcttgtcctagataatgaagccagggcgaagcatcaagagcttcaccagacatggcggaagcgagggagctgcccggccggaacagttccgatccggcggccgtcggcgagctcgctcgccgtgccttctccttcggccatccacactacaaaccatccatctccaacgatggatggtccggctcatcaggcacattagaggtaattaattaatataaaaatatttttattaggagttgccaaaaataatacttcatccctctcatatcataagtcgttttgactttggtcaaagtcaaactacttcaaatttaactacattttatagataaatgtttataatgccaaattagttttattaaatcaataattaaatatattttcataataaatctgtcttgcattgaaaatgttactattttttttctataaatttagttaaacttaaaatagtttaattttaaccaaagtcaaaatgatttataacctaaaacgaatgagtagtaattaaggttgtcattatgtccattatccaatttatccacacccagctagctgtcacaaatatgatttgccatttttatgattttcggttttgattaaattacagcgcaaattaagttcgttaattgatttttttagaattaattgattgattaattatgtacaggtggctggtgcttacggcagaaatgggccgtaccatggtgctcgggcagatgtaccaaactggaaggtagacgtgcagcctcgcgagttctccatgaactacatcatggtcggctacacgctcgacaaggattacaggccttatccaagttctgatccaccaaaaactcttgccaaccagattgtggttggactcgtggtaattaccatatttttttctgtaatgaaaatcaaaaggcacacgaccaatatgttctaaatgttttaaaaaaaagttaggggaaaaaaatccaaaccatctcctttctaaatgttaagtatcacatagatttataacggaagcctataacgactactacctataattgcaaacataatattagaatattaatgtatatatgttctctgtggatatatatatttgttcgtatatatgtcactgaatgcgggcctggccagctttatatggggactctttatcaagattgttcatatattacaccgtaagtgacgactcttcatcagcgcggctgatgatcgatatatactatagctaatacatggggattaaggtgggctgagatagattaataattaactaattgactgatgatatatgtgcagaacgacagtggagctcagaccaactgtttcaacctggactgcgatggtttccatcttcagaacagctccttcgctctgggctcctcctggagcgactcactgtcgcagcatggaggcgaaagatacggcgtgacgcttagcatccacagagtaagtcaaataaatttggtgctcctgtcttctaccgtatccgttttaaaataagttcatttttcgctcatctcacacgtactaatataaacatcaaaagattatatgcatctacttcatctaaatctcgatacaactattactcactttatctactctcaacacgattactccctactttcacaaactctatcccatttcaaaataagtttatttttcgctaatctcacacgtaccaatataaacatcaaaagactctaatacgcctaaaatttttaaaaatttcagatcaaccaatggttgttaccactcttctacttaaaaacagagtctcttctttaaatggttgaacgattaattattataacatgtaaaaaatataaaaattacacaaagtaaacttatatactccctccattccataatataagggattnngagnnnncgctngcnncgnnngactactcgtcttattcaaaattttttgaaattattatttattttatttatgacttactttattatctacagtactttaagcgcaacttttcattttttatatttgcaaaaaaaatttgaataagacgagtggtcaaacgttgcaagcaaaaactcaaaatccctaatcctgtgggacggagggagtagctcataaaaatttcaaatacttacataaaagtagttggtactctgctccggtctttcctcgattcacacgcgagtgaaacagcagccaagaaaagtgctcatggtaggagccacgcataccagcgcgagcacaaggggccgatgtcacggcgtcgtcatcaccgtgcgatccagaagctcaagacatccaaatcaggcgatccactcaggcgaggaggcccacaagtaaattccctcatagtgagtggacccggtgatgtttgccgggccacgggtcagagagtgagatctaatagctcattgctatataagatcggcagggtcgagagaaaagggacatgaaagaaattgtacaaactattccccaatatttcaaactctcctctgcttccttctccttcttcttcctctagctctgctcttcttcttcctcacgaaacttctatccgctgacttcttcgctacttgagtaaatcgaatcggagagaagtgagttcgtgacaatttggtattagagcactcatcctggagaaaccacgctacacctctaggttgcagctgcatgtggaggccatggagaagcagaacaacgacttcggaaaagttttggccgagatccaggagtcgctggtgtcgttgaacaacaagcaagcggagactcaagctgtggtggcgaagctggatgcaggagtcaacggatggcgtccgcaagtggaatcggcgatccatgatttgcgcgcggaagtaggagatcttcgtcagcagctggacctcgtcggcaaaatgaatcaagcttcctcttcagcgctttccccttgagttccgtcgacggacgaggaaaggaaggcgccgttgctgcccactccgcccccaacatctcaaccagcggcggcagaggaaaggaaggcgccgttgctgcctaccccgccaccaacatctcaacctgtgatggcgaagggcagaagcaaatgggccaatggccaccactctgcaacacaactccggggaagggttcctggtgtacatctgacccagaaccttgccccgggcaagggtacgttcgattccaatctcacgcataaggggaatttcaattttgcgcataaatttgagggtgctagttggggatcagaggaatttgattttgaacagggggaacgttagtatagtcattgagttcctaaattagattttccaaaatttgatggttctgatccccaggattggcgcatgaagtgtgagcattatttcgatgtgaataatacttttccagggttgtgggtgagagtttcagtcatctacttcatgggtagggcagcctcttggttgaaatcgtctagagcccatttgcgttttccagtttgggaagatttttgtgctgttgtttctgaaaagtttgatagggatcggcatgaggccttgattagacaaatggatagcattaagcaaaccagcactgtctaggagttttatgagcgttttgatgaattgatgaatcaattgatggtttatgatccggttgttagcaccaagtacttaacccataggtttacagagggtttaaaaagggaaattagaaatgttgttctgcttcagcgtccacaaaatctcgaatctgcgttggctgttgcttgtttacaggaagaagtcttggagacagctgatggcaattcaggaaattcaggaaaggagcagaagaaaattgaagggggaatactgcatcgacccaatacagctttcaagggtgcttatccattacctgctccacctgtacgttctggaggttctggggtgaagtttgaggacaagagggagactgaaatcaaaagaggaactaattctgttgataagattggtgcacttaaggctcagcgttgcgctcagggtctttgttacatttgtgccgagaaatggtcacctacccataagtgtgccaacagagttcaacttcatgctgtgcaggagcttttcacagtgctgtttgaatctgaagaagataccggttcagttcttgacacagctgcagaacaacagataatggcaatttctgtacatgctatgcagggctctgagcatcgtggatccatgagaatgctgggacaaattcaaggcaaggatattttgattcttgtggattcgggtagtacggctagttttatcagtaagaaggtggcagctggcctagttggggtatggtggctacctaccaaggtgcaagtgaaagtggccgatggagcattattgcactgtcagtctgtgattcaggattgtgaatgggttagccaagggcatatgttttgtactgaatttaaggtgttggctctcggaaattatgatgtgatcttgggaatggactggttgatgcagcacagccctatgacagttgattggtccacaaggactttgatggtgaacaaagatggacaacagatcttattgcagggaatagtttctgacactgaacagtgtactcttatttctgcttgttagctgaaagagttggataagaagatggcagtggcaaatcttgttcagttttgctttattactgaagatgttcagactgaagttatacctgcggctgtacaaaagttgttaactgacaatgtttccctctttgatgagcctgagggcttgccaccacagcgcccatttgatcacacaataccgttgattcctggagccatgccggttaatgtcagaccttatcggtacactccctcacaaaaagatgagatcgaaagccaagttcaggaaatgctatctaaaggtataattcaacctagctctagtcctttctcatctccggtgttattggttaaaaagaaagatggttcgtggagattttgtgtggattatcgccatttgaatgctatcacagtcaagaacaagtatccattaccaataatagatgagttacttgatgagttagcaggggctcaatggtttaccaagcttgacctacgtgccgggtatcatcaaatcggaatgcatatagaggatgaacataaaactgcctttcaaacccaccatggtcactttgagtttcgagtgattccttttggtttgacaagcgctcctgccacatttcagagtgtgatgaataatattctatctacattgctcaggaagtgtgtgcttgtctttgtggatgacatactcatatacagtcgaactatggaggaacatttgatccatctacagactgtgtttcagatcttacataaacatcagcttaaagtcaaaaagagcaaatgttcttttgctcaacaaaagctggcttacttgggacatattatcagtcctaatggtgtctccacagattctgacaagattgttgttgttcagtcttggccggttccatcttctgtcaaggagttaagaagttttttgggtttggcaggttattaccgcaagtttgtgcttaattatggaattctgagtaaaccattaacttctttgttaaagaagggacaactttatctatggacatcagccacagatcaggcctttcaggctatcaagcatgcattagtgactgctcctgtcttagcaatgcccgatttcagtattccttttgtggtagagactgatgcttctgacaaagggatgggtgctgtacttatgcaaaacaatcacccaattacattcttaagcaaagccttggggccacgacatttgggattatccacctatgggaaaaagagtcttgcaattatgatggctgtcgatcattggcgcccttatttacaacatgctgagtttttcattaagacagaccaccgcagcttggctttcttagataatcagcgtctcaccacaccctggcaacacaaagcactcacgaaacttttgggattgtggtatcaaatcatctacaagaaaggtagtgacaatcgagttgccgatgcgttgtcccgttatcctcttgggcaacaagttgaactgttagctttatcagtggctttaccggcctggatacaggaagtggttgatggttatcagcaggatactgatgcttgttgtaaaattcagaccctgtgtatcaattctggagcggtgcccgatttttctctcaaggatggggtactgtattataagaatcgcatatggattggcaataacacttctctatagcacaaaattcttgccaatttacactcctcggcagtgggtggccattccagtattcaagtaacttaccagcgcgttcaacatctgtttgcttggcctcgacttcgtgcttccattactcaatatattcagtcctgcacagtttgtcaacaagccaagcctaaacatgttaaataccctagtatgctccaaccactccctgttcctgcacatgcatggcagattgtgtctctagatttcattgagggacttcccaggtctgccactttcaattgcatccttgttgtggttgacaaattttccaaatacagccattttgttcccttgagtcatcctttcacggctttggatgtggctgaagcttacatgcaacatattcaccgacttcatggattacctcagtcgctcatctctgatcatgatcgtatctttacaagcacattgtggactactctctttcgtttggctggcacacaattgcgtatgagttcttatcacccgcaaacggatggacaaacggagcatgtcaatcaatgtcttcaaacctatcttcattgctttgttcacgcttgtccttctcaatggagtcggtggctcgctctggctgagtattggtacaatacatcattccattctgctttgggtactacaccatttgaggtattgtatgggcacgagcctcgctattttggtctgtctgctacatctgcctgtcagtcggaggatctgttggactggttacatgaacgggagcagatgcaatctttaatccgcagccatttgttacgcgctcagaccagaatgaaatcacaagaggacaagtgtcgctctgagcgctcttttgctgttggcgactgggtttatctgaaacttcaaccgtttgtccaacaatcagtggtcacccgcgctaattgcaagttatctttcaggttttatggtccgtttcaggtgttggatcgtgtgggcgaagtggcgtacaaactggctcttcctgctaccagtttgatccatccagttatacatgtctctcaactcaagaaggcattggcccctggtgaacaagttcatgcgcctctgcctgtgcttcgtccgacgatagctgatccgccccaacctattcatgtgctggagcgtcatttcattcgcaaaggtgccaagatggtggaacaagtcctggtgcagtggtcgggtgatgatgctgccatttgtacctgggagaatcctcatgagcttcgccgtcgttttccatctgcagaagcttggggacaagcttcagctcaaggggggaagaatgtcacggcgtcgtcatcaccgtgcgatccagaagctcaagacatccaaatcaggcgatccactcgggcgaggaggcccacaagtaaattccctcagagtgagtgcacccggtgatgtttgccgggccacgggtcagagagtgagatctaatagctcattgctatataagatcggcagggtcgagagaaaagggacatgaaagaagttgtacaaactattccccaatatttcaaactctccccttcttccttctccttcttcttcctctagctctgctcttcttcttcctcacgaaacttctatccgctgatttcttcgctacttgagtaaatcgaatcggagagaagtgagttcatgacagccgagctagcctgcgcacgactgcgtcgtcggtgtgccgacggggtctgctgcgcccgtcccgcaaaattccagcgttttcattgggagaggcgaaaaccggaataaccttagagtgtgtttaatccctttcaaacttccaatttttctgtcacatagttcaaattacaattttagacttacggcatcgtcggttactcatatattccctaataaaccaaaacaacttattagagaataaaaaaataatttataagtaaaacttttatatatgtgtttttagtgatttaaaagttaatataaaaaaactacgttgaatatatcttaagattaacttcaaaatttagtttgaaagtttattttttttgttttggctttaatttgtaattccatatatactacaaatgcatgcaggatgacaccaagttggtgtggtgggtggcggtgatggatcaggagattggctactacacggacgacgcgttcgacacggggttcccagaggggtcgtatgtggagatgggggggagggtggtggacacgagggccggggggaaccacacgacgacgcgcgccgatgggcagcggcattgccggcgtgcggcggcgctcgcttcgccgccaccatcatgaagtacctcgggatcagcgccgtcgggcagctcttccaggactcggtggatcggaccgtcgtcaccacgcctggctgctacggtgcccagccgctgggcttcggcgccgacaagccagggtacaacgtcgcctatggaggtcctggagggctctactgcgacataccttaattactactctacaaacccaaattaccaaattacctactattgtaggggcgaaccaaaagaagatttgtcccatgaagagttggatcgatcttgtatgaatctatgaaagtataaagttatatcccactctaaagcttaacatacaaccatgccatattatcacccactagcaataattgcacatttaacctcatgcaagcatgcaacatcatctacaatttatttaattctgcaaatcaacatgcaaacatatccaatcatcatccttcacatcatttacacaatattttaacaaatttatctatcatttttataatatttaacatatacttatcaatatctttcacatcaaaacatggatatcatttgtttgtttcatggtaaatactgataaaaccctgatgtttcatattttttttcctttttactccttacttgattgttgaaaaaaatatattgagaattgctcagtatttcccacggcaaatcgctgtgtagactaatgttcatcctaatggatctcaaatcctatcttcctatataattggtagccactaagaggcatttacttctataaaacaaggcatgtaagaagctacatcatcaataattttaagtcattggatcgcattagtaaagagttatcagccattggatccacatccatctaatataatcattgattactcattcagtcacctctttttaactcatgatcatgcatgacattgttatccattctgcacataatactatgttttttttcctccaagtcctaaaagataatgcaaacttaactcattttttcaaatacaaattaaattatttcataaggtgtaagttttgttttttataaacaattggataacatacagtaacccaaacctattttcaaaacaaggttgagataaagcaaagaggtgcagactacctaaatatgacgatattcagattgtgcatgaaaataactctcatatatcacaagaatacacaatgacgtttaaaaaaaataaaacatgaattatattataatagcagaggctatatatgaagtcacattatcatatatatatatatatatatatatatatatatatatatatatatatatatatatatatatatatatatatatatatatatatatatagagagagagagagagagagtgtgtgtgttatatgtaattattttaaaacatttattttatattttatttgacgataaaactagcaaatcccgcggtaaggcgcggggtgccaactagttaattcagatatcgggccatacatggcccctagtacctactattggttggactttttctttttcaaaaataaatataagctattcttgcattattaagtcgaaaagttatgttgtactttcttttcgcacgtgtagactagagctaggactctaagccatcggtttacaagctacaaacaccgaaaattcaccttaacagcctaaacctaaacaaatgatgccataaaatttggtagtaaacattgtgctagatctttttgaaccattggatcgaaaggtccatatatattgcatccacatcatgtatccactggcctctcccactgacctagacgtcatctgccattattccccaccccacgtgccgccgcacacttttgctcagggcagtagcagtgcaactgtgcaagccatgtactatttgttagatttaggctgtgtttagttgttagaattggggagaaatttaaggaaatttggtagtttaaaaaaaagttgagagtttatgtgtgtaggaaatttttggatgtgctaacccaaccatatattgcagaccaagaacaacaactctgttaaatcttggaggtacgatgcagagtaagtaaaaagagaaaaaaataaataagatgttgggataaattcccaacttccactaataaaagattaactgaaataaacccttctaataaaatcacataggttttagcacaaaattcaggaggtagtactatgttacccaaactataataaaagacaatccaggggtaaggattagtgtttatggatcagtacagtttagaaaaaaaacacattattattggttgccgtatgtagaaaagttccttaattttccaatatatacacacgtagggagagtatccaaatctctcctcagttcactgctagtgatattgtgatactcctacatcactgctctgctcttcctccctcaaaagctcaaaggcagctaggatgcgtggtgttaatcttgcagctcttcttgtcatcttcctaggggtgctttccgcggcggccacgacggcggcgggtcgtctccccggcgtcgcgacgaccccaacgccggctgcttcgctccccatcaacagggagccgcgcggcttgcaccacgcgccttcgccggcccctgccaagatgacgacgacgcagccgccggcttctgcttcgccggcccctgccaagatgacgacgacgcagccaccggcttcggcttcgctgcctatcaacagagagccgcgtgacttccacgtcgccgccgcgacggccggcagcggcagcatcagcaaagcggcgttgcttcttctgccggtgatggtagctctgtgatgtaagctaggcacatgcatgttgtatttcctcctcccctataatctcttcgatcggtagaatccggccggcgagcgggagaagaagggtcctactcacctcgtactcgtagttgctatctagcttagcttcagttgttggatcactggatgatgttgtatttcatcgatagtacgttggattgatctgttgtttaatcattgcctgtattctttatctcgatccttctttcttcttaactgatcagaatatgactagctgttgtgtgaagaatgtattcttgatcttggtcttaatttcttttttcttgactatcagacaatctacaattctttatctaaaaaatcagacaatggctagctcttgtgtgaagaatgtgtgttactattccgtcaagtgctgatcgatttggtttctacctgagagtttagtgtgaatgtgtttcgatcgggtcagtttaatatggccttgtgcttaatttctctgagcacccagtagataaaagccaggccttaatttcaaggtcttaattaatttggtctttaaaaaataatcaaggattcatgttgatcaaataatcctagttaattcaaccctgctagtagcttttgatctaacatagtaattaatgtaatgtttcctgttaaataaagctaagctgtagtcttgttaattttgatctatcgcacatatatgttgttggttaattgcaagcattgcctaagctacaaggattatttatatcagtgcatagtcatcatctcactttatttaatgcacgcgagaagctgagagtaggacatcaatgtgcacacctagtaatcactagagtatacagtatatcatcaactcttgcagaaggaacatgcaggaaatctggggagcaaatcggttggaggattgatgagttcaatcaacttcaatggagcaacaggcaggtagtagtatcaattcttgcagaagaaacgggagattctgggaagcaaatccatcgtattgatgggtgtggagagaagatatacacgcaactatgtatagtatgcactgtacaattaatagtgatgaggtagagaagttaaggtagtagaccttgttgaaagcaaacaaaggcaaatgctgacaagaaggccatatttttgcctgcagaatgtactgtacaatttttcacagagtacaatgatgtgttctgagaagggaaaaaaaagagtgcatttgcgtattcttaattcttgatcttctctatcttctctttttctcaccgacaatcttctcttcgtccctttccagtggtcccatagaagtatagaagtaggaataataagtagtactactgctccgctacagtataagagcaaggataataatacagccagctacttacttatatactatctatgtatttatatagtggttaactcttcactacaaatatatggtccacatgtctgtctcacaattttcttggttcctgtgactaagcaggctgtaaacttacagcccgcttctcatctctctcctctcttcttccatccacctcagcatttaagcttcttatagctcactattatatttgctctaagcaaacaagacgctactcccagtccatagcgttgaattcaaagctgtccctgtgaagtgctgcagaacttccaacttcagtgaagtgatgcagaacagaaaagatgtgatggagtacaacggagtccctgtgatcattacagtatcttacatcgaattcaaaggaagatctacctacataaatttactcgacagttactctctccaggcttttaaaggagtagttaaaaagatgcagaaattaaaaaacataggaataaaataaaattacatgtgaaaaaaatataatattaaaaagcacataagaaaataggacacacatcttttgaaatataggaataggatgaaacacaagatcattactatttgtgtataaaatatttttttttgcttgatgagtgttaaatttataataatttgaaatcacatgcctcgatttgtcttagacttctcaagataaaatgaaaataaaaaatacaaataattttcaaattctcctatgtacttttcttccaatccaaatgagtgattagtaatcgaatccattattttttctctctctaaaattcctgcaataaagaagccctcaatcgttcattgatactcctaatacaatctcaaattaaaactttcacccatatacttttttatattatatgttttctttatttcgttagttaaaagttgtacaatatactcctagagtcacttatattatgcttttgcaataatccagagtacgaacaatttattatttagaaaatagtaatcgttcgctgatactaataccatcttgtgttaaaacttaatttcacccatatattaattcaaatgatatatgtacagtggttgacaggtttgttagatgctttcttgttcatcgatacgacacaaagatggccaagcttggtggatcattatacttcgttcgttagcttctgggctgcttctccgcgtgcgcaggggtgttcaaagattcctggctgagggtttaattggctgtacttatgtgttttgcaaattggttatggtctttatgaatacgacaatggccgtgtttagttcgtgtgctaaaatctttttaagtatatacgggcacacatttgaagtattaaatatagactaataacaaaacaaattacagattcatccgtaaactgcgagacgaatttattaagcctaattaatccgtcataattagcaaatgtttattgtagcatcacattgtcaaaatcatgatgtaattaggcttaaaagattcgtctcgcaatttacatgtaaactgtacaattaattttttccccacatttaatgctctatgcatgtgtctaaacatttgatgtgacggaatttttagaagtttgaagggaactaaacattgccctaggttcgatccttccaggttgcacaatcagcctaaatgcatgcttagggagaaaattatttttccaatccatgaacagttatacattaacattatccctcaaatattgaacaaatgtttgtggttgtagataacggaattttttttttgaaaagatacaattctttaatcggtttataggaaattaggaatacatacgtttgaaacgaattgataaaaatatacccgtctcagatcaaagaagcggtctcgtggtgacgcgcgctttcgtgcggggagttcgcctggctgagcagcgaaactgctgactaataatgatttaatgataaattaatcgctaacgatgctaattaaaaaaatataaactaattaattaagcgctaataacgctaattagttacttcctactttccattttaaatgcagtcgtggacatccgtgtctaacaattgactgtccatattatttaagaaatttataaaaaataaaaaaatcatatataaaatactattcatatattattataatctagtaacaattataatactaattaaaaaaattttaaataagacgaacaaaacaaacgtcggatataaagtgaaacaaacgttggatataaagtgagtaattaattgattgaagccacggctgcagcacgcaatttggttcgttagggctgcgaactcgccgcgcgtgatgaactcgctacgaattcgcttccctatgtgataacggatactcacgctaatccttcgtaaccgtatatatttctctaaaactggtgaagaaaagatatgtttttcaatttttttcgtagataacgtgttctgtgtacacatcaactagctaataaatgtcatataaaatatctagaacaaattacgcatatcttctaatggtaatttattagagtttagccgtaaaaactttatttgtatcacatatctaaaaaatatgtacgcattttttcatgtgctctccctggatattacgtatgcttttttttgcttgtcgttttactcaattacacatgtaaacaattttaaatgtaaatgtgttcagaattgtttaggtagatgtcattttaaaccatacttttttaaaagtaaagctactaaatatgtgcatcaatttagtttttaccgaactgtggtaaatacataataaatccaaccaaaacttgtcaattgacaaattgccaaaattttagcatgtccaaaatttagtaagatttattttagctacaatctgaacaacttcttcgtaactgcatttttccagcttgatcattgtttttatttgtcgttttgcacatctacacagtttcaggtgagcttcgtactccgtatttgggcctgtttagatcccacctccaaaattttacacattgtcatatcaaacgcttgaacacctgcatgaagttttaaatatatgctaaaaaataactaattgcatagattacgactaatttacgagacaaatctttaagcctaattgctccatgattttacaatgtggtgctacagtaaacgtttgctaatgatggattaattaggtttaataaattcatctcacggtttaccgatagattttggaattagtttttttattagtgtccgaatatgtatgtgacatcctatataatatctgatgtgacacgctaaaacttaacacccctgaatcctgaatgtagacaccccatttatcacaatcgccaccctagcaagtatcctggacacaaattaactagttgagctagtagctgttacccggccacctctttccatgctactatctcctctcactactcggtactcatgcctgctctgccatcagtgagagcgtctcatctctcaagcacaagtcacaagagctcaagcaagcagagggagagtgaacacagcacagagagcaggtggtttggttaattagttagctctcgttcttcatctccgttctcttccatgtctgcattgtcgttgctcacctgatcgagttccttttttatcttgtctgtgttccaaaaggtagcaatccttcagcacttcatggtggtcgcgatgtttatctctgcgatattcatctgcctcgtccgctaccgactcaaagccgccggagagctgtcgaccctcaacctgcgcttgaggttgaagcttcgtatcctcatgtttgctgccgtcgctatgtctctagtttcggttgttctcgctgccttcacttattattatctgattgaggtgaaggtatccgttttcgcttgtctcaacgtggcgaccaagatttttgtgtatgcggcatacgtgatatctggagtatgttgtgcctttgtataccatgatttattcactactgtagtttactcagattagagggtattagagggttgtgtctgtgtgtttagagatgaaggtagtgtgtgtgtgcacgggcatgctgtgtctgtaccgtgtactccaatgtatgaacgactggttgtgtgtacgtgtctgaactttgtactatggcttatgaatggagtatgaatgaaactgattctggggcacacctcctgagaaatactagagacagaccatttgtattattgtatataatcagctcaggagaacaaacacgacacagttgtagtcaacttaggtggtaccgcttatcaatgaattttcagaaagttgagttttcatatttttaagtttcctatgaattttcaacaagtcgagttttcatatttttcaagctttgtgcgttgcatgttgactatgttcagttcacacacacgcagacaagatccagtaaacaaactgagttttcattagtgctatgttatatacaatttatattctcaaaaaaggtttgattttttttttgggggtgttggttgctatccacttgataattataagttttgcattaattcatgttatagatttgtaagccatctgacaaatgtgtggttgtgggtaatgctgcttgggcgtggagtacatcgtgagtgttccactatactacctccatcccaaaatgtttgacgccgttgacttttttaaaaatgtttgaccgttcgtcttattcaaaaaatttaagtaattgttaattctttttctattatttgatttattattaaatatacttttatgtatacatatagttttacacatatcacaaaagtttttaaataaaacgaacggtcaaacatatttaaaaaagtcaacggtgtcaaacatttagggaaagagggagtattaattaagctcaaaatgttgtagcagtacaaactgaagttacattggactgaagaaattacatcactattgggtcagctacagatttgtatcgactcgcaaaattttctaaatcttatacagcaattggccgtttcggtgaatgtctgtgaatcgtgaatttcgatgttgtttttctcttgaagagaacatacagtgcgatgataatgagcaaaacaaatagatacagctcgaggcgagctccctgcacatgaaacaacttgtcgtcgtcacatgggcaacctaagtcattacggaccacttgtccattagctccatctcgatctaagatgaagtccaagctcacagccttctcctccaccacaatacgtgtagcttttgttcggaagccctccatagatgccatgactgacaagatcatcaaaaaaaattaacaccatagatcattcattgatccagttttagaaacacccatcaaaacatgctatgatatcaatacagttaactatgcgggtagcaaatggttcacttcatagccaaagctccaactggaggataaattttgccttcactagctaatggtcagtggtaaatatgattggttggtgattatcagaaatttcagctgtgtacccacttgccaggcattttcaataatgtttttgaggaaaaggctgtataatcgtatacataagtattgatgttgtccatagaagaaaccctaccttcatagttctcaccaggtgcaagcattcgatggtaatcgccataagtcctgctagcccttatctaaaagcaagaaaacggtaagtattaggtctatcaaatgataagcctgaacgttatgcaataaatttcgttgtactcgttacttaggatattaggatattaccagtttatccgttctaaaaatattttgaccaacaatcaatttacagtgcagatccaaaggccaccaatactgttcacatcattattggttaacgctgccaaaataaactaacctcagaaccgataccctttatcgtcagggagcctggtataggatgacctgtatctgccgcaaatatccttccatgaactcccgtctgaaacaatagccatatatgatggacaaggtagcaatttcagttatttcttatagacaacgacacaaaggagcaaacttcaaatgatatctcccgttagtacaggatagtgctggttactcaaaggtcttgtttcataagtctgacaatgacatggttacaaactaacacccctcttggtttaacttttactccttgataacacataccaatggagcatctcaatcatatacctgtataaagttataaaccttagcagggtcataactctgacaatctaagaattctctgctcctccaactcaaattccccttttgtaaaaccaaataaaaaatagaaaaagatagggtaccctgtactgtgttacagacaaaagatgggaactgcactgactgcatgtaatcctaattgacttaactcttaattctcaactttaacaagtactaggagaaaacctatcccaataactcccatcaaatagacttggcaagcattaatctcttcaaatctttgaaccaagaaatatgttgactgaagctagagatggcatacattactaacaatgttgtgtctaacagcaacagaaagggccagcttgctagtgcagagttcaagtcgtggtgtgaggtcaccaaagtgtgaaaagatgaaacaccaagacaacctggttgaacttgatcatgtgccagaatggcaccaacaaaaactacactgaaccactttgtttcaggagaaatccaacatgaaaaaattttcaactttggccattaccagtaccctcctacgagaacctcgagccctcaatccgaaaaccaactggcaccatttcatttcgagaagtacagtaattaacctttccagtgaaaaaaatgaatcctgtggaaatgtcttaccttcacaaggcttgcagcaagattaagcatactcatcctattctgttcccatatgacaggaagctatagaagaatttggaagaaataacacaacaaagtgattatcaagttatctggaaattgataggcagataactagatgcaaaaaaaaagaaaaatacctcagctgcctttggccattttacgtcactaatttccagggttaactcaaagcaacctccatgtatatagttccagtcttgcatcccaccatagattggatacctcaacacaaaaaagcatagattgctagttagcatgaaaagtagcagcaacaaaatgtttgatatgaaataaaaaaaatgataaggagcaataatacaaaactagttttataccagaatgctccatttgtaatccctcctttaaattctttgctcaaagacatgttatagtgcgattgactataaactgatgccatgtaccggaatgtcttatcatcaggacatccataatactgtttgctgtaagaatgacaatccttgtgagaatgacaaagtttcaaagtaagcatgtatcacggatgtctttctcaactaccatgatgctaagatatctgaatgatcttgtaaagaagaaaaaccagtcaacagcataaagagtcaagacaatgtcgcattagaacaagcaaaggtacccacatgcactccaaactctatgaaactatttgcaaacatcaaatttgtaatactagcattagcaataagtcgagaaaaatacataaccatacaacctttgaatcatacactaataaatgcgtgggaagtccttgatcaaaagattgtttctagatatttttatgatgtacaaaatttacacaaaactaataattggaatacttgaactgaatgtaaataatagaaacaaggtaacacctttgatctctagacccatcccatggataatttgcaacaagagcaccctgcaaaattcaaatcaaagggcaatggatgaatcccaggcactagtttgaactttgaaatgaactgccaccaaaaataatcaatgcaattaataagggtcatttgaacatgtgaacaaatctgtaaactccatgcattgcaccattaacaattagtagagtagtagatgggctggtaggataaataactcatgatttcaaataaactaatcttacaagctgtgcacgagatttccttcttgcaagttgcaaccatcatgcttgcaattcagtagattttttttttaaaaaaaaagaaccttctctccccctggtctgttattatttttattctggttaaaattaaaacaaattatgttaatattcgaagattatatgaatgcagcccagagaaactaataaatcaataaaatatttcctgaactacaaagattttctattattattaaacaagataattttccctcccatatgttactgtttttattttatgtgttaaaacttaaaacaatgatgtttaacgcttgaagactaagtgaagaatgcctcagtgaaactaatagttataccaaagtagtttgtggactacaaggtctaattcaaacccatttgcttgcttttagaaagcaatattatccaacaaagtaagaattgtcaaatatatgacattaccagtatcaataactacagataataacatccaaaccataaacagcagagagagcataaacaccctagcattttcagtaagaatactggtaaagatagcacctaaaattaaaagcaacataggtaactcaatatagcagcaaaatagttcccttgcttgtaataactaacaaaaagacaaaaaaaaagggaggacattcccatgagatgagcaagattataaaccagaaaaggaacctgatgaggtgcctcatcatttactgaaatttgctttgatcacagaaagataactgggaagataattacatgactaatttaatatttttgcatagaagtgctagggaaagaataattaccccatgcaaactagcggaggcagtgaagtgttcttgttttacccagttcataatagctctagtttcaggttgtctgtagttaatttcatcgttgttggtgaaaaactgccagcattaacaatataattaaaaggctcaagtaggtaaagaacaaaaggaatccaaatattccataagaagaaaataatgcatcactgacttggtcaggaaaatctctgttgaggtcaacattgtttgcattaccacgtcttctaagagcaaatccatcagggttcatcgttggaagtatatgaagatgcatgtttttcacaataagagttgcctacagatattagtttaactggtaagtttttgagcttaccatatatttctatcaatttcagtaaaacagatggaaatatattgcgtaaaaccatagttgagccagacaaacatcgaatttaagagcagataacaatgtgagaatcttgcttaccaagggatccttcaaatagttatcacacagccaatttgcaagctttataagaacctcccttccaacaggttcatcaccatggacattaccaacatactgcaagtttgtacaaaaaatacatcaaaattcacagatatataatcagaaccactgacgaaatagataacctagatatttatttacagatttatagtgtagtaagaataaatgctaaaggttattatttaaagaaagttatatgaataattgttattacgcattatactgtcacacctctgctctggtactcgtaccatcctacacttgaccaatgtagctccgagtgcgtgattgggctgcattgatttcctagtgccaactgtgggggaagatgtcaggtgaacctcgtggttgaaggcaaggaaagaggttgcaggcagtttcaaaaagttttcagtgttctggtaattctggtgttctggatctctggttactatggaaagaacgcaacagatgtatcttccttactgaatcttcctctccaccagaattggtctagacatggagagtggcaagtatcttgaggcacaactaatggctccaattagtatgtgtttttttttccctagcatgtcacactgctggtaccaggacactgatttctcctttaaagaacttttgtggtggtggttgtggggaaccacttgtacagttctgctatagcttatctttcagttgcaatatggggataagtcctaaagaattaagaaagaaatggctatagccccacgggagtcaaataaattaaatggagtaaagacattacattgacattgaagatattccacatgtgtgaatataattttctgtcaaaggtgcctacaaaacactagataagccgatgaggataattgttatcagagtggagtggcatagaatttcatccattgagttcattgcatatacaaattgaaaagggaacaccaatgtaggaaactcttcatgaaacagaaccacaaaccttgaatgctggttcagcttccttttgcccaggcttgtctgatatttcaatcacccactacaagaaccataaaagttctcttatacaaatttaacattaactaaagcataacaaaaataaaaaatactcgagttacataccaatgtgacaccattcacactctttccaatgctgataacatgatcgtgcaatccctcaaagagagaataaataataggtaagcaaagtttgaatgtatgagcatacaggacataaaagtgagagataacacttttaagaaaaacttgagatgaattcaatataaatttgaagttccataacaagctacagtccatcagtgtaactgacagagtgacagtatccaactagaagattcagttctttattatatactactcaattatctgctcacagatctctcgcatgccacaaatagaacaccatagaattttatgagtgggctgatggttttgaacttagcacttttatgattgcttttctctaaaagatatcttatctttaccctaactacctatcagtgcagattgtatggaccattgacagcaaagaattgattacaccataataccatactttgatggtgaaatgtcaggttaaaatcctaatctggttaaactttgcaattttaacataactttgaagttccttgtatctcataattctcagagttttggaaatttataggttttcttttcatgtgattttaatcgatgttcagtttcaccagtgatgtgatttggcatggttaaaaatattgagggtcttgaatgctgttgagaaactccatgatatactcgcatcgccaagaagcaaagtatcacaacataatgtacctgtatatcctggagatattaggatagcggcttccaatggcatgcacagcaatctcaagttccgagttgctcatatatccacggaccaattcctccctaagtttgttacaaaagcatagccaatatgctcaatcccatgttggcgtgcaaaatatgcaatgacgaaataaacgaaacataaaaggctataattaatacatacgttatcatgggattatcctgaagcaggttgcgcaaaaatgacccataatttccgctggtacctggttaagaaacatatagattgagtcactaactgcatacctatgaacagatctgctacgtctattgacaatgattctataagatgagacgatgatgcaggcctaaagtcacaactcccagtctagctaaaattcttcgcagaaaaggacagaggtgtgcgagttcatcacagtaattatccaagctaagtacatgacgcaatcttccacacaactacaccctcatattgcactcgaagagtttgtgctcttcatcactgtccacgcactgacatcatcgtccccaatccggaagtcacttgtaccaaaattgtccaggcacagacatcgcccccacaaatccggaagtgaagcagtggattcgtgtcctcccgagctccccagctgagaaatcgaacatacagattccacgcggacgaatcgagctctagaacatccaatcggcaccacacgcagtggttcatgagcggggaaaaaaaccgcagacaaggtaagagagagagagagagggagacctgagggatgggaggcgcctctcgctgcggcctgagcgggaagcgaggagaatgcgcggaggaggaagagggagaggaggaggcggcgcgagatcgccatggccgcgtgcttgagcccaccctaggctagagtctagagtacggcgggttgggccggtgggggtggcgtttgtttcggtttgactctgacagtgtcacgtatcttatatattttgacgaaattttcatttgcacgaggcaccagtggtctagtggtagaatagtaccctgccacggtacagacccgggttcgattcccggctggtgcagttcctgttttttctttttgtgtaccttttttttctgaagctctcatagcaactgtattcctaccattttttaaaaaaaaaatctgaaagctttccttgctgctcatagcaactgtcttttgttgtaccttttttttttctgaagctctcatagcaactgtattcctaccgttttttaaaaaatttctgaagctttccttgctgctcatagcaactgtattgattttgctcttgtacgacagccattgcaacttggcgaaagcaattgttcattatgggtttataggtatatatatatatatatatatatatatatatatatatatatatatatatatatatatatatatatatatatatatatatataatcataggtttactccgattggagtaaaaaatcaggggttatccagccactgccatccggatctggcgcaccatcgccaccgcctaccacccggcacgccgaggaagcaaaagccggcggccgcccgccgctcgaccgcccgtcgccgacctgcgatccggaaaaaacggggaataaccgtgagaaaaatagaatggccagtaaaatttagtaattgagtatatgtatagtacgggtgattgtatagtaaacaggttaccatgaggagcaaccaaaagaagggggtggggtgtgcgggactgcttgggtgggtgtgggggaggagggggggtaggggcggttgctttttaatacaacgcaccctacggtagtatcttcatatatatatatatatatatatatatatatattataattatattttgcgggttctatgtgatgtttacagaaagccgaatgaaagcgccagaacaagtttacaccatgcagcagaagagttacaaaattacaaaattgcattaaacagaactagagaagctcaaagggaaatacccaattatttaacattgcccaaaaaaaaaggacttactatctctggaatattttcctcccaaaaagttcttaacataatttgaacaaagaaatgagattcagctaaatggctgtgccaattaaggaatcagaagggtaagccgacgctactgctgattcagcaggcatcaccgaattctgtacagtgaaaatcaatgaaaaacaaaaggtaatgctagcttctcaacatgaaaatatgttgccacagcaaaagatggcaaaatggtgctttgtctcctcttatcattaagaaacatcattatgtactcattagaccaaaaggcacctgtaatagagcaaaatggcatgaaattaggcctttctggacactgggacatgggggcataacgtgtaaaactgtgtaataaacacacctttcagaagatgactagaagtccagaacatgctgtttgtgtttcaccacaacacaccctcatgctgttagacagctacagcactaagcacagcatctattttgaattggagacctttaatagctcatgaaatgcttcttgaggaatatcaacggaccctacacgcttcatgcgcttcttcccttctttttgcttctctagcaacttctttttgcgagtaatatcaccaccatagcacttggccagaacgttctttctcattgctgacagactggaagcaatgcaagatagcatatttaagtatttacacaaatgcacagaattttacatgaacggaatgaaccttatagttaccataacatttaccatgaaactgaatgacattacagacacaattaagaccgggaaactaagtgcatggtaaataatctgagtctctgagagtcatgcatggaatattatgtccaggtctttcacagatgaccaagtaagatcagatcatggaacagatttaccaaggctgtatggttgtagtttgcagccagttctgcttagaccaatagaggttcacaatagttctattcaaaattatcggctctaagaaaggttagctttctaaacgctttttttccaggaaacatctccagtgattatctttacaccaaatactaccaagtacctaggatgttccaagctccaaagagcatatctaattgttctacttagaaggtaaatgtgaatgggcaaacacaattttacttgggagttggaagtgcatcccaactagaaaaaaatatcagttctcatggacagataagtgattttctatgaattcccttgctgtagagtgatgtgcatgcaaataataacttcaacaagctagggaataaacacaatccattaaaaataatcgtgctgttaacttgtaagggaaaaaaaaacagcagcaggttttaactatcttacgtttcccttgcgataacctttgaaccaactgcggcttgtatagtgatctcaaacatttgcctgcataatcagagacaaaagcataacgaaaaaggatggcggtaatggatgggtgaaaatttttgacattctgtacaacgataaaagaatgtaggcagcaatcacgattatgtttgtcgttccctaataatatatggaaatattataaaagcgcataatctgtgcatcaggatttccacaataaggagcatgatgaataccgttctatgaatttcttgagtttatccactaattctcgtccaactctctgagctttctggttgtggactattgttgccatagcatcaacaggctgaccattaagtaaaatatccatcttaacaagatcagactgttggtacctgttgaagtaaattaaagggagttaaacaagaaaataaacagccatccatagtggcattttttcctgctttgtcacccatttaattttaaccatagaaatatacctacatgcaatttgataatataagtcgcatgaaatgcaaattatctccagaatgtgattatagttcacattatttggtaataattattcatcaggaaacactctcaaaaggtcaaaacactagatgcctaaactcccaagagagctttctatttgtgcttacaactttgcttttttttaaagaaagtgaggtgactactagtacttagtatgctggagtagagacaagaactgtaaatacttcctccgtttcacaatgtaagtcattctagcatttcccncnttcntnttgtgntngntncatgcagtcatcttatcaaaggagcg

SEQ ID NO: 7979 - DNA, 56113 bp, Oryza sativa
tatgtggacacatatataaaattttgacccacaaattatcgtttttcttgttgataaaccgtactgcttataaccagcattaggcgaaccgatgacagcctaagaggatcgctgtttgttttaactctttcttgaaggttgtgatcatcggcttcttttgaaactacccagcagataagattatgggctagcattacatccatttaaccatgttggccttttcatttacaacacagttgcaatccataaagaagttagcatgaaactgccagaatgggcttaaatcagcactactcattccattcatctttctgttgtaacagaaatgcagcccgttctgcaacaccacatggctgcagtctgcagacatctttgtcttctactttgtaaactgcaaccaataacctgctcatgtgatgtctactgtcaatagtggatgtaccctgcaacaactccaattgaaaaaccatttgcatgttccatgctgattggtatggcaggttaacctgctcaacttgtcactggatcaatcaaaacagtaggaagaatctgtctgtacgactgtaccaaataccaaccctgcaagagataatttcacacgcatagaaagcacttcagataacagtattctgggtttcttacaatagtcctctttttcagaacacaaatgctcgattctgacaaagtttccatctactacatgtttattaattttacatgatgacaacgggctgataaattatgaaatctcaggggtaagagagatggaggcgatctccatcctcatcttgatcatgttcttgctatggcttgatatggcagcctagttgcagcagcagcagaggcagtcgaggcagcactcgcaggtctcgtagcagcagaagcagcacagtgcagtgaagatgctgcaatcagaatgagagaaatagttagcgagatcgatcaggattttgctaaaaaagattcacaaaagtttcatgatttgtaaacttaaaaactgacgatatcagaaacagagtgtagcagagttgaagtagtttcagcaggtgtattgacttctgaagatgtgtactgctggagttcggctctaattcaaactttcagcaactaagccaagcatgagaagcagggtgattttctaagtaaaaaaaggaacactaataagtgtgttcatgatctgaagctatttgtaaggttgttcaaagctaaccagtgagacaaaagaagctgaagaaatttgcatgaaaagaaaaaaaattgcttacaaaagtccaagaaaaaaaagaatcttataaaatactccatcaaagaggggaaagagagaaagatatgtcagctgcaagaaaacaagtttaagatccttctaactaatcatcctgaccaatactcatccagccatcctcttcttgaattgtgtctccaaaacaggagaacaagaagaacatcataagaaaaaaaaacaaattgctctcaccatgcatagaggcaacccttctcctcatggcgcctctgcacatgttcatagtaggacatgtcctgtgccattggagcgttatacatcttgtctctctgcttctgatgaacaagcactcacctctctaaaaaggtttcagagaagaacacaactattcaagggccaaggttttcttctcctgtcctctcttgttgcttgcaggattggaagtagtggataccatttataggccaggaaaagaaaggccacatttttccatactccatacaggtgatgtactatcatctgaactggagggacccagatgtcagcaagtgatgtaatttttttttgtcaaattatgaaaaattagtgctttgtttctatgctcttcagaaaaattctctgttttttctgctcattggtcctagtatctgactggataatctacttggctttttctttggaacaagaggctcatgtttgagtggtcagttctgataggctggaataagcagagttctgcccaactgcacaaactaccaaccaactataaaagcaaacaaataattagtattaatcatctctgagttctattaaggagtggtccatggtttgtgcttgaggaacaagatcctctcttccaattaagtggcctgtccactgattaattgttcatgcaaggtcaccaaactcaccatctgcttgccatcattgctagtatcacatcatggttaagtagtattattaacatgaacaaaaggttctgtttgatggccccagattttcttgtcttgtccaaattaatctgaacgcaaggcaggtactgtatctattaacaccaaaagtgatatatgcaggtgctttgcttaactaattaactcatgatatggtgatcctttattgctaatcaaatcgatgagttgtttgcagttgaagtagaaatgagttaaaaataaataatatcagattgtgcaagggaggaagaggagattcgacagagattagccaacagttccgaatttattccaaaacaaaaaaatgcaacttgcaagaacacgtgagaactgagaacctagaatctgaattccctttcaaccaggtctcaagaacaaacgccttgaagtggcacgataaagttcatctcatagtgaaattcaaacaactagtaagtagtaaaaattaatgttgatattaatttagcaggttaattactgcaactgatcaggggaggaagaagagatgaactgaccatgcgtagaggcagcccttctcctcatgccgcttggtgcagtgatcgtagtaggacatgtcctgctgcgccggagggttgtacatcttggctagcttctcctcttcgatcgatcaggccaaccaagaatgatctctcttttgatacaaatctaagctcacttttctcttcaaccttgcacacagagtttgatgtgaaatggaagtatttatagagcagatttccaaggttttctgattccaagttgttgcctggtaaaacacccttgcatcatcatatggcggttttgtttccatacattaatatttttgcaaccatataagtatgaccttagtttccttcgagcctaagatttgtatatggtcatttatgtacttattatactccattaatttggattttggttctacacggtcgtcatttatgtttggcaaaggttcagagctgagaacagcaggcactacaggacacaaattaattcagtgtgcagtcaagaaacagatgcactcccttttacttacaccaactacttcggttcacctaatcttgtttgccgatgatgatgacatttggatatattgagataattaatcaagtcatcaatgctcactactgtgtttgatatatgtaagatgattcatgcgtcattgagttctttctgaagtttaaaatgggctgtgcagtacattatttactgtgtatgacctgtgagattaattgaaggtttactaggaaaagaagataggtgtgcttatcagattgcttggcttaactgttgggcacttaatatgcatggattgagcaaaagcaaatgtaagccaaagttactacaaggttttcacagcacctctgcagactgcagtattcttatagtaccatcctaactaaccacaggagcttaatacagatattagaaatgcattttagaggtatttttttagaaaaggaaaatacttcagaatttttgtagtatttgtatcatatacataacaccagacatacatattattagtttaatgctgacttgtataaaattatgggcgtcttatattttagaataaagaataaaggagtaattaattagttcgcatatgctcattgtgtcaaaaaaaagacttaattttttgccatttcatggaaatttagtagtgagaagaaataatcaaaatacccttgctaacaaaaaaaatagtattgctaactagtcagatatataagatatatcgaagggataacactctttagtgattgtcgatcgatttgtcaattgatagtagataagcaagagactataaattattttttaaaataaattttgaaggttggaaacctttttatttttttaaaaaaataaaagaacggatggagtactacatactcctatacacacatatatatttccttggtggctaagagtctactctacatacacaagtgtatgacaagtggatggaatatggctatgactattacgtctcattccgtgtctggatttgtcatttgctgactattaggagacgacgtttcgttctatgtctatgtatgcatcttaatttctttcttgggatttttctcagtcactgttgatatagacaagcaaactcattcttgaccaaacttacgcatgcaatgcaatgccatcagagtcaagaatattataatgtcgcacacgtacgtactccctccgtttcagatcaaacgaaatgcgacgtatcctaatataataaattttgatagatgtatgtttaaatttatagtattagaatgagttatatcccgtattagatttgtttattttgagactcagatcaaacgaaatgcgacgtatcctaatataataaattttgatagatgtatgtttaaatttatagtattagaatgagttatatcccgtattagatttgtttattttgagacagagcgagaacacactcatgtataatcagctagcgtataaatcacggcattgttttggttgttagtgacttaattagcatggaaatggaaatgcacactcttagtgtaattggcaggatacgcacggtggtcaagaagagagaaacatcgtagacttgtagtcgagtatataaaggcgtttggtgggttctaaactccaactttcaaatctaaactttaattttagtgagagctaactcctataagaactgagatgagtataaaaagtgtttagctagattactcagttccacgctaccacatccctcgtcgcatttcgtcgaacatcttgttggcgtcaccctgccgttgccgccgccgttcagcccgcgcgctgcgccgccgggcagcccacaagccgcagccgatcagcttgcgagctaggctgccacctgtcaacaccgctgcccgcacgccgccgccgatgccatctccttgctgccctcggcaccacatgccgccgcccgccgtcaccgcctgccaccgatgctgcgacccacccgccgctcgccgccactacatgccgccgccggccgtcggtaggaggatggggaggagagagaacgggaggagagagggtagcaagaggtagttcagtggcattttgtgtgaatacactaaaaaaattaaagggcagtggatcttttgaggtagagtggagctgtgaaacagaaaaaactcggctccatacaaatttatgaagcagctatactaactccgctccaaaataataaagaaactgtaccatttgcctaaaacctgaagcagagctggcaggccacagagaaaggcaaggtgcgtgcgtgggctggcccagaagagtggccagtgggcttaggcgctgtggcccatggttggcccgtaggttgggctgggatttctggcccaacaaaactaaactgaagttcccactcttctcttctcttctatgaaaatgaaaatattccatgaaaatacaaataaaggtaggacatataaaaaaatcattaacacatgaccaattaagttttaattattataattttaaaaatagatttgtttgatatttttaaaacaacttttatatacagaaagttttcacacgaaacagtgttaaccaaagttgaaataaaattaatatgtatttaatcataaaaaataccatccatatataaatcaaagagagagagagagagacgggcagatggctgctatcggaggcttggagcagctagcctgggtgttcgtccaaaaaaaatagtttttgggatgaatcgaaacaagaacccatccacagattcattcttaaaaattgttttttttttctgaaactggggtgtaattccaagcatatattgatgctgtaacggctgcagggatcgatgacgacgatgttgggtgtgatctcgttaactccggccgttgtttgcgcgcgcccccaaagagatttgtctgatgcacagtcgatcacacacgctgacatgcaacacttcctctcttggaacttcactccagtttaccggcatcatactacaagtattataatgcagatggagtagtaagtatatgctctccctctggttccatattaattaacgttttagacaaggttaacgttaaacttttataatttttatttttaaaggaactaaaacaacgtatatagatttgtcttttaaagcattataataaaagtaagcatgcatttatttattatatattataatagaaaaataagttcaaaaatatatctcgtagaccgtatcattatttaaaatgtcaattaaaataaaaccagagggactatagcagatgcttccagcagctagccagccttcctgatcgacttcttttcacagcagcaaaactgacctgatattcaatcaattttgagtagacgacgatagatatatatattatatataccgtatgatgcatagttaggttttgattcgacctccatagccgtaaaaaactatgcgatcgatcgatcaattacgtgcttaagtacaaaatacagtactatactgactcatcagtatcattcgcactatatatgttaaattttcctgctaaagtacgaattgatcctcttcatttacatcgatcgatgcagagttctaagttctaactagaaaaaccgtgtggctttgccgcgcatggtaaagtgaacccagctcattcgactttagtgaagtaactaattagggcccctttacttgaaagaaaaatatagaaaaatataagaacttttattctatatagaaacaataaattttgctatagaaatttttttatatgattctttgaaccaaaggattattaaaaactattgagtcttatcaaatttctaaggaatgcccaaattcatacaagttttggagtatttttaatataaggtccaatatcacgcgaagtctcttatgagtttatctctctcatctaattcttgcatttttcgtacggtccaatcaaatgattattttatatattattttatgtgttttataattctttgttttgcgcttgattttttgtcagaattctatgtttttcctattcatccctcaatctttgtttcaaagtagcccttacaagacatatataggttgcatttgaccgagggagaaaagagaaggggacaattttgctagtacaattgtacccctactttgatgtcaaataccgattttatcctacattttagggttgttattttttgccctatttttttcaaacgaatgaggcgtttacccctgtttttgatggaagtgagtgggattggacttaatgcggtaaagaattagagaaagaaagagataacgattttttaaattatcgattgacccttttacccctagaaaatatccaagtaccgcttggtgtccctccaggcttgagcacttggcatcgactcttcccttcatgaacccaaatccccgttgtgaagcagtggcggcagtgtccctgggccggccggctaggcaatgggcacgacccgagcaagtgcaggccacccaacccagttgcagcgtgcatgaggaggctaggcattgcgcaaagaggccatggtagagaggaggacaatggtggctgctgtagctcagcgtagggaggaggtgcggctgctcgacgtgtcgaggaggcgatggggaggaggacaacaggtcaacggcggtggtggtggctcgatgagagaaggcgacaacggcagctagcgcggggaggtgatggtggcggctcgacgtggggaggaggcggcggcggctcagtgagaagaggaggcaacaacggtggcggcggtttgtgagaggaggcgacgatgacagcttggcacaggtaggcaatagatttgcttgacttgtctatttgtttttttcaagatatcaaattttgaagcaaatttttattgatgtttatgttaaaattatcatgttggtaaaagtttatcgaatttgcaaggttcatgtgctaaatgtgggcaaattcttaatcatgaacaaaaacaggggaagtttgcaacatgagtaagggtattgaatgccttctcgctaaagatttaatattgttaatctgcccatcaaaagtagaggcaaaatttatctttatttaaaaaaccatgggcaaaaacaaaaccctaaaatactgggcaacatcaatattgaacatcaaagtaggggtaagaatgaaattgccctaaagagaaaagattctatgatttccgtagaggaaaacacaggaaagaaataatataaatcacatgaatacggacacaaaataaggaaacacaggaactgcaaaaggatggatgtttgcagcgtaggaattttagtgggtgatttgattacatcctgttaatcctcttttagtctgatcaaagtatgtatcattatttctttagttctcaatatccggtggtaggaggaagcaatagcttcctgagctttgccagccgtacggcggcaacgcgagaaatcacatagactgctgtgcccccatggacctaattgctcgatcaatagaaacttctggacgaccttctggacaaccgctgcacgcacgcacacgagcgtttcacgctgcacgcgcacaagcaggatcgagccatcccgcgaaaccggtgttgccacgtggcacaattcttctttcaattttttgcatgaaattcgtattataagataagattaacatctcactaactccattttacgtcgtggtccgggcatatacgtagtacgatccgtcaaattatatgtgccagcaatatatgtttattacgcggccttgatgtgtccatggaaattaacgaccggtcgaggacactgcaaggcagctagtgagtgagactagttcgtaaagaacagtagtactgatgaacgaaattaacgacgaggaattaattcaaagctagcaaagcaaacatctccgtccgttgctgtaattaaattaaccgcgtgatcatactgcaccacagcacatccgtgagcagtactccctccgatacatttcatattataagttatttaatttttttaatcaaatttctttaaatttaactaagtttataacaaaatataataatattttcaaatattgtgtcaaaatatattcaatgttaaatttaacaaaactaatttggcatcatagatgctgctaattttctctataatagtcaaatctaaaaaagtttaactgtggaaatatcaaacaacttataatacgaaacatatagagtataactgattaaagtctctactaagcttaatgcttcctccgtagtaaaatattactcactctttttctaattaatcatcatattacataagtacactaagatgaacgaaaatcaattattctcacgtgctacttttactcagtaataaatttaatatatgcactatccccactattttctaaccaataaccaatcaaaatattgtattgcaggttagttggttgtaaagagttaggtgtatgatgcatgtatttattaatattcatttactctgatacacggataacgaataaacttaaggatatatactaatatatattgatcatttataaataaccttaaaagttatatgatgattaatttgagaattgggagattacatagttttagcttaagaacttatcacacaaatactataattttagagtgggatttactatacctatttactagtactttttttccttcttgtttcagccgtcgaatcagtagtacaccatatccttctccttattttctctctattttctatatctgactagcattttagggatggagggattacgtactggcactgtaattaataaatcatgtataacgagttagttatgacttcaagtatatgtatgtccatatccaaccaaagtagctagcagctagtagacaggtgaacacaagaaagctacgtactagtagcaaataattcatcatatgatgatcgactagtaattaattaattaagcaataatgctcggttcttgactatatatatatatatatatatatatatatatatatatatatatatatatatatatatatatatatatatatatatatatattcaattttgatccatccatcgatcacctagtttgaccagagctgcttatactgcttacgccaatttggattaattattttaactttttaaattctttcagagatgatggccttcctagttggacttgatctaatgcaaactgtccattctgtacaccaaatcatctactagtcttaaattaattagctaatagcttagcttgttcttagcctcactgcaaggacctaattaaagaatagctagctttattgtccaggaagtcacgcctgcatatatatgtacctttcaacgtttttgatcaattcatagcaggaattgatgcgaacacgaacaattcaaactggcctgaccggaattcatttcgaattgtcaatgttggtacgtagccgaaatgaattgacttccgtagcaacaaagaaaatgagaagaaagtcttgtgttaggccaaagcaaaaatatttatttattttttgacctccgtttctgaccctaaaatggcagaaaaattaaagctctgcaaaattttatcttgcagcgagattgactgtcaagaccttggagctagtggatccgtctctctccgggtttaggcgtttagggctcttttgaattggaggagattcataggactttttcaaaaaaaaaaagagataaagagattcgtaggaattttaattgtaagaattcatttcaactgtcaatgttagtacgtggccgaaatgaattgacttgtgtagcaacaactacaatgagaagaaagtcttctgttaggccaaggcttgtggacctccatttctgaccccaaaaatgacagaaaaagctctgaaaattttcatcttgcgccgagcatgaccgtcaagaccatatggtgtctgtctccaggcttacaatttcggttctggatctccaaaatttcgtgtttaccggtggctccaagtaggaggttcttccgaccgaatttgtaaaatttttgaacttagcaaaaaaataaaaataaaatcaaatttaacaaagtttcttaaaaaaatgatactatttatttataattttaaaaactttcaaagttgtttggtgagcaactgtgcggtggggccaccggcacagaggcatgcacgtggccacggccggtgaagagaacaccctggcagaatggctgggtttctcgaagctaccaccgtttcccaaactacccctctgcctcctcacccacgaatctgaaaccgtcagtgtcatcagcagcagctagcctaaagataatactgttgtgtggcaaaatggcgtcagttcttcctccatcacgtccagctgcctgcctcggaacagcaaacctgatttgcatagctcaatctgagggcaacagacaacagctagctggctattctctgaattttctttgagagagtacagtactcctactccatagaagtttcatcgaagggttattttaatttgtaggaaaaggtatatgaaatttagataattgtagttctatggaaaaaacatcgtatgaaagcttttgaaataaaggattaaatcatatcatttccttttaaaattcttatggaatagataattctacatagattttagaggaaaattagcaagaggtctaaccttttttttaaaaaaaatcatttgagtctatctctctcacctgattcatacgtttttcctgtggttcaattaaacgatcattcctatggatatttctgtatttttcaatcttctgttttacttttatattcctatttaaatcatgtgttttttctattcctccgtttttttacattcctgtgattcaaatgaggccttaaaattctgaatctttgtgaacttcaaattcttgagttactccctccgtcccagaaaaagataaaccctaaattttcgtgttcaactttgactgtccgtcttatatgaaatttttttataattcgtatttttattgttgttagatgataaaacatgattaatactttgtgcgtgacttgtctttttaattttttttataatttttttaaataagacggacggtcaaacgttgggcacggaaatcagggtttgtctttttttgggacggagggagtactccattcaagttccattatcagggtacagtacacatgtgaaatctatgctctctgaacattctggagatactcgattgaagtttcaattttcaaaatttctgaactttctgaaactatagctttcagaggttgggaagattcaggggcacacgtgaagatgtggcgtacatcgatgcaaatgtcgtttgataccggtaggtgtacagggcatctcaaatagagaacggtaggtgtacagaagccataccataccataccatgcagagtttgtacgtatacatgtattcaagagaggatagctagtgatgttggggtggcatgcgtccagaagtacaaggatggcaaatggccgaatgcgtgttttgcgtgcacaacatgtggcatcacacattaaacaatgcttatctgctaattgtgctatcattggtaaattgcatgcgatggatccggagagaagaaagggatggttggggtcatgagggaaaattttccttccttttcgaaagaactgttgaaaacactgaacttaacgatgcatacaagaagaaaaatgacataaaaataagcctattcaactgaatttctactgtagctaccatctttttcagtacttctagtttgttcgagcaaagtgaataaattgttgttaactattccaaccaaaatctattacatttagggacggagggagtactctattcattctaaaatataaacatttttagatctaaatttataccataatataaacatctttggtagcactatgcacgaaaatatgtacatttttcagtcactgagatgtttgaaaagagaattgaagcaattcaaatcttaacaattgaagtaactaaaatagaatatttttctccaccttagttttagtgaagaatataaaaataaaacagagggagtagtgcttaccaccttcagttaaatttattgtcgttttggacacttaattttttccttataatttatttgtccaaaacatcaattgattttgtctggaggaagtagtagtaattgatgcagtgagctgcctaactctattaaaaaacactcgctttctgaaccttacagaaatttcgctggccatgcacataatcttctctttgtcaaagagctggaatccaaaatgattgctcgaagatttcgtgaagatagatagaaccatcggctagcaaaggagaggaaataaaaaaacaaaaaaaaagtttttttgtgggctccaccttgcgctgcactgagctgaccaaattgaccataccgcacagagactgagggaggggcacttccgtcatttcgtataagcgtatacgaatacgtatctcatacgcgctctgtatatatagacggtaacggctccgcgtcgtgtgagttggcgagcccgaggagcggaggcggccacaagtctaatccgcgtcgtctgcgcgttcgtgggcgaggaggagaaagaagaggaggaagagagggaagggggcttgatttgatttgggcgcgtctcgtggagtatccggtgagttcttggcgatctggcgaggcgagtgatgagtgattcctgctgctgctgggggattttggcgtgattttcgttggttgcattttgtttctttttttttgtatcgatttgttggagctttattcggtagatctggtcgattccatggtgagttgtatcggcgccggagtgatagctgattctgtttttttgtgtgattttttttttgttttggaaatagggtttgtgtcgaattgagggcattttttttccttaggcaatgcaggatttcgttttgtatgtttttgcgtggaatggatatgaacagacctcgaacaaatggaagaatttgtattttgtatgatggattgcaatgcgatacttgttttggggcgtgattcgattgaaataaatgaaatattagagttattttgggattcctgtttgctgcgcctttttttttagcatttcttgatatgaacaagagaagaagggctgaatttttttcttagctttggaggcatttactgtcccagtattttctcctaccggaagcagaatattttgtttgattggagggttgcctccctttgccaaattgaatcaaatgttctcggatgttttaaaatttccgtggactctttttgccccaggggagaccgcttttagcagctggatcccgtgttttcatttcaagttcttgttttcctagtctccatatatttctgattgttaactcgtattctctacctcacatatgcaaaatcacacttgcgtcgttctgtaattagttagattctgcaagaaaaatccggaattttcaagcatgctagtagttttaaattgatgccatgttttttagacaatgttaattgatgccatatgactataggacacattatattgcgtttctgaatataccacctcatgaaactcataattttgttgattaattgttcaggttgccccttctagtgtgtaacttggagcaaatttggaccctgagacgcaaatcagtcatggctggttctcttgcggcgtctgcattcttccctgtcccagggtcttcccctgcagcttcggctagaagctctaagaacacaaccggtgaattgccagagaatttgagtgtccgcggaatcgtcgcgaagcctaatccgtctccaggggccatgcaagtcaaggcgcaggcgcaagcccttcctaaggttaatggaaccaaggttaacctgaagactacaagcccagacaaggaggatataataccgtacactgctccgaagacattctataaccaattgccagactggagcatgcttcttgcagctgtcacgaccattttcctggcagctgagaagcagtggactctgcttgactggaagccgaagaagcctgacatgctggctgacacattcggctttggtaggatcatccaagacgggctggtgtttaggcaaaacttcttgattcggtcctacgagattggtgctgatcgtacagcttctattgagacattaatgaatcatttacaggtgatacaatggagctatgctgctttagcttttcttccgtatttttcactattggtacattatgttcgtggcatactaactgtaatttgaagctttgcaggaaacagctctgaaccatgtgaaaactgctggtctcttaggtgatggttttggtgctacgccggagatgagcaaacggaacttaatatgggttgtcagcaaaattcagcttcttgttgagcgatacccatcatggtactttttctgcaatccactactctccacatcattttcttggatggcaaaacttctctttttactcttaattcataacatttctttcattcttaatggagtacttttgtccccggtgcatttagtgtcacaatttaatgtttacatggtacgggaaagatttatcactcaatatccacggtgtaatgtttttagctaaactcaatatccacggtgtaatgtttttagctaaacttgtcttcagtccttttttcctttttccctatgtttgtgtgctgtggcattcgatggatcatcgagactctgagtagacgtagattcttgcattccttatgcgacatgaggcacatgttcgagtgtttatcaccctacatgaaaacctttccctactaagttgctgcttctattgttctgcagatataagcaatatttttgcctatttttcctgtgctttgaacttctcgtaggttcatggcccacaacctttagcaggcatagtgccttgaaatggagtattacactcaaaagcataacaataacatgtattgccttgtatgataagatgagtgatagatcttttgaaatcatttactgaggaaaacgtttgtttatttgacaagacaatgtattgatgaactagaactgctctattaagtggtatctgccctgtgtctcctttcgtacaaattgttgcacccctgttcatgttacttctcacttttcaccatggcaggcatgtttagaaaatcatttgattttacagggcattaccatgtgaccccttaataactaacaaatatattttgggtccaccaaatctgtggtggatggaaagggaaattaataaacacaaatggaaaattcttcattgtgaaacgtgataaggacaaattttgtgaataaataaagtaacaaaaaatggctagtatttgcctacatatagagtacacctcaagagatcagaaaagttgcctttattgatggagtaattgaattagtagtaagcaataaattctgtggacctaggggacatccctgatctagatcgagttttgatctcatgctacatttaatcttccatgtcagcaactttcagtacctgctattaaatttcccctgttcttctgacgattgatgcaattttaagtttatgagaaggaaaacggtctgctgtttttgaattctgaatgtagtttacacaatttctcataggctgaaattttggttgcaaatttttaggggagatatggtccaagttgacacatgggtagctgctgctggcaaaaatggcatgcgtcgagattggcatgttcgggactacaactctggtcaaacaatcttgagggctacaaggtttgtgtttatcgtttgcatttgttgcatttcttttgtttcatgctgtttaccagcatgttttattccttttcgattgctaattgttcctctcttgtttgcagtgtttgggtgatgatgaataagaacactagaagactttcaaaaatgccagatgaagttagagctgaaataggcccgtatttcaatggccgttctgctatatcagaggagcagggtgaaaagttgcctaagccagggaccacatttgatggcgctgctaccaaacaattcacaagaaaagggcttactgtaagtcagttaatattgcttgttaccgtcattcattttgctggtggttctcatgcataaaatttctcatgagggatcctttgttcatgtcagccgaagtggagtgaccttgatgtcaaccagcatgtgaacaatgtgaagtatattggttggatacttgaggtaacttctttttccttttctctatccgaacatgctatctctagatcagaaaagagagtgtctgatcgtaattagtaacctagttcctagtcatatgccaagctgtaaaaacacttgcactgtatattcaaaagctattcaaatttctgagtacgttttgtttttttttcctcagagtgctccaatttcgatactggagaagcacgagcttgcaagcatgaccttggattacaggaaggagtgtggccgtgacagtgtgcttcagtcgcttaccgctgtttcaggtgaatgcgatgatggcaacacagaatcctccatccagtgtgaccatctgcttcagctggagtccggagcagacattgtgaaggctcacacagagtggcgaccgaagcgagctcagggcgaggggaacatgggctttttcccagctgagagtgcatgagcgcttctgtagtttatccggcaagtaacctctttgagaagtgcagattctaacttggctagcaacacaggacaaatgattgttggtgggaaatttggcatgccgagcctgggttttgtgatgcacacagcacacattcagatttgaagattgagagatgcttcttattggcagcttgttcagaaagatgactaagcggtttgggataaaatcagctgattgggaaacattagcaggatgataagcatgactggtggtaccaatgaaaagggttgaaatcctttgcattgttcatttgttgtggagcaagagtggccgcagttgcttatcacacaggatgatggaggtgtttgtgtgaagcttattgctgaagctggattgtttttgacctgtgtttctaaaagaaaagggaaaagaagaagctgtggattgaggccggagcagcagagatattacaatcgacatagataaataagatgtaatactaatttagcccaggtggtttgtgtgtggagatgcaatccattgtagtaacagcctaacttgtacattcttgccatctttttcttattaattgaatgaatgaatcgcagacctcctgcgttttcatcaataattgaaatgacttctgcttcatcaagaattgaatgaattgtctgtctgaaaaagttgccttcttaaaagattgctttctttcttattctgttgaatcgtcctggaaacaggctatttgttgttcagaggagattgctggaaacctcttaagagcctttcttggaagaacccttgatgatctgtcgttagcacgacagctctgagctttgctcttttgctgtattttgtggttgcatggaaggtgcaactgtaaagtgccttgccttacattacattacaactatggttggagaacgtagagcgacgtgcaaacaaacggcgattaatttgtctctcctctcttttttttaacctgaatattttcgtagaaaactaggtgttgcaaaataaataaatggctaatctgagtgtttaaataaaatttgaaacggagtcagtatacagatttggctgatctgttctaagttccaatagaagatctccaaataatttctggcaccaactgcatgctgcaagcaggagcatcactcgttcggtgacgaccaaatcatcaattcatcgtgagagaaattgcataacaaactgcaagtagcataacgaacaggagtaaacaaatcaaagacccatggcaggagctacataggcagcagaatcagattcagataatgtctctgaatgaatgaatgcaaaggcaatgcagagagagctagctggcgttaggtttgcgaccgtgttgtgcagctgccacctaaaacctaagtgagcggctggaaaccaagccagccagcctaccaaccaacccaaccgccggcatgaatttggtgcgagttgtagtgacacttgtccctgaaatataaaatggatataaaagcatatgggtccccatgacagcctgacacacaacccaacctccatgttacaaaacaggtcgctggaagaagaagaagaatggaatggacgagtgatacatagaaaattttgagcgtcacatcgaacgtttgaccagatgtcggaaggggttttcggacacgaatgaaaaaactaatttcataactcgcatggaaatcgcgagacgaatttattaagcataattaatctgtcattagcacgtatgggttacagtagcatttatggctaattatggactaattaggcttaaaagattcgtctcgcgattttcatgaaaactgtgtaattagtttatcattttatctatatttaacgctctatgcatatgtccaaagattcgatgcgacgtttttgggaaaaaaaataggaactattatactcacccaattttatatgagctggggaaaagttttacccaatttcttattcgctcttgttatccttacccttatataccaataagacaatcatgcaaaacttttgatgaaaaataaagaattgtctctgaaaatcatagatactctttccatcttaaaacatctaaaattttcgtcgaaattttatcttaaaatgcagtgatttctcctgctaccttttcatctcaaccaatcacgattacaggcatgatcatcaaactgaacaattgactaaatcgagtacagtagtatctttctttcctcggtgtagctgttgcctaccggccagccgacgatggcggctagtagctagctggatgataatagctaccagtgtagatccggccatgttaatggcgatccggcgaagaggggtgcaggacatcaatcaattgcatgcctagctcttgcctggctgctgctgcattgcatgctacagctcaagtaccatcagttgacgaatgcctgctctacgcatctcaactctgcacatctccagcgaggtttcaggctttcagctagtgattacagtacacagggagtacagcacaggtccagacccaagaggggtttgctgcgtccccaactcttcatttgcacttccatttggcattttgcatatcatatcatgctattactttcagaaagtagctaggcttgctccgtttgatttagattatgagcaaattattatcacggatacttgcaagcatgtggggtgtcagtgcgattcatctcaaagattggcttagttttcaaattttggacattttaattcatggaatttgtaacgagatggcgcatttaatttactgtaccacctgtctgtatgtactgtatacaacaataggctccaaaagtccaaataatctccggccacctatctattgggctcaaccctgtaggccggtcagagcccacgtaactggaagccccttacggcccaaccaacatagccgcatgtaattcacaatccaaaatgggccgaacgtaaggcccaatcccgttattgggtcgcacataatcgaaatcgctttgcaggccaaccctccatcagcccggcccatggaaaacgccttacctgggctgctagcccgagacatctctctctcccgaattttttttatttatacattttttattaaaatatttacaaaagtaattttttgtttcgaaaatttacaaatcttaaaatcatccttccagagggcggcaagggaactaaatgcaaaatttttatttgtgttcaaaccgtttccaccggttttaattgcttaaaaactaataatgcttattcgatacttcaaatgattttaaatggaaaagtgataaactataaagttatagatctgatcaagatctacaactttcatataaggtttatctccatccaatgtcgtttgaaatgtagatctaagatttttttaaatatgttttatattttgtaacgaatatttggatatctaaaacatcttaaatgaaaaagttgttaataacaaagctgtagatctctttgagctctacaattttgatataaagttttatttcatctgactttatataatataattttaaattgtaaaatcatagagccaacaagttgtgctggaaaatttgcatttaggtcctgtgccgcactctggaaggacgatttttaaactcccaaaaaattattttggtaaattttttaataaaaaaatgtataaataaaaaaaattcctctctcactctctcgctctctctctgcttcgtagttcgaacctccgaatgctcgctgcaagcggcgaatggccgcgtcgcgctgcgcagcgcgacgggcactggcgctggcggcggcggcggcggaggcgttggagcgcgcgtgctgctcctcggacgccgccgcggtcgtctccgggaacaacaggctgatggcggagcacctgagagccggcaggctggaggccgcgcgggaggtgttcgacggaatgccgcggagggacgtcgtgtcctggaacaccatcatggccgtgcaggcgcgggcgggctcgcacgggagggccgtgggggcgttcttggagatgaggcgccaggggttccggccggaccatacctcattctccaccgcgttgtcggcctgcgcgcgcttggaggctctggagatggggaggtgcgtccatgggcttgtgttcaagtcctgctcctctggtaatgtgtttgtgggtgcttcgcttatcacgatgtatgccaactgtggggtggtcagctgcctggagcaagtgctggatggtgttgagagtccaaatgtggccttgtggaacgcgcttatatcaggccttgtgatgaaccatcgtgtaggctatgctcgcaaggcttttgatcggatgccagtgcgtaatgtggtgtcctggactgccatgataaaagggcactttacagcgcatgaggtcgacatggcgtttcagctgtttaaattgatgccggtgaagaactctgtgtcgtggtgcgtcatgattggaggttttgttacgcatgagaaattcagtgaagcagttgaattgtttaatagcttgatgatgaatggggaggaagtgacaaatgtgatcctagttaaaatagtgaatgcttttgctggcatgaaaagtattagaggaggcagatgcattcatggattggctgtgaagtctggttttgcttacgaccttgttcttgaggcttccttggttttgatgtactgcaaatcgttggacatcactgaagcacgactggagtttgataaaatggaaggaaatcatgttggttcatggaatgccatgttatgcggctatatttattcggataagatagatgaggcccggaaactttttgattccatgaataaccgagataaaatctcatggaactcaatgattaatggctatataaatgatggaaggattgctgatgctactgagttgtactcaaagatgactgaaaagagtttggaagcagctactgctttgatgtcatggtttatagataatggaatgcttgacaaagcacgggatatgttttataatatgccccaaatagatgttatgtcttgcacaactttgctgtttggatatgtgaaaggagggcatatggatgacgcgctggaccttttccacatgatgcaaaaaaggactgttgtcacctataatgtgatgatatccggtttgttccatcaaggtaaaattactgaagcatataagctctttaatgaatctccaacacgtgattcagtgacttggagctgtttagttgctgggctcgctacaaatggtttaatccatgaagcacttcagttctacaaaaagatgctactgtctaatatacgacctagcgagtcagttgtttctagcctcataagctgtttgtcaaattattctatgatggttcatggccagcagtttcatgctacaaccattaagattggactcgattcccacttgctaatccaaaattcactcattagcctgtattgcaaatgtggcgaaatgattatagctcaaagtatttttgacctgatggctaagagagataaagtaacatggaacacgatcattcatggatatgcactcaataatcttggtcaaaatgctgttgaaatgtttgagagtatgacaaaggcacaagttgatcctgatgacatcacatttcttggtgtactttccgcatgtaatcacatgagccttttggaggaagctaaatatttcttcaatgcgatgacatgtacttatggaattttacctaatattatgcactatgcttgcatggttgatctcttttgtagaaaatgcatgattaaggaggctgaaggattagtgaagtcgatgccatttgaacctgattcagcaatatggacttctctattgagcggttgcagattgactggcaatgataagttagcagagcatgcggcgagtcaattaattgccattgatccttgtactaaaatgccttatctgcatctcatcagtgtgcatggattaaccaataaatcgactgtgattgatagtttgagaagtcaaattaaaagcactgccactgaaaaggatgttggctatagctggatttagcatcccattttgatttgcagatgtgtactacagcaatgggatttgatcatttatgcagaaaacttccaacaagcaggtaaaaaatctcacaaagtagatggatcctttggttgaggctttgataactttgatattgttctaatgagatgataaatttgtttacagtgtcattcagattgtttatgagctggttgacccaggtttatttatgagggatagaatagaacaagcatgaaagatgaatgaaatgcatctgtcgactacaacccaggttgcatattccaacttaggacttcgacagcagcaaaatggcatcaaacaaactgaggcatgtagttgtcatgcctgttccatggttgcctattctgcaacggagcttctaaaatctgaatacatctgctcacagtttgcaagtagactactctacaatcaaggttgactggtatgtatcaggtaagcatcaagctaaatcgtgtctctatcgattagagtttagataaaagcataagaaacactattatagatgggtagatttgggatgaactggcaatctgatatctgttctcaaaagtttagcggtcaactgtgaatagtatggcagtgtccttataaattcaattttttttcactgttcaggaatgttaatggtgaactccgccatcaggttgtacttgtagggtttggtcagcatggagacgtgaaagttttcagtaaatggtgtgggcaaatcacgaatcaccttgaaaatgccaagacagtttccgatcatctggccgcttcattgcaggttttcaatccttcgtcctccctcccccctgtaaatgctctttttttattcttttttgtaaatatattacatagggacctcccctactgttcaccggtaaatgtataagatcatacacaccgaaatatgtttgcaaacaactataaacaagattcccacatattggatgtatccagttggaacttaggatgaatcaaggttcgattcaagcataccacataatcatttgtaaagcatttgagtacaccttccccaaataaagcatacgtgcaagtgtgcaacgaaggatagcatatgtcagaacacgggaaaagtatcatataacgcgaacagcataccaggtacagaacttggctatccaaattaatctctttatcctagtactagcaatttgcatagctgtttgcctgcttaacagattgtattgtgttgcgcacatgctacctaagatacattggcccaattgagtttcaacaaatgcattctgttgcgcacatgctacctaagatacaatggcccaatcgaattttaacaaatgaaagctcattccttcttctgagtgtccctgggaatgcagcactggggatagcaaatatctctggctgttatattgctgttaacaagaacaaataggggtggatgtctttcatgtgccctttggcattcacctccaccttgcacctcccaatctgattacctcttcagttccagaatccctgcgagctttatcatcacctgtatcatcctttgtgtttgtcgcgtcaccatataaatccttcaattttgccaagttggatggctctggtggtctaccaaatgggctagagcggtgattttcaccttcggttctgccacggtttggactcctgctcctgctcctgcgggcactcgaacgtccatgtcgatcagaatccctgtccctcctttcacggccttgtctgtcaacattcctacttgaatagcttgaacgacggtaatcacggtctctgtcctcacgggcatggcgatcatgctccctatccttgtgcctaccacggtcacgatccgaacgatcacgctcagaatcatgatcacgttcatggctccgacttcgtcgcctcctgggtgaagatcttgcacactcaccatcagaactcctttctctatcccttgctgaaggcaatgtcttccggacaggggatgagtcccttgtggatgcacggtgtggagcacgctgaccaaaggagaccgacagagaagcctttactgaaggaggccgtcgggcagtatcatctgaaccaaggcgactagagtcccctgttattcctgactgctttgttgggagcttcatcttctcaagatggccagtgacctgtctcaagatcggaagaggcactcgtggaagaagactgtcaaagtagtactgcaaaggaaaaacaggcatggacaccaagtttttaatatcatgtctcaatggtatttctcaactaaatctaccagaacaatagctcaaaaaagaaacactgaacaataacatcaaaatgatcaaccaaaatggaatgaagcaaatatagttgtgaggttaatatgctgtcttggcatgaagtagatagacgtggtgtggggctctcagtaacatgcggctctaagcctctaacatcagatgtgaagacaaactgcgatagtagaaaataaattggaatttaaaaaactgcattaaaaaactactcagttgttttgtgattgtctccggccaactgtaaacactgcttcaactcacccatgaaacattcatcacaatttgctatttgttctctgctaacttgcatggaaaatgaaatctacgaaataactacaatatcatagaagccctgactggcaataattatgaggccgaccagtaaaaggaaaaatcaaaaaagcactttcgtagttcactatttactaaaagttggggtattgctcacccgtttctgttcactatgaacctaaaaaaattataagtaactttcaattattacatgattattacacactgaacttcgttttcatttttgaaaggaaagttgattttctagattagctattccaaaatatcaagcatagacagaatatctcttgccaaagaagaaacaaatatgagacgtagtcctcaacaaatttaaacagaaaaaaacatctcaaaactaaaaaagatagcaccatagcatacatcattttcttttgttataaatccttaactagatgaaacataggaaactctagcagaaaaatggaaaataaacatttgagtaacacatcatgacaaaccttatacaaagtggttactggtggaagagatgatgtctcctcttaaagcaactccacaattgaaatttccgctcagtatgccaaaccaacaggtgagtgattcaacaaacactaattgcatttatgttcagaaaatactatgtcaatgatgtatgcccacggatgtgcttgggtaactaaaggacactgtaacaggaactttacaatactgttctatttaaaggcagaaatgaaatgaagttcacaagatatacctgcccaagtagaagatctcgcacataaacacccatagtagtcattttaccattagatccaggagaaaactcctgagcaagaagaaaggcacagttttcataggtacgttatgcagggattgaactttaataaaaacacagaacatatatttacaactgacaaaggcacacaaaaaagtaacaatttaacatattaaaaatagatccagatggctcagcgctcagttcacatttcatgcacataacatgtttatgctaagaagcaaccattattagtagtctagtgcaggaatagtgatgtatttcactttttcctttctttctggagtttacgctttcatgttttcaatattttttttctggtttgtacaagcattgtccttgacaaacagtaggcatcttatacaaatttagcataccacgtaccatttatagggagcagtactaaagtttgctgaatacttcaaagtacaaaataggatatacgaaggaaaactatagatttatccttttacagcttcaactaatcgtcaaaatgatgcaaaatacaaagaaagctaccaaaaaagataatacctcatcatctttaatgtagggttcataccaactccacaacgtctttggttccgcaacatatcgcaggtaaagaaatccaacctgaaatataaacgctaattactgtctgagagcgaaaactcaattgtttgacacagtaaaaaatcatgatgcttcatttactggtttaggtgcagatttatctcaagacacattaacataggtttctatatatccttcatttactggtggaaaatttacctaatagtagcaccaaggctcattttcaatcacactatcaacactcaacagacacacatagtgcagcgatttagcaaaatctacaatattcagtaaatcctctacattgcattctgcacgtaacaaaccatcctaacaaacagaaccataaattaacattgcgggaaccggaagagtagaaaacaacaggcttacagctctgatgtaaggcgagtcagggtgcttcagcaggccgtgcatctgcttaaccgtgagcttcatggtgaagaacttgtagaggaggcagaaggcgctggagggcccgcggcagttgccggtcatccatggctctacgtggtcaacctgattgtagatctcatcaatgacctcgtggtaagtcttcagcctgtagagctccttgaagtagtccgaggagaggatgttcactgacaaaaccttctccatgagcacatcgattggcctccctgatgactgtatctccatttcccctcctctgaaattaacatcacacgacatcattccatcaatcaatcaatcaatcaatccggggagggggtctcctaaacctagttttaatctctgcactaatttaccattgatcatctccaagaatcagtatttcacggttcttagaaaagatcaagattttctaacggggagaggatctcttgtagctcaagaacaagggagattaaagcaggaaaagatgcttctttttgtgcatcaaagatccaaactttcgccgtggaaccgaaagctttacctcttttcttctcaccgggatgcgaagcggcgggcggcgcacgggggaggccacggcgagcggcggcgcggacgagattggggattcgttttggattggggattagggcgacgagaagaggagagagagagagagagagagaggtaaccgatggaggagagatggagtcgtggccgtgcgaccgtggcaacgggcgaggttacatcttacatgtacactctaccgtctgaacagccgtatcgcagccgtccgtcccttgatctacggatggatggatggtatgcaggaatgcaaaatgaaatagttcatgcacaagcacgtattttttaaaagaaacacagtacaaacacagacattcgcaacacgcacacacttatccttataaacacacatcttatttctgtgagtctctctctataagaccgggttgatatatcttaagatcgacgtcttgtgtaccatcaaaacttaaattcaaaaggtacactcgctttgttttaaaatacacacataaaaaaaatatttattttcatacttctaaaagattatttataaatacttaaaaaataccatattgtttaagtgtataacgttgtagacgtacgtatgagactttcgttatttatagtctaattatttaagagtaattagtgatcacaagtaaaacaagttttgtatatttgaaagcagagggagtatcttgcaagcaagtttcaagtagacgggagttacgagattcaaaaatttaagctacatttgccatctatatattgcacatattaaatggtccatgaggtattttataatggtctctattggtaatagaatcaatataggccattcatatttttcaatctattgactcatactatctattaacttattaaaggaatataaaaaggagcatgtacgttcgctctcacggtctataaattctcagattaatcggagaaaaagaaaaacagagtccatatagaaatacaatttagaaatagttgaaattcggaattaaaaaataaggaatattggaagaggagacaagtccatatagaaatacaatttataaataactgaaattcggaattaaaaaataaagaatattggaagagaagactagagtccatatagaaatacaatttataaaaaactgaaaatcggaaataaaaaataaagaatattagaagaagagtatagagttcatatagatatacaattaagaaataatagaaattcggaattaataaataaggaatattagaagtagagtatagagtctatatagaaatacaattaagaaataatagaaattcggaattaaaaataaggaatattagaagtagagtatatagtccatataggaatttaaaactaactaaatttcagaatacacataataaaattaaaagaagagtttagagtccgtataaaaatataatttacgaataactaaaattcaaaattaaaaaaaacatgggaaaaagagtctaaagtcaatataggaatacaatttagaattaactgaaattcgaagttaaaaatttaaaaatattgaaagatgagtttagagtccacatacaaatagaattagaaaaaatagaaattcagaattaaaaataaataatattggaagaagagcctagagtctatatagaaatacaatttacagataacgaaaattcggaattaaaaaaagaaatattgaaagacaagtctagagtctatataggaatataatttacaaataattaaaatttgatattaaaaataattaataactaacacgcatataaaataaaatatgaatattacacattaatagtttcgtaaagttagtacaaaatttaaaattatgttgtcattttaatatatttgaataatacattgagaaaacatatatgctattatatgagagaaaatataatgatactagccgcgcaatttgcgcggaccactatgctagtttatactatctcaacaattagtaaaattaattttctactactagtagaactcataaatcaatagatcatttctattagtcataatattggtagtagaacactgtcaatagaagtcactgtactgtatgtaaaggtactcattttagtagtacggttagcatagcgacagttatgagagaaaattaacatatattctatgaaactagagaatatttcttcaagggagaaagtatgacgattacgagagccttgtgacaacgaggctcgtcaaaagaacgatgatgaagggagattgggagatcacatatattcccttcttttaaaagtgcaagctgaaagcagcaatgatagctgctagacagccaagtcctttgtcatgccgttggcatggtatttactccctccataaaaaaataattaaatccttagctataaacctggatagtattttttttaaaaaaataaattctagctatgaatctgacaaatgctatccaggttcatagctaggatttgatttttttttttacgaaggggtatctaattaagcacattgtgtgaaagagatgttagccggcccatcagtacccactctgccctgtgcgactcgtgagaaacatttttttctgaagagataatgttctttcttttctttggatgaaaagtgatcttgttcttatcttctgagttctgatacaatataatgtaatccttttttcctcttgttctgcattattatgatattatccttgtgaaattctcttatctttctttcttttttaagcagatggaatgagctctacgccattcatttcagagaagaaaaaaggatgatagcttgtgaatatcatagggacaaaatttcagacaaggtgacatctgaacttctgtagttttggacacaacctaaataatcaattgagtgggcttagatcaaaacccgattccattaaggattactttgcaacaactaccaaatcacaagctacaccatacacgccacgcattctggttacatgcttcaaaaactcttccaactcgatcagaagagatcagcacccggagttatttcccatctgcactaccataatcccccctaattaaacacaacacgcgaacaaattaacagcccatagacttgttttttaccaccttcttcttcttcttcttcttcttcttcttcttcttcttcttcttcttcttcttgttctacgcttctatcttaagattcttaattttaattagcctcctccgagaagcaccttgttctactgtgcttctgctggtcagagagtacttctgcttctgctggatctactggtagcaaagcacatctctgctcttgtcagggctgtgttttgtgcggcgccgccgcgacggcctcggcgacgctgaagaacacgcggtctgagccgaacgtcttgccgaccaccgagttgtacagcctctcggtcaccgatccaaccgggttggccagcacaagctgcagaaatccgtcagaaattagctcatgttactattcactgtcactgacaaatctgaatattatctgatagtaaatcactgaaactgacaagaagaacattggtagatagatgtttcagaagttctattacctcgatgtttcttttttccagcaccttcttcagctctgcaagtgcatcgaggccactcgtgtcgatcgctgcaacagctgcaagttcatcgaattctctgtcagtttgtactgatcacaagatagtactattattctgagaatgttatactgaataattagctgctctttttactgaacagttagctcatcgatccatgtgagtttttactgaataattaacaactctttttactgagaatctttttactgatcaagattgtactacaatctttctgagaacgttgtactgaatgaataattagctcatcgatccatgtcagttttaatttactgaataattaaccactcttttcagcatttttttaactgagtatgaattctgtacaggagtagtagcatgcaagagcttattaccactcatgtcgaggatgatgcatctgacagggcactggttgcacttggcggcccgctcgtcttcctcccggagaaacctcatgatcctctcgccgaggtacatggagttggcgaagtagatggcggactcgacgccgacgacgaggaaggacggcacacgcatggcctccctgtactgcgccatgctccggtagctcgccgtgccggggacgacgcccttgaccaccatgtttgggcgggtgacctggaggaggatcttgaagagggagatgccgacggcgatggcgaggcccatctggacggagacgaggaggacgccgaggaaggcggccatgcaggcgaggaagtcgagcttgtcgaccttccacagcctggcggcgccccggacgtcgatgaggccgatcacggcggtgatgatgatcgccgagaggatcacgttgggggtgtagtggaacagcggcatcaggaacagcagcgtcaccagcaccgccgacgccatcacgatgttcgacaccgccgtcttgcaccccgcgctgtagttcaccgccgacctcgagaacgatcctgcgtccattcattcagagttttttttgccaatggtgagccattgcgatcctcatctagcttctatgaatattactcacatcattttatttctcattttgatttatttttatctttgtctttttttttgttgtgcatctcatgacagaagccggagatataatccatttccattatctaaatatgaatattactccctcattccgttcatattataagtcgttttgattttttttagtcaatctttttctataatattgaattaattagtttcattgaatgtaacgttgaatatattttgataacatatttattttatattaaaaatattgttaaaattttctgtaaacttaaacaaacttgaacaagttagagtacctccggtcaaaagatacttatcgtataagatttggtcaaacttttgaaattttgacagctaattttatgttagagtaaatttataaaatataaacattttataatactatgataattacttttcgaggcaaatctatatactatatcgtttgttttggttttgaactatgcatttaagaaattactgatggtcagaattttaaaggtttgatctaattttatctaaaacgacaagtacttaatacgttcagaagctatggtgcaactgacaaaccaacctgtggtgacatagcaggaggcacatgagccagccatgttcatgacaccaatggccatcatctccttgtttccatcaacctggtagttgttgatggatgcaaatgtcctgcctactgctatcccttcctgcaaattcagtcatttttcctttcatgttcagactaaacatcaccatactaaaatagttcagatagtaaataaaatgtgttttttatgtaggtgccttacagtgagagatagtatgccagtcataattcctgtgtttaaggccagtcctacgtaggagccactgaaggtcagcatattcgctgaaggagggttcaatcccttggggagatcgccaatctgtccaaacaccacccaaaaaaagatgaattagtgtgactaatgacgtttctttcatgttctcgatgtgaagctgtccatgaaagattcagaaatggtttagagaagctactcacaacactgatgccatgagctttgctgacgaacgagatgatggtagagatgatcactgatgtcagtggagcagctgctgacacccagaaaagctttgggttcctggcgctctgcaaaaatacagtgaaaattgttaccggctgcatactcgcatcaaagtcagagaaaattgtatacagcgaactgaagaatcagaaggtaaaaaaattattggcaaccacaacagcggttcacataatgaattcagtacatatttttttttaatttttataaaaagagttcagtagatcttgaatcacaaatgaaaagaagttctggttaaaacctattaatttggcaggccccatctcctcacatcttctgaagaattgttctgagatggtcccatgaccgtggaattgtcgcattaattgacactttttaatcattccaggtgaggaacagcgtcattacaaagcagatgacttacttttctcagaggaaaaccattaacagtctaatggatgtgtttatcagatcattctgtttagactgaaaagacaccgaaattcagagagatgagcatgtgaacaaccagcttaacaggtgacacgtcagagtggccaaaccagatccattcttcccaaaagggaaaagagaaatgttccaattgaaaatggctttattagaatatattctaaagccacacacacgccttgctttaattgatgtatatggtctaatcgtattaagactaatgcaagatataaacattctttgtttttgtttagtttgtgagatcatccaaactagaactgctcatcatactagttagagtgcttcatgacatatgtttttgtacacatgatcgattaattaattactaaaagaattagtgcttttctgcaagtgtaaggggagtaaatattattataaactcctttcacaattatgcaattaacaaccttaaatacttctggtcacacgccaacactaactttttagacaccatgtgttagtccaacgttcagatatcttggaagattaggcataagacatgactttttcttggcatagcaactgtttattaagcaagtctaaagaagtttttagattaccctaaagtagtactatactagcttaaataagtttaaacagtttgaaaaaattgaggaacttttatgtgatcccctaattaagaaaaccacccaactactaaagtaagatattcgaatttcgcgacaatcaattatgtgaatggaattcctttaggaaaaatcaaaatatcccatcattatgagatccctataagctggaggtagcttaacttcaccttccattaactattggccattagtttaactgagtggagtcaaattccttgttagtggcaagcaccctttgggcccctccatgaagctcactttgtaatggttttaatcaccacctttcctttttgccatactatctttcctagctatagataagttacctgtctttaaccatggtcaaataattataaagaattttgccgactaattaactaacaataaccatttagtcctgctcataactgcccctagccgaaagtgttctgtactcttccattgtctcagaatttacaacggcaggtctcattacatttttacttatacaggcaaggcaggccagcttttacgatccttgagagataccaagaggtatcgattattttagtgtaaattttggtatctattagtatcgaagatatcaagatgtatcaaattttacattaaaaaatatggtatcttctaataccttcttaagaactataaaatcactttacttgtgaatcactaaatatctagattgttctattaggcgcaacatttaaataacctgtacgcaggttcatgggtcgacatgcttgcatccctgatccccacgcatttcatacgtgtggctattaattgtggttcccttactattttggcgcctagccatttctgcggaactttctataaatagtaatagcaattaaccccctgattaccttctaatcaccacgcgattagcgaagaacaggcaataattaactaatcaatcaagagagcatgcatcatctctgcaggtgatacgctactaggaaggtgtggtagctattagcttacgatgtggcgtgtggtgaggaggacggcgaggaaggcgacgcccatgaggatggtctgccacgcccactcgtcgtggtgcttgaagacggagtgcatcacctggacgaaccccatctgcgacgtgaaatggatgatcccgagcaatcccttgagctgctgcagcgacacgatgatcgccgcgccgcccatgaatcccgtcagcgtcgccttcgacaagaaatccacgatgaaccccagcctaaaaccaagaacacgatatactccatcagttagctaggcatgaggtgatcgatccatcgatccatcgtcaatggaacagtagatgatggatgtgaagtgatcgaataccggaggaagccgagggaggcttggaagacgccggcgaagaaggtggaggtgaaggcgagctggaggtagaggatgggctcctggtccggcgacaccgcctgccggagcatcgaccccatcaccagcgacgctatcgacaccggccctacagccagatcccgcgagctacccaacaacgagtagatcagcggcggcacgaagctcgaatctgcatacatcatatgtgttattcatcacatcgaattgacataatggccggtcattttggttcatcttttacttacatagtccaatgattggaggcaggttggcgagcttggcgtagctgattccctgcaaagaaatcggaattcgaattggaattgggaatggagaatttcaggaggcaaaacaatggcgtgtatgtgtgatcaggttgcgtgcgtgcctgcgggatggcgaggctggcaatggtgaggccggagacgacgtcggagcggaggaggcggaggctgtagtcggagccccaatggaagatggggaagaagtactgcagcgcgagcaccagccgccgcgcggacgactggttcttgaactggtggagcgggtcgtcggggaagaacacctccgccagccgctgcctcagcgccttcgccgtcgacctcctctccggcaccgacaccttgtgcagctccgccgccgccgtcgtcgtcatcgccggcgcctcgccccgcggcgtcggcggcgcggagaccaccgccggggtcgtcggcgcctgcgccggtggcgcctcgacgtcgtaggagaggctgtccaccttgttgttgacaaccatggcgatcgagtcgagagggaggaggcgatcgaggtaggattaggaagggaggcgccttggctgcttgaggggttgggcggaggaagaggaagggcgccatttatagggagatggcgggaagagaaagcgcgggagaggaagaagaaggcgcgggcgcggcgcgtgcaggattaagaggcgagttggggggttaatttaggtgagcccccctattactgggctgcaaagattcgcaatttgggacacatgtgcctcttaagctgtgctactacctaaataaagaactacccaaacaaacatttgggcgtgtcacattttcaaacttctttttttcccttcaaaaaatgtatattaggaattaaaattcaatagtatcttggaattaatgtatctatctatctactagtgcctccatcccccctccctagaaaaaaaacaatttcaactatctatctctctatccatctatttatatgtttatatattactgccatgcgaaaaagaatataattctagctatgaacttggacatatctttgtccacgtgcattgctaaaattgcattcttttttaataaagatagtgtatctatctatctatatatctatctaacatatgctaagagttgtatatcagatccaatttaacttttaaaatctaccatataaattagaattacatttatgaaagttaagaattgtatatctgcacttgttttttttctttccgaatagggctatgtatgtgtccatttaaatattttagaaaactcttttttattggagtgaatactaattataagctggtttttaatgtatttcttttaccaaagtattagttggtttccgcatgttaaacaagaaaatagtatgagaagaaaattccaccaggaaaaggtcgatttaatgagattccagataaagccgagtacgtgttagtatgagttcaacatatagtaattcatgcaaaattgataagacaagtaaaactacaacgagattcgtaatgtctcccatgcgagaattatggtcgatggttgctctctatctcaaacccgaatctatatattcttaaatataaatatctacactccaaaatccccaaaaaatgccacgaccactggcttcttcaagaggaatcagttgaatgatccatgtaaattctgagaaaaaaattttgctcggtggaaggtgaatatgcattttttttttcacttggacgattgattccaaatagttttacgcaattggtgggataaattctctgaatcacttgtagttgtagttagtggggtggccaattttaaccgttgtgtatatccagcggctatggatgattatgagacctactttgatttttgtaagcacaagggagggagttgctgacgtggcatgctagctttgttccacgtgtgcacatgtgggtccacgtcagcggcaaggcaaaaggcatttggaacttggatgcgcaaaccctgcggccttaattaatttattataaaaaatataaatggtaatgttcctttttcctctttttttatggtaaaatagctatgtggagcactcaacatagtgacccaacaagcacattattcactccaaataatctgactaatctattagcaatgggaggtaaagtagttgaacatggaatcattgagattctatcaaagtaaaattgtagccacaaattaaagataaactcaattgcaatacactcatgaggaccacttataatgcacctcctctgttttaagaaatataatgtggtacattatgcaaccaacctatgatgaaaactttaactgataatataaaaaaaaataataataacccttttcacataaaaacattcatgatttttcattagtgtggaggtttatattattcatgatttttcacataaaaacactacctgcaaataatgtttattcgttcataatagtttgaggtgattattaacatagatgatatatatttgacaccagtgaataaaatccactttctcaatcttgagagcaatttgtaacttcatttattgaggtattgcaacaaagttcttatacaaaaaatttctcaaaaatactagatttacatcagaacctgaactgaagataccacaattcatatcatgcaagggtgatacaaccgtgaccctacatcaaaggtgagtagtggtcgactgcaatcatatatgcaccggcctgcacattcctgacacatgttaatctagtagcttccgcgccatcagttgtgacaggagcaccaagacaccatgatcataacaacatatatttttcaatgataaggcaaatctaccacttacaaaatcaagtggaatttccaaccatccatggactccattccataacctggccaagcttgctttctcccaaaggtgacctaggatgcatagctatgcggtagtaggatgcccaaaattttcttgcaaatcttgataaatattttgaataatgcagagagagagtaagaacatgtacaagtggaatatcaccaactgaatgcatatataacaccaattgttggccctaattgtggtgaagatgtgatattagaggccattggcaactgttggccagcaatgcaccttcaaatagatataagtggagaaaccaaaactagcaaatgctaattcagtagtagcacaagctgatttatgtgtttcctatgtttaaatctgtgttttttttctctgactcttcacgtgtgttgtgttcttggccggctagctacctgtacatagttgtgttcttttgtaggaaaagggtagctgtcgagttatctattaataatcctagcaaaaaaaaggagttatctattaataaagaggttggtggcaattgacaaatactacccaacttaaccaaaacaaactgggaactaaagggtgaaacgcctgtttctttgctttaattcacatggccatgagagtctctgaacatgtggttgtctctcaagttagttaacacttggcatgtttacttaggcaataaattacagattaaaagatgaaataaactttagagattttttttgcaagaatttagtgttttgtttccttttattctgttcttgaaaaaaaatcaaaatgtcaaatctttttattccccatttcccctattttccagctagccatgaatcctttttgctgtcacattcctctcacacggtacaaggtacaagatcgaattaatgatcttctttcctgaaaccaacgaattagtgagctgggatgacttttcaaggcaataaaagcttctattgaattcattaaattacaaagagatgatacaattattttaagagaacacttctgacctctacgtaacacacatgcacacaaaacaactcacataatacataacggattataagagcaaggttaatagtatagcccactactagctccaattcatctatagcaaatctaatagcaattcatacaatagttgcttattatactattaatatatggtcccacatgtcatacacacactgtgtcttggagtccgtgttgtagctggctacagatctgtagcccgctgctcttctctctaatcttttatctcattaaaatatatttatagctggctaatagtctgctattgtatccgctctaaggagaattaatggccattaattcaacagaattgactaaatcgtcatctatgtgattctgggtaaaaatctttgaccacccactctgaccgcatgtgattgaagatcagttatattaatggtgaaaagaatgaaaagaaaaaggccggttatatcaggcgtgcatggagaaacatattaatcaactataggactgaacaaagatcgaactgcagatttgtaggactgaactggctgccgaagcatgcatggaaagaccaatatataactacagtacttaaagtgaaaagatgagagattatatgcttttagagatttaaagtggaatttttttgcggctaactgcatgtgtgtgtgtccggagtcaaaaggcacctcttgttagttgtgttaggatcagggcactcactctacagtttggcatgcagctactagatatacttaattaactgtaaaaaggaacataatgcaagttcagttcagttccctgtttcttctcttctttttttttcttttgagacaccagttctgttatgtttgatttaaattattatcttatattatcgatttgattaaatgaaaaataaatattttaagaaacaggattaacagatagcttaaaatgagtggtctaaacagttcactagaaaaatgtttttgagaaaacgtatttttcgaagggtataacaaataatctgtttcaataatccgacacataagctaaaaaaaggggcatcaattcatactacaagttttttttttccatggactatggttgcattagttcatggtaaactaacaaatagtagtgttttggttggtgttaccaaattaattaaacaagacaggacaggacattctaagagatgaattgaaatggacatggaatgtataagctgatgttttcgggggcattttgactctcattcataaatgtacatcagaccatggatctgtttgactctgtttttttaatacatcatctctcttgtcaacccttgcatcttgaaaagtcaatgaattttcttcagatatgagagcgatggaaatcaaactcgatcgagaggaatgagccgggatcatcacacactgaatgtctctccatgcattttctgcatatgcatgcttcaggctttggtgcgttagtttgctgtctgatctgcacctgccactacggatgactgaatgatgaacaaacggagtcaacggtgtgagacacacatatgccctgctcctggagtcaacgacgatgtactttaagtctctttaacgcggtctagatctcgatgggccgatgcatgatctgatcatgtactacactcagctgaaatcattgtagccactaacaaattaagacacaaagtgatgatcgagtgacagtggccggtttagttaggtctactactcgatcgacactatgctctcccctcccggcggcagttcgctttaggacaggtggcaatcttctaggacctgcttatctgagcgtctggcttcgactccctggttctcctggtctcttggcagctatggaaggagcggaacttcagggtagttgaattggcactctcctcggtctctgtgcttattgagtctatctactcggaaggccgtctgtggtctactgtgggcattgccgcttttggagatttgctaggagtgtagtgtggcttcgcctccctctccctttatgttggagaagttttcttttcgcagtagttcctttcatttttcctttgtggttttttctatctctctcccccccccaagcataccccagcataggcctatctagccgattgcgtcgtgtaacaaaatctctatttcttttaatatattgacgtgcaatccttttgcacgttaaaaaaaatcaacactatgcagcatgcatggcactgatgaagattcgaaaggtacaaatcatcaacatgcatatacatcacatatagtcatatactgagctaaaatcaatgttgcttgcaaagatgggatactacatactgacgagaaaatgttccaagatagtagtaacaacacacatggattgaatcgggcttaaacctgaagctagctagtgacacacacaaaggtgagggtgtgatgcatatcgttttcgatcgatagatctccatctctctctccccaagaatatggttctcatgagtagcttatgccagcttccaacagaacaaatgcatgctaagctagctagctctgtacaccgtcgaaatcgatcggtcccaagatccaatcggtcctagattgctagctgaacgtatctgtacgtaatcacctctccttttcttcgatatgtaccaaatataccattcgtttcgttacagacaagcaacttatacagcaactactctatcgtctgcactactgaagaatgaatgtctgatccagctaattgtcgatatatatctggagtatatatgtagtaacgtagtagctaccagtgttgtggaaaacggtgttaacggccgttaatacgttcgataatacggatacggagatcagtccgtcacgtcacgccaatgcggtcatcattagtcggtaacgaacgcataaatccgatcattaccgattaaatcgtccgtctccgtctaatcagccgtataatcggcgtgatgacaaaggtcgattccacaatccagctcattagctgtgccctttactactattgactagaagtttgctcttccgaaattctcacaaggcagcaagatgtaaaatgacaaggaactgacttaaagtttgtacatgagttccttgattttgacgatgatcaggttattggagtttgtatttgatgaagccgatacatatgttatttgggaccttgattatggtcatttatgctatgtactacattctcttgataattcatttcatgcattatgaacaaaacccatcactacatcagaattgagatatacagtagcagctatccattatgaacttatttaaatatcatatatggttattctatttaaggatatatagaaggaatatattaagttatatgcatttgtttatcaaaaagggaaaactattatcaactatgtacatatattttcaaaacgttatatttccgccaaattccgattaatcgtccgcattccgattaatcgtttagcggtaccctctccgtccgatatccgtataccgtcttccacaacactgatagctactccctccgccccatattataagggattttaagtttttacttgcactgtttgaccattcgtcttattcaaaattattagaattattatttatttttttgacttactttattatctaaagtattttaagcacaacttttcgttttttatatttacataaattttttgaataagacaagtggtcaaacagtaaaaacacaaacttaaaatctcttatattataggacggaggaaatagcatacatgcagtagttaggtatggtgaatgactgtattttgtgtatggatcaatgcaatgtcatccatcaagtatttaagtaggcatctgaaattctctctccttaattgacctggcattgcatgcagaaactatagcaaaagcaagggaaaataaaggagaggacaaacacgatgacacgtcggcgacacgagcagtgtgaggcgatcggtcgcgggccggcgatgtgacggtgcatgcatggagaccgtgtacttgtttggttagcaagtactatctctgtttaaaatataagtattttttgatgtctaaaatataagttttttttgacttcgatacaatttttgagatgctactttgatgaataatatatataaaaataagattttttttaaataaaaagaattgcatattacgatagtttgtttaatgataaatctagcaacaccaattttacatgattgatctgttttattttttctattaatagttaaagttaaaattatttgacttggcactatactaaaaatgcttatattttaggacagatggagtaaaagcaaaggatttagatttagattcttgagtattaattttatatcatttggtttatatataggaacgaagtacgtgagaactatagaaaatttttgtttcctatatagttgtaagacgaaaagcatagaaaattttttatccacttaaatctcattaaaaatcctagattattaatgtgtgcatgcatttttgttccttctattattctatttttatctatgggttgatattactctaaaccaaataagccctgaatgttctaatagatgataagattttctattttttttatgatatttaagggtagaaacaaatgaaataactattacataaagttattttttcaaaacatattttgaataacttgtatacatatatttaacaaattacgcccgtcatagatggcatactatctctgatgaatcatggttatgatctgttatagattatctgtgagggttattttcggtatccatatcataaaccggctgcattgacatattatagatgatccataaaggatgccctaagctgtagtagtgataatctgtaagaggagagggagagaatctgctttactattggagtgtcctttgcttttggaggggaagcggcgagtggccggggtagcttgttgaaagcctctgaattgcattggattcgcctaattcgtcgccggtgacaggtcggcacgtctcgatctcctgcttttttttttcttttttatcattgttctccggtcctcgccacagtgcattggcagcatctcgatctcagctttttttttgcaagtgatgcatggctcaactattcatatgtaggttttatattgttacataattttggtaatttggttccttaattggtatggagacaagatattgtacatatatacttcatcttaaaatcagtgttatgtgtcaatgaactagctagctaggttgaataattcatgctagaatctatgtgattttgaaaatgttatggcaattacgttgattttttttattggtgaaagttaagggtttgtcccatcacatctttttttaatacttttttttacttctaagactttttagttgtatacgcatgaacagagataaaaaaaatataatccatttttattatctgtaatctattttcgttatgtaaaagctaggctaaataatatgtactcgtagtgctgtcatgcactgacaaacacatctcatcaggttcgaattgtagaaatatgttgccaggttatatagttgttatacgtacacactccttgaagcatactctttttatccttaaaaaaaaagacaaccgagtgtctaaattcgttgtcctaggttacatcacatccttatctagtttgtcttttttttaggacggagagagtactatgcatgtataagtgtgctgtatccatccaaatataatttattgaaaaagaataaatatgtgtaccgagagtctaaaaattaagtgaaggccccattcctgaattcaccggccattgtcttttgcgaatttgtcgatagaaaagttacggtaataattaatgttttgttttgtatgagatttgtgtgaagtgaacgtaactgttaaattttttatggtaaaacctactaattcggcttcaagttctaaacttggtacgaacgttcatagctaattattctttctgtggtagacaatttacctatcagcaacaaggtgttcgtgatggtttatacaggcttagtattattttaaagtgcttaagtttacgtgtgtgttcatatgcagagggtgagtatgcgtgcagtgcttgcgtttgtataatgtttctaaaggaaaaaaaaagatgtgtctggttaccgtacaagcagtagctagtattatcttatctgaaagcgtggtgacatacaaatgtgaccaccgaatcaaattctggaatatgaagaaatcctgaagtaaatccatccatgtaccgatgtacgtattaaccacacaataatatctctgaatgaccatctgaagttctgaaccagctaccaactggggatgataagaaattccaaagtaaatccatccatacttagtgcgatttattaaccacacaataatatccctgaatttatacttaaccatgcatctgaaccagctatctattgaggatgcgaaagtttttgtttgtacatgttacacgacaaaaataacacactactaaaaaatcttaacaggtgatagctcatgggtgccggttcatttaaaattgacacatattgaccgtttcccaccattatggggtatttttttaaaaaaaccggcacctttaagaacttatgggtgccggttttagataaaaaaaaatcagtgcctataatattattatgattttttaaaaaaccaacgcttatgctaacattgaataaattttaaaaatatacctattttttcataatttgtatttatatacatgtgtggggaaatttggcgaaaatataccgcctccgcgcgttgggaacgcgggaacaggatgaaagcgcggcgtggcagcgtgggaacgcgatgccgcatactggatgtgcgggatcggctcgatcgcgcaggccgaaggtgcggaaccgagtcggtcccgcgcgatggctgtgcgcgtgcgctatgtaccgcaggaccgggccggcgcaccctcgatcgcgcagaatggaagtgcgggaccgcttcggtaccgccacggtaccgtatttccaggatgcgggaccgatgtcgtcctgcacccccgccctgcgtgatcgttccaaccctcggtcccgcgcatccggcatgtgcttaatcctcgttcccgcattactagcaagctggttaggtatatttttgcaaattaattccacacgggtatataaacagaaattatggaaaaaaatggttttttttaattttttctactaacattatagcctgtaggtgctagttcttaaaaaaaaccaacacctataattaaaaaaaataaaaaaagtcggcacacccagcctgaccggcgttatctactcgtggagccccatgtgagccacatctgccccttccttttcttcctcttcttcctcctcctccttagcccgtgccaccacccctctttttttttcctccctccacctatttttggatccgcagcccctcctcctccttatgtgtcgccgccacccctctttcctactcctcctttccatctgattgacaccaccatgacgatggagaagtccggattgatgacggcgacggtggcgttctctgtgtgtttgcgtttgcgattttgttaattttgtgattgagcttggttgatgggatgatggtatgtcagtgatgattttgattgcatttggttaatggggatgatgttgatcttagtgatgatggacaactgctcgatgcttcggctcgaatgccgactttttgttttttttttcattcctagaatctcaaatgtattgtctgttgggtgtcaattgggaaatctagcacctatggccagttctgaattggcaccaatccccttttctatagtagtgacaagcacgagtactccatggaatatttatttgttcagtttgttgtgccaacaaatttttcgtttagaagcgtagtacaaatgcaatgctcacattttcatgtgtgtagactcactcctataaatatacagacacacaatcgaccatatgagcatctctgagaagctggtctggaatgtttaagattgatgaagttaccattggcataattaattttagattgatgaagtcatcacaaacgtctcactcgacaagtacgtcatatattattaaaagaataattagccataaatacaagcacccttgtcaagtctattactcgaattagatcggataggtaggtgcaccataagctaaccagctgaactacgctctcttcatgttgtgccaattaatttgaactcagaaccatcgattttgttatataagggcaaaaggaagcatgtagtacagcttggtggaatattactagaatttttatttatggggtttaaaatctgagtgcagtacttctgctcgggtcaaacgaatatgagggtacaactaaaagatcactccaacaacaatcatttgtgtaattgtgtggaactcgaaagtttgttccccatccatgtatgagaaaagaaataaatatttattatatcttgtatttgactatgcaagatttgtgctttctggactaaagaaaaagaacctcttgcctttgttggattgcgaagacatggctccagttttgaatgggatatccatggtagattctcagtagccatctggtttcacctagacaaaaaaatcggagccgttgcctgtgtaggtaatcattagcccaccaattggatggctctggtgtagagagaaatgaaaatggatggctcttgttcacagaacatgtgcgccatgatcaacaagctagagtaaaaggtgccatgattttgtgtgctctcgtcctgcatgtgtacgttttacaacttggttagttgtagatctctatgtgttctatagttatatactgcaatatattatatatgatgtgattaatcatttcaaaagaagacataatgaattggtcagtcttaatatacatgcatggaaaactgcaattgacaaccaaacaacgctaaaatctatgttacaaacaagatggcatccatgaccatgcttgggtattatatagtggctatcttaatatacatcaatacaaaatctaactatatatcttaaaaatatatatagtgtactaaacctgctgtaagatccagaaataaacaactgaaatttaggcggacctagaacgaaatgaaggagggtatctctagcttaatttactctactttatatcaaatttaagttgatgcatatgcctaagttagtattgagggagatgcgcacatggcaaaaatcggtaagttattactaaaaattttcttgaccaggtttctgagcacccctcccatactctacctccgccccctgaccaatagtatagctaaatggagtggtagtatataaaggtctaaacccttaaataaaactaaatttacgatttagattgatttctgctattagtagagagcacagtagcagaactcgtgtaatagtgcgcgtgcacagttgattcgtaccagtcagcggcatggctagctgtctggcaatcacgatacatatatcgtggttgtagcaacagagatgcggcaggaggatacaccagaatcggagggcgattggcgagatcgggagcttgcggccataggtgactgaactagtacatgagtactatcttttccgaagatcggttacagagaaaagctaggcaaatcaatcagaaggcgcacaacgtactaacgtgtgtatggccggtgcagtgcagtgtacagtagttggctagttgcaatatgtagtgagtgagactgtctccaacaagtgacccataagggcacctaaacctaaaataggtctttgatagtactatttcagcctccaacagagtacttataaagaagacccattttacgtgctataagaggcataacctaaatctgagtatcctctctcctgaagacctatttgcagtaagggttctcttttaggtcttattgctggagaagaccaaaaataggtattgaactctttgactgtagcgctatgcaaacgtgaaatgggtcttgtattttgggtttcattgttggagatagcctgaggttaagggtctgttcactttgatgttattttcaaccataccatttttttggtaaagttatctaaaaaatatctatgtttagtttgttgccaaatttggttaatacataggaaatcatgttaaaattttgataatattaccatcttactgaaattttagcagtgctaaaacttggtaaggtttattttggctacattctgaacaagccctaagttttttttaatagcttaaagattctgagaagcatattggttgattattagtttctaaaaatatgaaaaagctgagttttctagcttttgactttttaatttatgtttaaattatatattacaataactttttaaatatgaacgaaaaagctaaagtactagtttgaaagagtttctgattctaaaagaaactgtagctgtcatacgttttcccaaatagatcttaaagttagtgagctgttgaagtagtacgtaggtgtgtttgtggcaggtctgtagcatcgatccaatttattcaatccacccaaatatacgttcgtgggtgcgtgtacaggtcgggccagcaacatgcatgaacagagtagggtccctatcgttcggctaaacggctaaatttgtagataaaaattttataaatatgttcttggtgacttaaaaaccaatgttgaaaaagaaactacgttaaaaatatcttaaaatcaatcttaaaattaagtttaaaaattcaaattttgattttttttttctttggctgattaggccatccgataggagcctagctagtcagatggatattaagctagccgtacgcctcagccattgagcatcgatcgatcggtgaatgcatatgcatgcatgtttagtcgatcgacaagctagatcgtgtcagattttgagatgagatcctccttcgtcgtcgtcgacccaactccggccggacgtcaggccacgccatgcatgcgccgccgccggccggtgagatgagatgatgaggatcgagctggcgatcccacctggcctgtcgctgtgacgatcgagtgcactagctcacgcactgatcgatcgatcaccgcgtaaatactacgtatccactatatacacacacgttgtcggcatctgtcaccgtcaccgtcagtgtcagtatctactccttccgtctcataaaaaactaaattagtactggatgtgacacatcctggttaggggtgaaaacggtatggaaacggacggaatccatctttatcgttttcgttttcatattttttttcggaatcggaaaccccgaatacgaaaacggaatcgaatattatctaaaccgaaaacggagcgaaaacgaaccggcgcgaatacggtaacgaaaatttatcggaataaaaaacccctcaaactgataaatccaattgaataaattatctatgtttaaaagagtaatgttgttgataagtccctatgtaggacaaaaaatattctataattttagatttgcataataaatacttttttaaaaaataacagccaaacaccatggtattcactatttagtgcttcaaaaaagaatccagggtatttcagtcacaaaatttctggtaattccgagaaaatttttggaaattccgagaaaattttcggaaagtttccgaccgattccgagttccgacggaaactgcccttatcatttctgagaaaatatttccgaattcgtttccgtttccgaaaaattccgaccgacatattccgttttcgaaaataggtccagaatctggaaagtttccgtaccgttttcacccctaatcctagtaaatccatctagttcagattcttttttaggacggagggaatacttttacaagctagccacttcttctttcttgaaaaacgaataattaaatgtgatacatcattgtatctaggagttctctttctatcctaaataaattaaatctaatgtgatagtatattcatttcaaagtaaacgaacctagcgtgaaatctagctgctgcaaaatccaccggtagccgatcgagtgcgacgtacgtacgtgcgcgcacgcggagtcagtcgacggtccaacgctcgtcaaaccgcggcgtgacctacctacctacctaccggcacgtacgtacgtactagcgatttcacggcacgattgcatcgtcacggggtaataattaatttttaatctattaaaataattaaggtggtgcttttcctaataaaaattgaagatgacgttaataagtaaggtattaattagggcataataaattaagttttaattattgtaaactaaaaaattgatctatctgataattggaagaaaactttgattgaaaaacgtaacaacgaaaattaagataaaatatagtatatcttaattagaaaaagaggccatatagctattactccctccatactcataaagaaagtcgtttaggacagcgacacggtcttcaaaacataactttgacttcttgtttctatacttttatgagaccgtgttttaggacagttgtgttttggagaccgtgtcgctatactaaacgactttctttacgagtatggagatagtacatataatttttacatttttaaactcaacaacttgagagttatttataatttatattctcaaggtttgacttaaacattatcctaaacgacttacttataattacggagggagtactccgagctttgatgcttattatggtaattaattaaagatcgcacgcacagtgaatatacatattattaagcggccgctttgtgtgtggtctcaaacagtgacggagaaagcctaggcttgtatcctaaacatctactaaaatttatcaacacttagtgaaaattttgaaaacacaagatatataagcaagtttagcccttagcttgtttgtttttttttgtctccggacgtctctggtctcgctaactaaaactggccagacaaattgagcgacaaggtatttcgtcattgtcgagtgtcgattgaaagcgagcaggccagtagtagttatagcttactacccgtacgtctgtcttctcaacaaagcggagaattagagaacttaaaaaaagaactgacgcagcagaggcttctaacagaatggtagtagcatatgcttcacaatatctgttttgggtccgcatatattaatcgaacaccgacccaccgacatcgatcgatccatcgattaggtcttgtttagttgccatttttttttccaaaaacaccacatcaaatctttgtacatatacatgaagcattaaatatagataaaaagaagaactaattgcacagtttacatggaaatcgcaagatgaatcttttaagcctaatttgttcaggattagcgataagtgctacagtaacccacatatgcttatgacggattaattaggctcaataaattcatctcgcggtttccaggcaagttatgaaattagttttttcattcgtgtccgaaaactccttccgacatccggttaaacgtccgatgtaacaccaaaaattttcttttcgtgaactaaacaaacccttagtactcttgtattccaaacctgctactccctctgtcccaaaatgtttaatataaacatttttgaactttgatatattctttcagatgctattttgaccaacaatatttatatgagtaagatattttaaataaaaagaattatatattataatagtttatttaatgataaatctagtagcatcaattttacatgattgatttttttttatttttattcatagtcaaagttataaatatttgacttgatattattttaaaatgcttatattttaggatagagagagcacataatatacttgcaaaaggaccagtggtacgtaagatggaaaaatgaataggtggagtcgttgatatatatgcttttatttattagggatataactctgccacctatgaatattaggtgcacacatgagtatgtttttactaggattttagtattttagggatttactataggccgatctctattcatgtgtatgttagaggatgcatgtaggtgtagtagcagtgcgaaaaataagtatatatctcattagataatgtccaattaatgctagctgaaggtgctagctagctaatagagttttttttttctctctcgagtaaccatcctactgttttgtgtatgttattcaaaactatttacaaccaaatttgttatttttatccttttttcttgtttatatgtatttgtaagttgaatttgatatataagtttacacagtgatatctcacataacgattgaagaaattaaaggtttccaaaaattttttaagtaacatataaaaacgagggaatatttcctgatgaacaaatgcacttcccgagtaaaaatacatactcggccaagtgctgggtcaactggctctctctctctctggctcagtgatcccattccagtcacctcagggcttttgtccaagaacacaattaatcaaaaacatatgtgcttttgcttacggtttactaattggctggtttgattactgcattgcatggcattggccgtgcaagcggatattccagggtattatcccccacttttccgacaaccaatgcatcatcatcatcatcatcgtcctcgtcctctgactgaccacctcttctttaatttttctccttcctttcctccattgccgccctttttcccctacattccacgagccatccactcaagccaatggccgagagaattgtaggagtagtaacagatcagagagatggccaagtctaagctagctagctatatagcctcgcttcgcctctgcttcctttcttccaaaaggctaggcttttttttttcttttcaatttacgtctatctttgtctcgcctaatttcgtttgcacgttaattcccgtggtaaatgaatgcttgagttttggagtgactactggctagtgatgggttaatatataatggccgtttgtttctgatgatcagctctgcttttgaggctagctagacattttttttccttcacaaattaagcagagctag

SEQ ID NO: 7980 - DNA, 95038 bp, Oryza sativa
cgaatctgtattcattcagaatgtagataaagttctgagtcacacaagatgctaaaggcaagtctcaacttcacttggttaaatcagtctttcttttcagtatatctcccatattatgcaggctgtaagtacaaactgaacttatttcagattgtaaatgttcaaatcttaaatcagtaaatgcattctcatttcacaatcacatccctttatggacacttaggataaagaaactaagtgaactaaatttcatgatgctatatgcaagtcatcataactattagggaaccacatattagagaactttgttcacagaacttcgcagataaaaaagaatgtgcagttacgcgtttaagatgagccatcatacgctacagcttttgatagcttcaaccacttgcctgtctctcataagtcataatcaatatgagaagggtgagatatcagttatgagagaggcttgcaggtgtgccaatggcgttggaagtggaagtacatgatagtaggttatattgtaatatagctcactaatatggaaccaatttaaatatgtggttctgcgaaattgtttattaaatagtatttcctacaaaattatgacatcttacatacagttatgtgaaatttactcaactatgtatgacctattgggttggatcgttgtcaacactcaacagcagttcagtagtgcacaagggagatgaatctaaaataatcattaggtggagcaaaataggatatgcacagacttgacggtacttaatgacaagattatggtgatcaaatcaacagttcaatgaagaacaagtgctcagaactttgtaagcttattacttaagtaaaaggaattgtaagcttattaaataaagggcaaaaggagatagagaaaataggtaaagctactttacttcaattaatctctccacttttactaatttaatagcgatttgcatctcttgtcaattctagatgcttagttgcctcccaaagatggtactaaagttggctaaatgttcgcgttatatgccaagggcagatgggcacaactacagagattgtattattggagttaaatatatatagccttttgagaatcaattctccacatacgtgcgtgatctatagacattcacaaaacctattctgatctacatatattctccaaaatcacacctttccacaataattcaagaggttccatgttcacttctagtcagccatccgtactgttttgtttgaaagaaaagcatctattgtcactgcctgttttagttagtatttatgttcatctgccatgcagaagtgaaaaccaagtagaaatataacatgaacacatttgctccggataggcaatttcttttcataccttcatatggagtaatgtaacagtagggttatcacttatcagcaacgtctctcttaagaaaactaattttgaattaatatacttctatgggttccaacatatttattttgaataaaactaacatatctatgtgacatcccataggccataggtgatgacctattaaatacttaacttaaagtcgtgtgattatggcatgcatgtgcagaccattggataaaacctaacttttcagattgactgccatggagacggatatatcaattctttagcaccgcatgctaaagaattgcatatatgatgaagttcatcttttttagataatatatgatgcaatttatcttttttagataatatatgatggaagtccatagtgcctatctttggaggggcaaccaaccaatagaccctatgcctttccctccaaccttgaatagacacatcagtagagcactactcctgtagaaatgagatcgctcacatagcatttatcatacaacttttccctgtgacttggatgctttagcccccatctttaaatggtagagcaagtttatgtcgatgcttctggcctgctgacttgaggaggaatcaattccacgcggaagagcaaagggaaagagattacagacattatcagttgcaaatactgtttccactaaataatgctggttcatgattcatggaatgtcgatccgacgcagcaaataaaagaccaacttgtggagatcaaataattccttcctatgaatggatactgatttgatgaaggtgaaattcagtccaaattgcagctgaatgatactcagctttcataaaaaagtaaaagatccgaaggtattaattctaatttaattatgatttgcaaagattgttccctgtgtcccctgaagaatttccgttctctgctccctcagagggagctccagtgttgagactcgtcattgccaatttagatttttcatctcgtgctgccgaaatatcatagctgtagtttttttttttgtgtgtctcctacgtattctagttggtgattggtaattcaaaacagcatgaagtaagataccttaaagcttgggcacaaatgtgaactagataattatattgagatgacaaattgacaatgacaaagctagtcttcatctatgaagctctaagttaaaaaaagtgcaaatcaaaagcactaaatcccccattccctttcatcactatgaatataatctactcgatccaatattaaattggaaagcagcaacactccccccaaaaagggaaaaagttaacaaactagatcagttcatcttttgatctcttgttacagttaaacaatctgacttaaagtattagcagctcaacttttaatattcatggtgattgaaagtgataaaggaggccaagggtaaggggggagggaccaaatcggtagggtacctggagcaaatttggtagggtttgcgactgcgagccgcgcgatggaagcggaggtctcgcggccactcgctttgcctcctccgctcctccgcctgcccgggcggccctcgacgatcgccggagcgcgaaccaatcaccggcgaggtcgtcgacggcgccggcattcaggcagcgtgcgcctcctcccgctcccgcccgtcgcaaccccgaccggcccctatccccacttgctctcctccgccgctctctccggtggagagcacggcggcggcgcgatcacgagttgggctatttgggccgacgacgttctcagtggttttcacttggaaagaaatatgaaaaaatttccccaaaatggagaaatacgaatttacagtttcaaaaaaaaatctaaagtgaaacaaactaacaaagaaagtttaaccggtctaaagtgaaaacatgagttaaacggtgatcaaaagtgaaacatcagtaaaaaaaattatgatctaaaaaaaatatgatctaaagtgaaatttactttaaattttttccactcaattttcatgtaccaaaagttgatgaggcgagaaaagagagattataccggaaggaggtcataaaataaaggccactgttttttcttctttgctagaattagtctctttcctcatactatatgttgcattttcagatgaatttttggggaatcttgattagttatcaccatatctattttttttcaaaaattgtcatagccatttgaattattttctagaagcttttgcaagtgtttcttatgtgggccaactgatgggccatatgactatctgggctacgccaaatattattcgggctagaattctacatggggtttcctggattaatatttcatggatgacaatttaagcctgcatcacaattgacaaacaacaatatgcagatttccccaggatatttaactatttgctacttttaagatgtggcaactaagaatttgtcactcgcagtctataatatgtgagtccaataaaatatccttaattgtcacttgcaatagtggtaaatagttaaaatatccttaactgtcacttgcaatagtggtaaatagttaaatatctcgatttttttctctatctatatctatatggacctttcttaggttctatttaggggagcttctaactgctgtagcttcttcgagaatcagaagctcccccaaataatctatcttttgctacaaatcctaagaagctataggaaaataaattagaagccagaagctgggaaactcagcttttctaaatgttgactaccaattagctgcttctcggaattttaagctcctccaaacatgctattagttgacctctttctttcatatcctagttgaaggaatatgcggttttaatctaagcttcagtatactccctctaacttaaaatggagtaatctggtatgaaatatgatatattttaatactacgaatcctaatattattaggttgctatattttaagatgaaatgacgagggagtatctgctagcattaacatcatgatcagtagccagttatccacaacagagcgagataagatatccatgaaggaagctcctgctcatatgcatagcttttattagcacccacaccttaattaattgcacttaggcatatcatctcacaattttcactgcatataacacagtgaacacacacatgcatgcaagaacacagaagagacaacactggtagtattctctctgggataaaaagggcatgtcattgatgccatattgctgcaaatctagttcgattttgtgagagtatattcagatttagccctggcctttgcagcctcgagggagtgcttcctggacagctccaccaccttcttctccccggcgatgaagtaggccatgccagcagctgcatcattaaccaaatcaaccatgaattaatttcccagagctcttaattatcagttgctgatctttttcaagcactattatctgttgtagtaattagctagcatcaaacatttttaccgtaggtgatgatgactgtcttggcgactgggttgcccagattggcctttgcccacttggacatacgaacactggcaaactgcaagggatcatatcaaaagttgcattggttcagaataattcagatgttgttcgcatccatgataaatgtgcattgctctgacaagaacgagcacattgtgttttttgtcacaagagtagttaattatgatcctgctaattaaattaattaattaatctgcttgcactcacggtggggatcgcggtgcagacagcagtgacggccgctgctttcagcccggcaatggccgcctctgaagtcaaaacaaaaaccatccatatacaacatcaaacaacatcacattgttagaatctaacatgcaacgatcaaacatacaatcttagcaataataatcagatatcgtgttaatagctagctaagctaggcagcaggagaagaaatcaccatgggagctctgcttggccatggcgaacttctgctcgatgagctgggaagaatccgtagccttgttcgacatctcgatcaaaacacaccagatcgacacacactatcacactaaccaactagctaattcaagctaatgaatgcgagatcgatcgatggatggatgatttgtgtgtaaagcagccatcaaatcctccaatttataggcttttcagacagcagcagaagcaggaggaggaggagtgcaccacctgacgacacatttcgtcaggcaaagaaagaacagcgaacccccggttttgccatggcggccgcgacgaagccgcgggctcctggagcccggacacgccggtttcgcaggatcacgccggcggcggaggcgcaaaccacgtcctcgggcgccgggtgcaacaagaactcggtgtgtttgcttgctgaacttttggctgcgtgcagtggcgtttcttgcccttttggttgtgtgcacacttctgttgatctctttgagtgtgagaatgggatggattaatatccattactaatgagacatatttggaactgaattctttggataaagattttggaaatgatggctttgtaattttggattaacagcttttttctggtagctatttatgccggccaagaaacctacattgtcctgtgggcttaattaaggggttcacatatttatgtatagtaaggagaacaatgtgctactggtaagtataaacaaaaatgaaatgtggagatttttttttaatttacctcacacaatttaatcgcgccaatactgcacttgttatttgtccactcgtttaaaaggaaaatagcaccagccaggaggatttacatgctcaaaatgtacttagattacttgcttgcagaagcacaaatatctatatgtgtcatcaccagcctaattaattggtagcaaaattgtgacgaatctggaaaaaataattactagtgtcccatatggtgctaccaatagtccaatacatgtgtgacgaactaacgctacaagtatcaactagaaacattgagattgcaaattttgcatgctattcctgggtaccccccccccccaaaaaaacaaaaaaaaaacagcatcccccgccataccctgccctccaaaaaaaatcaaaaggaaaaactcacctctaatagtagtatcaaaggcaaatgaaagaaagaagatgtagctagaggggaaacaaattgatcatgcaagtgatttgaacttcaattgagtaatcatgttaccggatatagatcgcctcaaccttagagtccaacaaatcagtatggcgatgccgcaatatttggtggcacccgctggagatggatttgattctatggcctaatggatggggcaaaatacaactagaaaaccaaggcaacgaaaaattgaagtcaggaacattgatggtggataagtggagaagacgaggtaccatggaggaaagacgaggtagcaagctggaggagaaagataagggtaaaggaggatcaccgacaaggacgaaggaggctaggaaagcatgctcggggctagtcttgtatagcgtgtacacgtgcagacgtatgtatgcacatgcggcacgaggggcgtgaggtgcacccgtgttggcggtctcaaataaagcggttgtgggaacaaaaataatcccaatagcaattattactaggtgtggaagaaaatcaatattacagccagatttaggtaaaaaaaaagatgccaacattcataaatagtttatctctaagaaaaaaatttaagaaacatgatgaaagcaacatggtttgctgtcctactgattttatttttcaaacacgtgtgtctttcttttttgtttgaaaaatatagaagcaaaaataaagaatacatcagtatttttatatacaatttacatctatgaatgtctatgttgtaactacaaaataaaattgaactactttttattcaactagtgttaatacatgttagtagaaaaaataatgtagcaccacatcatacatgcgtattattttggctttacaaccgttgttcaatttacttatagtttatttataagtaccaaacaaactatcatgtaagttaaagcgaccaacaaaactattaacttgaagaaaaattaggtaatttaatttttaaacaacaaggctatatggatatcagctgcctaattatttttttctcttatattttttttctttgggacataggaaggttgggagagaaggttcatttactgttttattacaaattacaatttacaaggtgagttccaccctcatgacccgttagaacactgaaccggttacgttggcgccttttccgtcgcggcttgctgagcccaagctaaccagccataagtgggcctacaaccgattttttttattttaaattttatttattaaaatatttacagaaataattttcgatttaaaaattttacaaatagtcgcccatcgtcatctgggagggtccaaagggcattttttccgacgtggcagacggctgtttgctctgtcataacggccgccaccgagggcgctgaaattttgtaggcgatttttaggacatagcaaaggcgatttttggctctagggggccacctgcaaaagggctgggagggctgcctggtagccccctttagtcctctaggagtgctattttctactgtatgcgaggggtagcatttttataggcagccccctgcacagtaaaaaatacaagggtattaggatgtccagattcattatccagtactatattgaattttttttagtaaatttcataaaactacatatactttgcataatctatcacaaaactatatattcaatgtattcatttatcacaaaactacaggtattttgaatagtatatcacaaaactacagatgtaagaacttgtttcacaaaactataggtttaatatcttcatttatcacaaaactacagatttagtgtctccattctcacaaaattagacaataaatatgtagttttgtgataaatgaagacactaaatgtgtagcattgtgattcgttatacactaaatctatatttttgttaaacaagttcttaaatctataattttgtgatagattgtacaaagtacatatagttttgtgataaacgaagacactaaatctgtagttttgtgaaacaagcttttaaatctatagttttatgataatttaatataaaatacctatagttttgtgaaatttactctcttttttttaaggagggactacctagtagttcatcgtaatattaatctttgaattcctctatatatatatactgcacgtacgtatacatacgcgagaagtagggcgcaacttcttgcgtgcgtgcatgcacagttggagttaaggacacatcagttgctttcatgcatgattggtggaatgagtattaaacaaaaacatatgcacagtattcaattgttcggctcttttgaagcaagcaacttagcaacagagtataaataaatctcctctgtcaaaaccgtcagcaaatgcagactaaaccgccacctttttttcatcacgttaatttcttcagtttgagactttgggaccggtccatctaacagagtaaacaattactgatatgttctcaccttatatatatatatatatatatatatatatatatatatatatatatatatatatatatatactctatatatactgtttatatcctacttccctatcctaaaatatagcagcaacttagaatcgaattttacaaatctgaagaatttctatcaaatttaaagtgtccaatccaatacttagtttgctatattttaggaggaagagtacttaaataaaaatggcacacagtgctcttaatgctaatcttataatccttaattatacatgacccattttatctcttaccatttgtccattgcagtaatttgattatttcgcacgaattttctgtttatacgagcaaacaatacactgaacaggaagagtacaataacaatactagttgtgttgtgatttctgaacattattactgcagcagtgttacatgaagttattagtacaagataggagtacatgcatgtattcatattcaggtgtggctagataatgcctaatggcaagaggccaggatgagcagctagctgttgtaaacggttcgatctctgcaggggcgtagtacttgtattgtattactactactactactactacatgatacagatactactctgatcatatgcagctagctagccaggtagctagaagtatatataatatagcatatgttgtgttcttgtaattattgatcagggcctgaagaaggcagggtgggggcggccggtgccctggaaggaggtgttcttgaggtgttcaggtgcgttctcgaaggagtgcctcctggccagcgagaggatcttcttgtcggcggcgacgaagtatgccatcccggccgccgtgcagatgatcagcgcctgtcccgtcgggttgatgttggccttcgcccatggcaccatcctcacgctcgccagctgaaataaacagcacacacaagcatatgcagctaagttagaaaacctactcttctgataaagaattaattgacacaagaaagaagaagcatttgagaaagaagagagactactgacggttggaacggcagaggcgatggtcgcgacagcagccgccttaacccctgcaaggttcgcctctgcagatcgacgaagcatacatcagtttgtatatattcagttattagcgccatggaatgcaagaagatttgacgcaaaaagaacatgaatgttattacagtagtactagctagttttcttttgtaaaacacacgtaattaacgtacgtacccctggagcagcgcttggcgagggcaagcctctggtccaggtgtgcacgagtcaccgtcgttgccatcctaattcaatccctaactatgatccaaatcaaatttcagttaaccgctctgcacgcgatgagcagcagtgaatgtgtgagcagatagatgatggagtgatggatgggttttggaggtagctaggcctgcgaatttataggcgagacgaagcggaatgaaatcggtggacgatcgaactaggtagatagcaccggagaagcggcgggacgtggtttttgggcgaaaccatgtgtgcacgtgtggccgttgcctgcctcgatgatctgctgaatggattccattccatatgcctcgctcgatgtattcctatccgtccacgcgtccagggatggtttttagggctccgcaaaaagaaaattttttgaatgttatatcggatgttaatttgacctgttgtcggaagagcctttcggacacgaatgaaaaaactaatttcagaactcgcctggaaaccgcgagatggatcttttgagcctaattaacccctcattagcacatatgggttactttagcacttatggctaatcatggattaattaaactcaaaagattcgtcttgcgattttctccataactgtgcaatttttttcatttatctatatttgatgtttcatgtatgtatccaaatattcaatgtgatgtttttgggaaaaaattttatgaactaaacagggccttactaatgcaactacaggtcggtgcatggggctaagttaaattaatctatctattgctgctactcaaaacacaacattgatagatggaatccatagcatctcgatcgataactactactaccagctagcgaaagagtagatatgaaatttcaaaatcgatgtaaatttttgagctatcttgggcttaaccatgcatatgcatccatgcacgcatgtaggttcctggcaaatgcagtagtaggggtggtgaggaaagtgctactacctcaatttctaataaatgacgatgttgtttgatcattcgtattattaaaaaaatatatataattaatatttgttttgtggtgagttattttataatcactaatagtattttaaacacaatttatatttcatgtatttgtataaaatttctttaataaaatgaatgttaaacgtgtgtctaagagtcaaagtcaacagcggacatctatttaaaaaaagaaagtagttaattaggagtaagcaccacattagtagttaatctactgctccgtttactggatggtcaattgctaatcatgtgggcggtcaggttcaacgtttcctgtggtaagatgctgctaccaaatagccacagagacacatgtcaacaaaatcaagcctagctactctcagtactcactgtgttgcggcatctttcaatttattatttttattttttttaaggagcctcactgttgcagcagcaatgcatgtgcaacagacacacaagtcatgcatcttcttcaactctaattaaacatttgcaaatgactattgtaaataaatactggagtactatcatttttctgcttgctagtgttaatcacttaattaataatttagcaattaacccatgtggagatgaagggcaattagcaattgctagtaggttttttttttcttttctgaaactgacggtgcatgggctagattggtgcctttgccgtcagttttgggcatttttcggccggcggaaaactgtgtggcgctcccagttttcggctggggtgtttagagcaagtttaatagtataccccactactatcttcaattcatatattgtcaatctaatagtcaattcatacaatagttgcttaccatactattaatatctggtcccacctgtcatacacatattacgtcttggaatccgtgctgcagctggctacagatctgtagcccgctgctcttctctctcatcctttatcttattaaaaatatatttacagctggctaatagctagctgctcttaggcgttggccgacgtcattcaggccagcttcgctctctgtggcccgggctaccaccctcttgtctgcatgcctgccgcagcccattgctctagggatcgcctatccccatttctgatgctatctatttccgtcccaatatataatattttagaatcatattagattcattttagatttgtagtttcaggataggtctaatctcattctaaattgctacatattaagattaaaattaagattaaaattaagattaagtaaagtcgtataaagcaagaaagttattagtacataattaattgagttttaattattataaacttaaaaaatagatttattcgatagtttagaacaacttttgtaaagaaaattttcgcataaaatatattatttttagtagtttgaaaaacgtgctaaaaatcagtatcttaattagaaaagaacgagcccaggatacaaccaactttgctttactgataatttactgaaaactcctctttttttgtgtgttcttaattaataacaaccaacggggttcacaaaaccgatcagttttcgtgaaactgctatatcttgatttgtgaaaaccgatctgcattagctagtttccataagtcgttgatagaaagtcatcggttttttatatctgttttcgataaatcggtgtggagcggttttcacctcgaaaacaaataagtaggagaaaactgtacagtagttgtcgatccagttcggttagtagggattagcaaagggtagcaagaaactagctacatgattagatcaatcaatcactggctgcccatggtatagatcaccatcctcctccctgtttttcactctatccatggctgctgctgctatacagtcgatgcattgactctttcctctatctgtcactcagcatcgatgtacatagacggatgaaacgctggctaaaattaagctatagatgtctcatgagaaaccaaaccagcagcagttagcagcttgatttgggaaaacagaacttccattcgtacatcaatgatcaatcaatttgttctcttttggccgtattgagctgcgatgataaggcaataagctgtaccgtcgaggtgatgtgacgcgtatcatattgttataccgtttttctgtacgtagatactactaccagcactacattttctgaaggttcacatcacctttgctctgcattagtgcacaattgcacataatgcataagtatgtgctgtatttacaaatctttatagctttggccttcaaagttcacaccaactagctaggggatgcatcatgcatgcatacagtcattagtaatttgtaatgcgctaacacatgttgtcagcgttcatacatagcattatgctgtttttatctttttcacttttttccctttgtcccggcaagaaaatgttctgaataaagggcagacaagacagcaaggaaatttcagaggaagttcagaacggagtgaaaaaaaaaacaaggtactagttctcactgatttcatcatcatcatcttcatcatcaaaactaattaattacattacaacttatagaaccattacacagcaagcacagccatattgtagtagtagcggtttatccaggcttccatcagtcactgtgaagttcagtgttcctcatggcctgaagaaggcagggtgagggtggccggtgccctggaaggaggtgttcttgaggtgttcaggtgcgttctcgaaggagtgcctcctcgccagcgagaggatcttcttgtcggcggcgacgaagtatgccatcccggccgccgtgcagatgatcagcgcctgtcccgtcgggttgatgttggccttcgcccacggcagcatcctcacgctcgccagctgatcgatgaaacaacacacagttcatcgcaagatcagtttggtgagatgcaatgtcaggcgaaactgcgaatgtttcgttgtcggtttaattagctcaccgtcgggacggcggatgccaccgtcgccaccgccgccgccttggctccggcgagcgtcgcctctgcaacaatttcaaccaccaatgtatgagaaccaagatacactatacattgatcaaactgacagttaattagcatacttagctcgcaacaaggagcaggaattctcacctctggagcagcgttttgcgagggcgagcttctggtcgaggtaggcacgagtcaccgtcgacatcagcttcttcttctacaacaacaacgacaagcagagagaggatctagctaccaacacttgcagtagcagtctagcagaaacaccagtctgaatctgtatctgttcttgagagtgggttcagttggcttgcatcgccgagagagcaagaagccgtgtatgattttataggcgtacgaggagaggagtggatgagatgaacctggtggcgcacggccacggttttgggcagaaacccacgagacgggtaggttcaatggacctcttcttccggagttttgggtgtgtttaattcataccaaaatttaaagtttggttgaaattggaacgatgtgatgaaaaagttaaaagtttatgtttaagaaagttttgatgtgatagaaaaagtaaaagtttgaagaaaaatttttgaatctaaactcgacctttacttcttttggaagttggtggccaacctgcgcccgcttcacactccactcattcagatggtagcactggagtacgcttttacgggaccaacgggtttgagagcctgaaactgtggtgccacccactgacccatatgccatgtcctgtttggctaatgggatatgaaaatgatctccaacccaccaaaagacatctttaaattctaatcattcattcttcctctctcatttaatcttaatctttcatttatttctcaatcataatcccatccctcatttcccattatccaaacacacccacacaggatttggggattcgatttaactgaatattttggttggttccttttctacccaaatcccatcttctttatcaggatgggagatctggttaggtagaataagtctatttaactgatcatccactataatgtactgaaagaaaaatgctactagttagtactaaatttttcgttgttacgtagcaacagtattatgagagggatgaataactaatactcggtcatatggttgccggcagtagtaactaattcttttctcgtaggaagaagacacggtagttgaggattggtgagtaattttttagtggccccacgttataccctactctttctatttcatattataaatcgtttgatttttcttttacttaaactttattatgtttattatgtttgattaagtttataggaaaggaaaaagtatgaattacccgataccatcgatgcccgcatgactacttgcaaaaaaaaccttacctgctacttcctccgtttcaaaatataagtcattctagcattttccatattcatattgatgttaatgaatctagacatatatatctatttagatttattaacatcactatgaatgtgagaaatactaaaatgacttatattatgaaacggagaaagtaatagctagtttcttctggtgtggagtttaactgtttatagagtgtcctcgacgtattctgatagctccacctgtcggcttgaaatttcttgaggaaactagcttaggtgtcacctgttgctgcttcctgctaacatgaagtctctagaccaaaagaaaaaacaaggaaaaagagtggagtactatactagtcaatttgctctatcaattctactagttacgtgatcacgtaggctctccacataaactagcacggtgatccgtataattacgcggctagtactgaactaaagttatattacgatatagaattatctacatttattcaatttgaaatcttttttaagaaacagaataatcgacccgctagattttacaacttttacagggtggcccgcgcaattgcacggctagcattgaaataaaattatattacgatgtagaattatctatatttgtttaacttgaaatcttttttaagaaacagaataattgatctgctagattttatagctttcttcactttgttacaaactcttttgtgcgcgcgagtgtgttttggctgtgtgcatcctagttatgcagaggacgggagcattattttatagctttcttcactttgttacaaactcttttgcgtacgtgtgtgtgttttagctgtgtacatcgtagttatgtagcagccaggagtattcttagtatggttgtatcaatttgatgtaattgtctgagattaataaaagctttctttatttaaagaattgcacatatataggcatatctatatgagagagatattatattgctttaaccatatactctctaagggaactaattaataaagtgacaataacaattttcctgcttcaagttcaaaatatgattgagcatctccgatgtactccctatcacgcgccattaaattatatttttataaaaaaaatgttccttcatttttatagtttttagaccataccaattttccctctttgacttcaaaatattatcatgtatctccgataaactccctatactacaccattaaatctatgatttataaacaaatgtttctctgctaccatccctctgctcgtctacattatgtcccttcttttcatttctattgcttgttgctcttcatattgtcttttagcacccgctgccacttcgctactccgttgttgtccctccaatcgactctttgccactacttttcttaatcaggcacaatacaaaattgaacctcaccattttttatagtttttaattagaagctgtcaccaccaacttactcctccgcagcttctcaaattgctccccttggcaagtgatgcctccatactcctttacgcccctccgcacctctctacattaagcaccttacaaatcacgctgaggttctgtttttatagtttgtagaagtcaccgccgacgccaccctcttcatttaccaccctctcagcttgctctccatggcaaccgccatctcgttgcttattttgccgcacactcacttgtatgcctattctgtcatctttcatctttgttatcatcgatactttgtaaaatcgaacatcattatcattagggtttatttttagaagccgtcacttccactttactaatttattgcctcttggctcgctcttcattggcaaccaccatctccctgctcttttgtcgcctatccactcattagcccacgtagtctcgcttccgttttgtcatcaatgcctagcgaaatcgaaatttattcgccgcgattatgttataagtttttattatatttgtgattgtaattttaatgatttcatctttatctggaattcatatgtaaatccagttttgaacttattttatttttatttcaaaagttagttaatcctgtgttgtgtactatatggactgttctttgatatttcttattttaatcgcaaattttagtaatttcaaaattattttcctactttattcagaattttcatgatcttttaaagtttatttggaattagtgttgaaaagcaatttcagaaatattttttttctgagtttcaattactcttacttttgtatatttatagaatgtgctttgctaggttgttcaacttttattattattttgaattttaatgacctttttatggaattcgtattaaaaattcaattttaaaatttattttatcttttacccaaattttaaacaaaatccggcggcttggctctgttattttgtgattgccagcccttgtgtgcagtagtacgttgattgcaagtggcttgatttattgtttgattgcccgtgctattggtttgcttggtatttatttggatgtactgaatcgtgaccagcataggaatcggtgaaagcctaagtggatagggctataggagcatgcaaaagcttctacactagaaaagctatagaaatctaaaggcatctctctacccccatccccatgggctattccttgcctaaccgacacataaaggcatgaacgaatggtggcgacaggtgatggtggcggcaacggtacctctcgccaccacctcgtccccatcccccgccactgccaccttcctaccaacaccttcaaccaccgccaccgccattactgtccctgttggctgcttggctctgtcgatctagagaagggaaggggtgaggtgaggagagggagcggcagcatggtggagatgaagagtacgacgccggccagcgtcctcatagatggtggtgcggccaatggcaatgacggctagggaaggacgaagaggtggtggcagcacatgaagagcagcagcaaaggcgaaggcggaagaggatagagcagtggaagatacgaggctcggggatctctccgacgaaggaatccactccaccggcagccgcgccgatgaaatcgccatccgaccaaatcgcctcctctctcgtgcatcagtggaaatcacatgtatgaccgaggagcgcgcgcaacctgagcctagcgccgggatagccggaacgatgaccacagacagatggagctcgtcgccggcgagctcctccttcacgcgcagcgcgctggtgaacgccacaatcaagagggtggtcgtcgtggtgccgtacaacatctctgtgctccagatcagcaactttgtcgtgccatcgggcgtccttacgaggccacaaccgctgctcccgaccgccgtcgctgccgctccccaaccgccaccgccgccaccgttcccctccgcctcgtccccaccgccaccgccaccgttcctgagagagagagataagggagagagggggaggaagaagggagagggaggatgacatgtgggtcccacaatactttttttatgaatgacatatgggtcccacatatttgttttatttttgtttttatcctaatgccatgtatctacatcagagattagcctagacaaacccaatccggtacctacggaggccggcaagagagatctagtgctatctctgatctcatcgagttcatattcgaggagaaaggctacctcgtcgtcgagtacgagttagtgttcatgccgccaagtcgacgatggctagataggttatcccaatcgtctcaattgttgtattctgtgattttctatatcaattccatataaacaggatgtagggttattgcctgtcagataaggggcctgaacctatataaaagtccttgtcttcatatcttttacctcaatcttgcatatacccttgtcggtaatatgggcccgggggtacccacactaagagagaagggtcctttcctctagccacgtggccgcgtagcttgtcccccccatcgggggggggggggggggggtcgggcgcacgggtaatgagcagccaagaggcgcccatagctgcataggggcctcggggtatcctgtcgcgcccctcgggcctgaggggctgcgtcgccccgaggccctcactcggctgccacgttgctgctgagtgggcagagaaagaggcgctgccaggcgcattgatgggcgacgccccaaccaccaccgccgcatttaatgtggcatggctagtcgtgcgacgttcgattgattgatgtgcgtcaatcgcccttgaccaggctgagactagtcgcaggcggatgagacgggtggcagcgcacccatgctagggctatcaacgagccgagctcgagcgagctcgtctgcctaggctcgagctcgatataagctcgagccgagcctataaaatgttcgagctttttgacaggctcggctcaagctcgatccagctcgagcttgatttttaagtaacacaatatatatttcaaagataatcttataattaatttctagttcatcgtattaatagaagaggaaaaaagaacaaaataaatatatgatgtcaatataagacatacaaataacatatttgatctcctaatttattaaataacaacaaaaatcatatattactagactcgttagaagctcgagctcggctcgacaaagctcgcgagcttagggataggctcgggctcggctcgtctggagctcgagccgaactcgaatcgagcctaggacgagccgagctcgagtagttcgcgagcctcaagcttttttgacaaccctaacccatgccccaccctgtgtcaggtggcgtgggggcaggtatgccccgtctcatcgacgcccggagaccgatgtccgaccggtgcatcccctatgcatgaacccacaaagtctctaagaatttatgagggaatgacaggggatgtccccccgtgtcagacaaaagactgcgctggggatcacctgaggacgggtggccaccttacttccgatctaaggcatgggtggcggctcgaccagagttgatgtgggcccccctccaatgacaagatgtgtagaggcggtgcatgtggtaaccccttaaactataaaaggaggaccttgcctaccgagtaagggggattcggaagatcttgaactctgggggaacgcttgcagattgcactcccggattcaagatcccttgtaacaacctaaacataaacccacacacaggagtagggtattacgcttccaagcggcccgaacctagataatctctggtctcactccccgttcaccatccacctcgctagccgagtccacggcgatgacacactcttgatcatcgcgccctatcccctagccgaactcacaaagggggggggggggtctcacgtcctcccgctagagaggtttacacttcgataaccctggtaccgacgatacccatacaatctaaatatcctagttgtgactatcaaacgtcgacacttcttctctccacagaatcaccatgtttgcatcgaccatcgttgaaggatcgacgcctcagagtagaattccaagtggttctttatagcattgtcggttctcccatccaaaagctttgcaatacatgcccgcttgttcccatggatagcatgagcggcgattataatccggtcctcctcttctgcaccaaagatcacatgtttaacacgcaatgtaaaatattcttgctagactgacacgttggtcccacttgccaatcttctctccctcatgcataatctctccgtccctaaatatttgacaccgttaattttttgacacacgtttaaccgttcgtctattcaaaagcttttttgaaatatgtaaaactctacgaatgcataaaagtatatttaacaatgaatcaaatgatagaaaaataattaacataaattttttttaataggtcaaacatgtgtaaaaaaaaatcaatagtacggagggacgcggccgcaaataagcacgtgtatgggctatttctttggtaagccgtacctgtctcgtgggcttcaaaatcgatggggggcgatttggcccgcgtagccgatttccacgcgggcttcctgcacagatcctgtccgtccatccagtactgatccggtggccgtgatttgctcatagcatggtaggattcctgccctgcatcaccctcccccatcccttcccggagtccctctcgtggcatgccttgtaaagattcttgcggtactggtgtttttttttttttttaatctcttcccatcgccatcgttgttccagtccgtccgaggcagcggagcggctaccctccggtgcgggctccggcgagcacgctcctcctccctcggtaacaggttagctcttttctccaccgccaccgtgccggcgccgaaaggcgtcaacgtgccggcgcggccccaccccgccggcctcctccccctcccctttgcctcgctttgcccccgccaccatcaccggcccaccgcccgccctcccagcgccaccttcccccaccccacccggcaaccctaaccctaaccctagttgtcgtgacgcggtcggaaaacgcgcgtgacttcttttgctagcgcgtgcccgctaattagtattcctggttttttcttggtccgattacatgcgtcatcttattggaactttacttcagcgggtcgacttctttcaacgagatcgcttgattgggtggtacaatattgctgttatatatatatatataattcaaaagatcaatatcttcaagcatacagtgtttctttagaaacccccttaatgaatctagtaccagagtaacagcagcacatggaattctgaaaaaaaatatcaccaacttatcttacatggaatattgtgcagtttcagattagttccataatgttcctttttttaattatgaagagcttgactgcttctttggtgctttttgtatgcccggtcttcactaagtggtagaagagaacatgttacatactccctccgtttcatattataagactttctagcattgcccacattcatacagacgttaatgaatttaaacacatatatatgtctagattcattaacatatatatgaatgtggataatgctagaaagtcttataatatgaaaccgaggaagtaccttccaattggaaggtgaagctaggtttgattagtgactaccttaacctgcaccccgaaaaaaatacggaggcttaagtgagctcttttctttctgttgtgtttgtgggaacagcctttgctccaagatgataccataaatgtatgtttggggaacatacttggcactcgaaatacagttggacacaacctaaggaataggcttgtacatcaggtgtgacgttgcactgtccttgtcacgtcagcactccatgctatagctgatagttgaactaacagtggcagaacttcatgtcacgcatggtttttgcaaactccgtaagacatgtacaataacaactagctaatatttacgaacaatcaatatatctacttgttggccatgcacaatttagatgcaagctctgcgactgccaagaaattatgctttttggctaccttcttggtgtttcaggcaaccaaggaaggatcagcaaccctgacataatttacatacttcgcattcctgattagttgctcggttatagttttatattgtcgcttcactgcttatgaccccacattttgcccctttgtttttatttctaaaagaaagttctgcttcagtcttgaaaaatatgtggaaagctaagaggggcggtggtgatctccctagaagctttcataagaatagtagagccttcaagaatgagtggatctcaggtctgctagatcttttcctcttttctgctacacccctggcgttttcacagtttatgtgattattcacagctgctttatgttttattttcttcaactaggtgacctccttcggaactctaagcaagatgtttggactggtctcagtgatgggcttaaatcatatttgtctaaaagtgtcgcttctattattttgttcaatggtgattatatacgcttagtcttctcagttttctaacaagtatatattgaaatgccaccagttataaatgattcaacttgcgatcttctgtaggagacaaaatcttattttcatgctcaggcatagctatagaacaccagttttttacaaagtttttgactactgcaactctggttagagctcttaatgctacgaccaaacaccatgatgacttaaaggttggtgctgacagtcatcctttactaatctgtttacttctgatcattgtgtgctcatttctcgctttttcattttttagattcaagtgcgccttgacggcaccagactgtatgatgggtatatggctgaatatgatttggataatgacttttctgttgtcgaagtctatagtgtccgtgatgttcaggttggacctttccaaagtgcacttgaaagtctgccccatggtgaggtattagctgtagggcatgacacctccggcgaaataatggtcgagactgtggagttgaatggcgattcaaaggtatccgaggatgatagagatcttcattgtaaaatctcaaaggtacacttgcatgatgatatgagcatttcatttttatttctgttaggcatggaggcaacagaaatatttgatttcttgtttgtatttaactcttgttctgtacaactttattttgttcaaatgtaacccgtgttgcttgttttatttcttagccttgggaaggtgggccgcttctttctgttgatggggatatggttggcatgaaccttttttttaccaatagaagagccatttttctaccatggggcacaactctcaatcattacttgacattcgtgcaaaagaagactggccttgtacaataaaaaaaaatgaaggttcacaggtatgtctatttaatcctcgcttctctgtcttgttccttgcctatgattctacccacatagtgtttggcaccatttttcgtataagtgcactggtttgatccattttactttttgattagtagtcaactagtcattttttatgatctgcaggcctgaagcatccataggtgagaaatctaacagccatccagaaggtgagcacacaggcactcctcacaagtgcttaacatcatattgttatgcaaattattgagttcgtaatggtacctatttagaagctgtgcaagcgtttacatttgtacatcaattattccggccctttcagtagtactcttgtattgttggatcttattagttaacatatgtacaataggtatgttcatgcacgctgacttctaatgctaattgttgctcaggctgttataatgatataactcatgttacatgctatgtatgcgcagagtttatgtgaatttactttttgtgtatagtattagtatatgtcagtgctgatcacttcaccttgttgcaccagtacatggagattttctcaaccaggaacagttagatcttgactccatgggttatcctaagttaccatcctccatgttaggaggtgagtcagtgcttctaaaatttgctgatcttttacagctctcatgtaccactaacaacttattctacaatgtatttatccagctggcatgatcttggttaattcttttgaagacccttttggcgacatatatggtgaaggtgtctggagaaaattcagcagaagagcttctatcctaaatcgcaatgttgtcgcactggcttcattcaatggtgagtttacaacggtgtgacatttactatttcatctctgtttcgattacaactagctggtaaccagaatcatggcatgcaggagaaaaaaggttttttgcatgcacaggtttttttattgaatggagtggatctaagatgattttgacatcagcgagcttggttagagattctggtgatgagaacaagattgatgaaaacttgagggttggtgttcattgttttgtgtctgatgttcttctaaggtgctgtttaaatctgatcactgtattatttgcagattaaagtgtttcttaacaaccaatgcaaagaagggaagttagagcattgcaatctacattacaacattgctctagtcagtgtcaagtaccgtgctcttcgtccattaaatacgagctttgattgcaagtcttctagagtagtggctgtagggcgttgcttcaattctggcacgttaatggctactagtggtcgtctagttccttggacaggcacacttgactgccagttcctcgcatgttccacatgtaaaattactaaggtaataactctcttttttctattaggtgtaatttgactgtctaaaagagagctttgactgtaaattcctgtcattaatttgcttacagttaaaatatggtcatggtaaagtactttggaatatgaatcgaacggtatcttttgatgaaacctagataatattacaattgtgaaagcttgacattggacagactctgctttgtgtttctgacaaagtatatagttgcattggaatgaattagctagcaatgttttcaatagaaaacagtaaatcacaacttatttatgttaacttgctaggctgggattggaagccctcttgttaatcttgatggcaatgttattggcatgaacttctatgacacaagaattggaactcctttcttattatgggaagagatctgcaagattctagcatcgtttgagacaaaaaggtattagcattgttcatgtcagtattctagcattgttcttttttggagcattttaagaagcttgctgaagcataatctgacagtgaatctagtggtgatattggcaatgcctctggtgcgtgtttctggaaaatgccaagagatgtcaaaaataaggttaacaggttggtattccgatccatgttgctatttattaggttgaagttaagttttggatatataagttatttcgttgaaatgaacaggtggtctgtgcccaagccacgctggtgccgtcctgaagatgctgaatctgatgatgatgataagttagcttttgatgatactggccagcttcaatacagttatattttgggacggaaagtcaagctccttcgtctcacaatccccatatcggttccgattgttgaagctaaatccactgatggttagtaatttgtcttcatgaaccttttgccaacaatcctgttgactgttgtgctgactggtctctctccctgatacagtattgcagctctcatattcatctgcttttgttagtcgactccgtccagcaaattttccagcatttttcatatgcagtgctttacccccatttatttttttatatgcagtcatttcatagtttaggacctaaatctgacaaacattttcttactattaatgattctttttctagatgtgcatgtatcctaaacctggttggtcaacctgatatacccttttaatcgacaatttcatttgttacagagcctggagttgatcctttcgcacaaaggaagcaaaagaagaagcgggtagaaaagcaaggaaaaaacagactagagaacttaaagaaagctgcaaaagttggtgctttgccaaggttgtaatcctttactcacctactgcttacccctccctcctatgaattccttttcgtaccagtaaggaacattgagaattatgcagtatagtcatctaacagctctccaatatattttgtgtgcagtcatatacaacttgctgcaacgtccttgcccatcacaggaactaaagctgatcttccgaaaaaatctagaaaagaggatcttgagaatgttgctggcatgggatctgcaacagcaagtggtgggaagtttgatgagaagttgcctggcgagaaacctccaaagcatcctggcaaacataaaaaggtttttatatcttaatggctttgatttatgagtctgcctttgtaggctgaatttgtgaactatagctgaatcatgttgtttctgcagtttatcccagttgctgaaggggagggaatgggcaacctggggaaacagcagaatgacaaaattctgatgtctctacttgccagaaactctgaacagcttgatgtttgcaaggcaagttccaggattcaatggagtatattaaattgtgttttgcccaccatcattggcactgcttgttctgtttgaatgaactaaccgcatctgtaaacatttttgtaagcaggcaaacacaatgtacaaggtgaagaaggaaaagcgaagaaggaaagacagagagatgtcctcgagatctgataagctcaagccccagaagaaacctttcaagaaatcatctaagaaaaaagcttaggtcaacatctttcttgtgacttgtttttggaggtgaccatagttttgaatgctcaaggagacctgttgcatcttcctatgtttgaatctatgggagaattactgttgttcctttataactggttaagagttatgacataggcctgaatgatgatataacaagatcacaaatctctgttatgccctgctatgtgcgtattatattttcaaattttgtttgatgtggtttgcaagtcatctgtattgattcctgaaacccattccaaaggatgtcctgacaaactggtttgtgtgattggttatccagtgacaatctgatgcttggttctcaagtgccaatctgaatcattggataacctgatatccatgcatgtgtcatcgtttgcagttgtattgatatggtttgcttacccagcagcattagtgttgttgaaattcgaatgccttggcaaatggcaaccatatatatcagcctctacgtgaactgtctgaagtggatcaatctatgatctctaattttggtagcctggcttggatctaaccgaccaggctaggccaatcttagcttatatggtgtgatgatgttgtcattgctccggtgcgctctttgtgtgtgatctctttggtcgccggcggtccagaaaaccgcatgccgtcgacgaccactgccggtgtagatgtggatgcctcggacgcgtcgcttgcaatgtcttctctttccttcctaaaaggaaaatctctcgtttaatttgcctctccaatccccctaatttcagtgcgattctctcaccacagtggccatcgccggagagagatcccctgagacagataggagtcatccaccaccatctccatggggatgctgaatctgatgcgcctcatgtccgtcaagcgccgccgccgccaagtccaagttccccatggtaaaagaacaccatctccttccttattttttcgattatttgaatctgtatatatctatagtatgtacacaaacaaacagaaccaaaaaacaaaagattttactgttgttaagtggtaccaatttttttttaactaccttcatcccaaaaatataaaaaattagtaatggatgagacacatttttttttccagattaatacgtttttatattttgggacagatagaatagtacaaattttcatacctcagagtatcagatataccatcttattaaaaacttgagcatcataaaaagacatgtttttattgagtgcaaggtaggagatcaaaagaggtggtttatctatgatcacaatggctggtggcctccaccttcttgttccttttgctatttaactagattgacccgacgtacatgggtagagaccatactatttattatgctatgtaaaatatgaaaaaaaaaactatatacatgctgaacttcaggttttccccttaagttgataacaagttggtttcttttacaaaactgttagtattgttgcacaaaaggggacaacagaagaaaacaaagataacggattgccatgtgtgcgatggtgtgcttgcttgagttttctgttttattactcaaatgtatgtaaaccaatgttttcaaaatcgctaatgtggcataatcagatgcttatatggtataatcggccacttatatgacttgagtagtataaggttggcgcatccgttccttgtacacggccttgtaaagcttttttaaaacactgatgtaaaccatgcatcttgtgctgcagatggattgattgccttacgggctaaaagaaagtgttcaccctgccaacaagatggcgattctcagggcgctgctgacatagagataccagaccttccagaggtacaccataaataaaatgttgatgatgaaacatcttactagtagtagtgtagtgcaagtaaattatgacgattactgcttcaattgcacaaattggtccaccaacgctattaaagtttatgaacggagcactttgatgctgtaacctcctacagccctgctgcattggaatcttctttgttttgctgccattgaatagcaacatgctattagacaattaaacatcattccatccattctttctggcacaaatgcaaagaaacaaatatgtgctgagcacttaacacctcatttgggtaaagaccatatttgcctagaagaattcaactatacaattcatagtacaatagtacataatcaggcaggtagcattggaccggttaaggtgttactccataagttatcctttctttcttccatctaattcaaccatttgtcttcacaattagtacaatgtttaacttctctcccatatgcttgtgcaagcaggacatctggcgtcttatacattccttgatgccaatgcgagctgctgcccgagctgcctgtgtgtctcgttcctttctaagttcctggagatgccatcccaacctcaatttcagtagtgaagcatttgggttgaatagaaatgcatgtggaaaggaagaattggctggacttttctacagcaaagtcgaccacattctcaaaaggcactcaggcatcggcgtgaaaaaacttacgattaaggtatattcagattatagtgggaagggctcttcatatctcaacaattggcttcagattggtgttaaaccagggattgaagaactcataatttcactgacccagttccaggcaaagtacaatttcccatgctctcttctgtcgaatgggagtggagactcaatccaatatcttcacctttctaactgttccttccacccaacagtcacacttggtggcttaagaagtctgacgagattgtatctctgttgtgtgcgtattacggagaacgagttaagctgctttctttcccattctcttgcattggagcagttggaaatcaggtactgcgataggattgtttgcctgaaggtaccttgcctactgcagcggctcatctccctgaaggtgtttgggtgcgacaatctgaaactgatagaaaatgaagctcctaatgtctccatttttgcatttcaaggggacaaaacgcaactgaaacttggagaaactttgcaaatgaagagcctatgcatggttcgctctggttatgtttatcatgctcgtgctgaacttccatccatcatgccaaatcttgaatctcttgccatgaagtcattcaaagaggtatgagaaattttgcctgacacatgaatgagactagattctgtcttatgggttgtagcataattaatttgacctctttatgcagacggcctttgcaccgaagctgtgtagcaaattcctctgcctcaggcacttgagcattgcccttattggatatttcccagcctatgactatttgtccctggcttcttatattcatgctgcaccttctctggagactttctacctgactgtgagttgccattcatatattattactgctatgaatgaaaattagtagttgtgtggtggaaatgtcacttaaaatttctccctttcacatcctaggtaatgcagcggtacgtgcagaatgtttcaatttttgcacatcctgcagatctgagatcaatacgagaagagcagcatcacagccttaagagtgtgagggtcacatcattcatctctgtaaagagcttggttgagctgacatgccatatccttgagagtacaacttcccttgagtgcttgacattggatgcttctcagactggttttaggtgtgatactcctggcagcaaaattggcaaatgccccccactagatagggacattatcatggaaggtcacagaggggtcttggctatcagaagatacatccagcctagggtaccttccacagtgaagctgaatgttttggagccctgcagctgccattgtactgaactttagatgtcatgtaaaattacccttatcttaattattcgatgtttaatcgtgctgctgttgatgatgattcagctgaatgtttagatgggtcatggtttctatagtttgctattaatgagtaattgatatcatcaccaaatgcacacgatatccaccagtaactccagtttccacctagcagcagtggtgtatgcacattaaaaagttcttactagcaaatgttctcgaacgtctgatttacctagttcagggtggttataaaaagctaaacaactagagtttgtaacaaattttagtgtgtagactttaatttgaaaatttcacctatatatgcatggttttcttaatcttttaattcatctatgtacgtatacataacatcagggctaaacctttcggtttagctaccaaaatttacgaaaaagtttaaaatttttggccgaaataatatcgtatcggagggggtccgaaataaccgaaatttcgttccggaatttccaaccctgcataacatacgtacgcgaatggtagggcaactttttgcatgcatgaatgccacagttggaattaagaatgcccgtaatcgttttcatgcatgattgatggaataagaatcaaacaaaaacatacagtattcaattgttcatctgttgaagaaaaagcaacagacaatatacatataaaactatagcctgtcaaaaccgtcagcaagtgcagactaaaccgccaccttttttttaatcttgattgttcagtttgagacttttttagagacctgtccatataggaggatcgatatatttgaaccaagttaaaaaaaaatgacccatcatctgcagaaaggtggtacacagaacacagtgctcatgttgctgaagctacaagcctcatatatataaacccattttatctccagttatttaaccactgcagtaatcaacttgattagtatttcgcacaaacctctctgtttaccgacaatcaatacatagtggtcggaatatatagtagtaccacttgtgatttctgaacattatgaggagtgcatgcactctgcagtagtgttacatgcagtgagccccagtgcaagatagcagtacatgtatttaattaggtggctaatggcagatacgacagagatgagtactaacaccactgctctacagaagcagctctaaatggttctgcaggggcgtacatcgattattatatgacacagggatcgatcgagagctagatactgtgatcaagtttcagattcatgcatgcatatgctgttctaattgttcagggcctgaagaaggcagggtgagggcggccggtgccctggaaggaggtgttcttgaggtgttcaggtgcgttctcgaaggagtgcctcctcgccagcgagaggatcttcttgtcggcggcgacgaagtatgccatcccggccgccgtgcagatgatcagcgcctgccccgtcgggttgatgttggccttcgcccatggcagcatcctcacgctcgccagctgaaataaaccacacacatatgcagataataagttagtacatgtacctgatgagctctgctgatgaatgaagactgaagaaatcacacaaaagctagcagcaagaactgaagaagacgcatttgtgtgtgtgtgtgagagagagatatatatatataaagagagtttactcacggtgggaactgcagaagcgatggtcgcaacggcagccgccttaacccctgcaatgtttgcctctgcagattcacaaagcacgcacgtatatatgcatcagtcgatatatattcagttaataagtgccatggaattcaattaacgcaaagacgaagaacattgtagttcatgactactacacgtaccacgcgagcagcgcttggcgagggcgagcctctgctccaggtgtgcacgggtcaccgttgccatgtaaattagtttcagtcacttagtttttgctgaactgcactagagcagtttgagagagctaggcaagccaatcgactagcgagagagagagagagagatcagaggagtgtgtgagagagtagatcgagtgtagcggcaagcaagggagatggatggattggattggggagaggcatgggggcctgcgaatttataggcaggcaagccaagacccaagagatcgatgtagcggaatgaagaaggaatcagtggacgatggaggcagatagcggcgggcgggggacgtggttttggggcgaaaccatgtgtgcgcgtgtggccgttgccggcaaccgcctccggcctcgatctgcttcacgatgataccatatattccgccacgcacgtacactacctcgcctcgcctcgctcgatctgttcctatccgtccacgcgtccagccatggtttgctgatgcaactacaggtcggtgcctggggctctgccaaagctggattagttttttctttttcttttttgaagcccccaaagctggattacttaagagtatggaccctctgaattgtaggtttgcaaaaaaaaaaagaagataaatacgagaaaaacatgtttctgacatgaatacgagcgtaaaataatgattgcaaaacacatgaatggctgattgattatactgcatgaaaaaagcagaaattagagataggctttaaagaaaatttttcgataggttggagctcttactaagttcattccaaaatctacatgcaatgagtcattatatagaaatttcataggattcggaaacttcatccctttgaatcaaatgatcatagaaaaaattcctataggatttgaatcctatacgagctccttcgacttgtaggaaaataattaaattttgaaggatttcagttctatgagaaaatattttctaaagatttttaaaataaaatattgaataatatcctatcttttaaaattcctatggaatgataaatccagtagagattttgaagataatttagcaagagctctaaccgcctcttggaaaattttcctttgagtttatctttcttatttaattcctacgtttttcctacgatccaatcaaacgatcattcctgtgttttttttacgttttatagttctctgttttgcacttatattcttatcaaaattctacatgttttttttttcatttttctccgtttttccattcatgctattcaaagcggtcctaaaattcataaatgaatcatttgattcaaagggttcttaagttaatagtatagccaatttataaagctaatctaacattatattcataaaatagttacatgtaaatatatatatatatatatatatatatatatatatatatatatatatatgacactcatatggggcaccatggtgcccgggcaccatggtatctaatgcacaaaattactcaaatttttcaaaattttcaaattgtgagtatatacctagttataataatttgattcatacctatacttatcaacaaaacaactcaaatttaactttatttcacaatccatgattacatacctaactaattatatgtatggatgctatatacctagaatcaaaatctaacaaaaataagttcaaattcagttcaaacttgctttaaactagttagtaaagtttgtgatatatatatatatatcacaccattaatatctggtctcacctctcatacatagcgtctaaaagttcgtgctagagctacttgaaaaatctgcacttcactttttttactttatagttggtttatagtctattattgcaattgctcttgggccatccccaacccagaaactatgcagtagtttccatacttaccatgtcatatagacatcatgtgtaaaaaccatatatccaatatggttggtgtctttaaattaaattctcatgcaataatctcttctctctctccttttatctatctatcccattgtttttattcatggtacttgtgtagatatggtttcttgcatgagaaatagcttcttcatctttttatccatctcctcattaactctcttgccacatcatatttgccacattatatttttgtttatgtgacaatatatttaatgctatgtacactagatacatggagtgatggagggttggggatggccttattttaatccactgctactaatattcactattgattcatggaatccataacatctcactagatgtagacatgaaccaagatcgatgtaattttgagctctctttggggactaattaatcctataactactgcgtgcacatagattcccgactaatgcagttagtgggggcgtgtggtgagcagttaattaattaggagtgagcattttgttaatactacctctcctatctacgaactgccctgtttactggttagtcaaactggctgaacctaatcatgtgggcggtcaggttcaacgttcctgtggtagatgctgctaccaaatggccacagagacgcatgtcaacaagtcaagcctcactctgttgccgcttcttccagaatgcatgtgcaacggacacacaagtcatcttcttcaactcttaaacacttgcaaatgacatatagtaagtactgtaaatactagtgctgttaatgactagcatcaattaataatttagcagttaacccatgtggagatcgagggcaattagcaactagccttttttttttacttttttcctctgatgaaactgaaatgcaccgtgatctgtgatgatcgatccatggttggtggccggccatggcgaatctgccgtcagttttgggcattttttgtggggcggcggaaaactgtgtggcgctcccagttttcggctggtttttagcctcgccgacgtcactcatgctcatgcctgtcttgcactctcactctgtgggctaccacccggccttgtctgctcactagcaatgcattgctgccccactcaaagtacggatcgcttatccatttctgatgcgatctgctccatttcagtctctcccatctcaccttatcatctcctgctagatccaaccaactttgctttactgctattctactgaaaaatactccatccgctctatttataagtgcaattgttataacgcagttgtggttgtttgtgtctaatgttttaccgtttatcttatttttaaaaaatataaaaaataatcgcataaagtactatttattttttatgtaataacaataaaaatactaatcataaaacatttaaataagatggacaatcaaattttgagcacagaaacctacaactttaattaaatgtttagaatcgttatattagaatgtgtcatttaatttaatttggttttttttaacggaaagtgagtagtatgaagggttcggtactgtgcgttagttgtccatccagttgggtttgtggtgatcatcagcaggcaactggttgattagatcaatcaatcactgcccacggtatagatcagatcaccatcctcctccatgtttttcactgtatccgtggccgctgccgttaaactttttcgaacggtcgctgccgttaaacttgaacagttgatatgcatttactctctcctctctctctctctctctgcatatatttatagacggcaaaatgaaaggggactaaggccgtctttagttcttccaaaaaaattttatgtatacagacgcatatttaaaatattaaacatagattaataacaaaacaaattacagattccgcctgtaaatcgtaagacgaatttattaagtctaattaatccatcattagcaaatgtttactgtagctccacattatcatatcaaggcgtaattaggctcaagagatccgtctcgcaatttacatgcaaactgtgtaattgatttttttcgtccacatttaatgctccatgcatatgtgtcagggttatagataccacatatttaatagtagttgactaaatctcggcaggacccaccacatactatgtcttatatggaaatatccttcagatataagaggagttccgcgtaaggaaggaagaatagagttttatatggaaacgacaaaaactactcgaattgtatccatattggtttccctagttctacatgaaaaatggaacacctatggatataaatacaagacaccttaggaggagaggggagagggaacaacagatcaagatacatatcaacatacaagccaatatacgccaagacgtgccgccggatatcgacatcagagatatgcctggactgaccctatccggtacctacagaggccggttgtagagatctagcgatgcctctgatctcgccgagcacggattcgaggagaaaaactaccctgttgtcgatacttcaatccactatgtcgacaacagttagataagttaccccaaatattgtactggtgtgatcatagtgaataagagcaacgaccggcttcagccaacaggagtagggttattatctgataattcaggggcccgaaactgtataaaaatcctcctctccgtctcttttacctaagtctcgcatatatcctagtaccaacgatccccatactatgcaaataccggaatcgcgacatcaaacgttgacaatatgtccaaatattttatgtgacgaaatttttaaaagtttgaatggaactaaacacaaacacagcctaacttttaggaaatgcacttggtagcgttaattgtaagggatatgccaatttaatttcaactctaagatactattttcaattcctaaacaatttttttaagaaaagcatctggagaaacatttctttctacaaatctcttttttttcgaagttaagctataaaagaattcattctctataaaaccagcagcagtttagctggttgatttgggaaaacagaacttcgttcgtacatcaatcttggttactttggccatatattgagctggcgatatgctataccggcgaggtgacgtggcgtcgtcatgtatccgtaccagtctaccagatcactgtaccgttgctctgttactgtatatactagcagtactacattttctgaaggttcacatcacctttgctttgcattagtgcactctgaaaaacttgacactgcttatccaatatccactacattattcaatactagtataaaagtactcccttgtgaaaaagaaaagattcatgtatgaaagttgtctcttttttttttgactatcggagagtatgtgctatctgaaaatctttttaattatagcttttggcttcaaatttcacaccaactaactagctaggggataagtgttcatcaactgttttgaagaaggtgaagacatcaacgagttttcagatgaagttcagaacagggtaaaaaaacaaagtactagttctcattgatttcattttcatcatcaacaacaacaaaactaattacatcacaacttatagaaccattacgcatgaactcagcagcagtagcagtttatccaggcttccatcagtcactgtgaaagttcagtgttcctcatggcctgaagaaggctgggtgagggcggccggtgccctggaaggaggtgttcttgaggtgctccggtgcgccctcgaacgagtgcttcctcgccagcgagaggatcttcttgtcggcggcgacgaagtatgccatcccagccgccgtgcagatgatcagcgcctgacccgtcgggttgatgttggccttcgcccatggcagcatcctcacgctcgccaactgaatttttttacagcagcagatttcatcgcaagatcagtacacaaggaaaaaactctgaaaatctgaatgtttcgttgtcagtttagctcaccgttgggacggcggatgccaccgtcgccaccgccgcagccttggctccggcgagcgtcgcctctgcaacaattcaaccaccaatgtaagaaccaagctacagtgactgaccgtcaggtaaatcacttataagcagcataaatgttcacctctggagcagcgcttggcgagtgcgagcttctgatccaagtaggcacgagtcaccgtcgacatcttcttcttcttcttcttctacaacaacaaccaaccaagaacaacgagaagcagagaggaatcagctacaattgtttgaatctgttcttgagttcgttcagttggcttgcattgccaagagagcaagaagccgtatgattttataggcgtacgaggagatcgaggagtggatgggatgaacttggtggcgcgcggccacggttttgtgcagaaacccacgagccgggtaggttcaatggacctctgcttccggagttttactcgtttggaagttggtggccaacctgcacactgcatagtgcactccactcattcagaaagcagcagctagcactgtacatttgtacaacgctttacagggaccaacggatttgagcctgaaactgtggtgcacccacagggtttggggattcgatttaactaaatattttggttgcttggttccttttctacccaaaatcttgaatttttcttcaggatgatatggtctgagagatctggttaggtagaagaataactctagttaattagctactcctacttgtagtagtctaggtagaacgtagctagcatggatgcatgatattctggagagaaattataatgttctcaagctttgcctaatggagtgcaagaaacacaatttgcaggattcaaagcgctgaaaaaattattcgattgtgctgagatactagtgatggagtcaaaacggtgaccgaattgggagaatcgattcaacacgcgaatacggatgcattaggtttggagtttttgacaaaacgaatttttttgcttgtgtttactctatctggttcatagattctaaggagatttggagaaaccggcacgtttgttctctgaagaagaacaaggtaggtgaagccagccagccacagtaaacagctgaatatttttagcatttgaacccatccgtgaacaaccatgatttgcatacgaatgcgacgaccagagtgacgcgttgtgttgtgattttgccatcagttttgctctgaatccgtggatgtgttgccggcagtttttgctctgacggatgacgctcctagttttcgggcgaaaccggctcagtcagcagcagtagcaacgtctctctctctcaaagttgcaaaggcataattctgtgagctgaaacgcgtgtgtgcataggctgtttggtaatgcttccaatgaacttctagactttttgcaggtttgctctgggcccacctgtcaggccggcaccgtacgtacgcaggaatactccatccactgtagtatacgtttttcgaaccgttaaatgatatttttaagaaaaaaagttatatgtgaaaattgttttattttaattcattttcttaaaaaaactaataattaattaattatgtgctaatgaattgttctgttttacatgcgcacaaaggattaatttccaacaaagacatccgaatatagcctatatgtagctctactagtgaaaattacagttagtcactgtagacttcaaaactgacggaaaattgatactagcactaaatctgcttgatcagaaaaaaattactgtaattctggagtcactaaacaacgaacatgagatttggcctctgcattttctgaaagagcaagatcgatcgccggccggtctgaaaaaccgtaggccgccggtcggctgaacgtcatcgatggccgctcctgttttgtgggcgtcgccatcggcacccaccagcagcaccccttcctgtccatttcttaccatgtctgcagatgatctccatctgtgtgggctctctctgcatctctgtcgttttctatagcacacaaaattaaagcaggataagaaaaagctgttcgctcttttgcgttgcctgatggggccgacgtcgcatgattgcagtatggcgccgtcgtgcgccgcaattcgattttctgatccgcagctgatattaatcggttgtttttctgcttcgatcgaccaagcgtcgtcatcttcatctgatagctttctgtacgttttgggactgaatgctactgctgctagctactccaggtgggtgagaattgtctgtaacttgctcgaatgtgctagctaatttactctcaagtgcagatatctgaaaggagattcagatcagtggatttgtctttcttcagtctagatactcgtgtgacattttctctgaagatctggagcttccatttcgctttcttgtgcagatacaaatgagagttctttttacttttagacgtcttatatacgagtgttctaggggacgtttacaaaatgtataggcagttcaaattcgttcgagttcaaggaacaagaaacatgtactacagtgcacatgaaccaccgcatccattcttgagttcatcaaattaagattgtttattaatacaagctggagcatacagtatattacatccaagtacacaacactagctactttctgcagcagattgcaagcagcactagcttgctgatcatggcctgaagaaggcagggtgagggcggccggtgccctggaaggaggtgttcttgaggtgttcaggtgcgttctcgaaggagtgcctcctggccagcgagaggatcttcttgtcggcggcgacgaagtatgccatcccggccgccgtgcagatgatcagcgcctgccccgtcgggttgatgttggccttcgcccatggcagcatcctcacgctcgccagctgatcgatgaaacaacacacatatgcagctaataagttagtacacctactctctgctgaagaatcaacacaaggaggaattagaagaagctagtagcatctgagcacactcacggttggaacggcagaggcgatggtcgcgacagcagccgccttaacccctgcaaggttcgcctctgcagatcgacgaagcatacatcagtttgtatatattcagttattagcgccatggaatgcaagacaaagcgagattaaacatggtggtttagtgtgcgtgcgtacgtaccccgggagcagcgcttggcgagggcgagcctctgctccaggtgagcacgggtcaccgtcgtcgacattgtcgagcaagatcgatggagctgagaagaaactagtcctgaagtgaagtagctgggaggtggagagaatcgcctactggttggatcagtagtgctgagcgagatgagatgagatgagattgaagaggagggggtctggatttataggcgagagaatgcgatcatcggatgatgcgaaggcagcaaggtgggggagcacgcacgcaccaaggagaggagacgaccatggttttgaggtgaaaaccacgagtggttgcatatgctggagtggtcggtggcactgtgctcgatctgccccctgttgaggatggattctaatctaatctctcgggtggacgttcacccgtttcttacatgtcacctaaataattatgaaaaaattctaaaaaaattcacaagataggttaatatgtaatatatctcttcacaaacatgcaagttcaaattcgacttctacaagttgtaacaaaaataacaaatcaaactctaactagtatacgtatattcacagtcaaatttgttatttttgttataatttttagaagtcttgttatttttgttataatttttagaagtcgaatttgaacttacatatttgtgaagtgatatattatatattaacctatcatgtcaattttttttaaaatttttcataactatttaaatgacatgcaagaaacggatgtacgttcacccaagtatttaaaagagtttcccgcaccctgttttctctgacgtacttctccactccacgtacgtatgtatgtgctccgtacatgccttcttttcagtagatcctgaacattttcagagttaaaaagaaaagagtattatcggttttactgccaaaagaaaaacttttcagagtcgaaatgaatctgagcggcacgtggcaggtgacattggccggtttgtcagcctgcctgattatctttaagagcaaatttaatggtatagctaacttattatttattagcttatactacttgagctaatatgtataataagttaaccatgtctaactaacttatttgacaatgcagtgctaaaataaatattaaattaaatatgtgttaattatagattaattaggattaatagatttatctcataaattagcctctatctgtgtaattagtctatatttaatactttaaattagtgtctaaacatccgatgtgatagagactaaagtttagtctttgtattcaaacaccccctcaagatgatgcatgcgtgtgcactatgctagcgtgccctcggttttgggtcgatcgatgagctgcattttccttaaaaaaaaaagctatcctataaatatatctaaaaaaattattattcttttcgtggcgctaacataattgacatcatgatccaacatgacggtggtcacggcgctaacaacattggcactatctcccttcacattagtgatttagatttcactgaggggctatggggatagcgtcaacgtcattaacgtcttcacgttggaccacggcgccaataacattggcgccacaaaaacaaccatttttaaaataagttttcttaggggtatatttgtagaataagttttctaaatggtaggaaggtttgataatcagctttcgagaatttacagaaattgggtttcccagcttctatttctagtttattttctgaattttttaactacagcttttgagaatatggatgaaaagctaactatatatatgagggagtttttgattttagcagaagctggactgtttgtgctgatatgctagtgataggaattggtgacggaattagtcaaatcgattcaacactcgcatacgcatgcattagggttcgagttggacaccgccgaatttttactcatgttttacttgatccgattcatagatttttcggagatatggagacccggccgtcatgtgtacgtactgaaccggcactttttgttctctgaagaagaacaaggtagggtgaagccagccagccacagtaaacagctgaattttgtatagtagcatttgaacggcacccgtgaacaaccatgcatgattcatgcacacgaatgcgacgaccatcgtgacgcgttgtgttgtgattttgccgtcagttttggtctgaatccgtggatgtgtgccgctcggttgccggcagttttcgctctgacgaacgcgacgcgaccgcgaaaacgctcctagttttcgggcgaaaccggttcagtcagcagcagcagcagcagcaacgtcgattctgtgagctgcgtgtatggccaccagcatattttataggctgtcaggttgccgtgggcccacctgtcaggccggcactgtatgtatatacgtacattgtgcaagtactatacgtagctctagtacacgtattgccagtagagaaaactacagttatactctcaccttgcctcaaaactgactgtaaaatttcttaacttttctcccccaaaaagataaccgtaaattaaatctgaagggcaactaaacatcttggcccttgtgttttctgaaacaggatagatcgatcagtcgatggcatgagcgccgccggtttgtgggcgatcggcaccatcacaccagcagctagcattaccgtcctgtccacttcttgtatcatgtctgaagataatctctccatctgtgtgggggctctctgcatctatctgtgtctttttttagcgcacaaaagtcgaaagcaggataagaaaagctgttcgctctctgcgttgcttgatggggccgacgtcgcatgattgcagtatggcgttgtgcgccgcaatctaaatttctccgcagctgatattaatcacctgtttgtgcttcgaccaagagtcatcttcatctaatagctttctgttcggtagatgggtgaagattgtctgtaattaacttgctcaaatgtgctggctagctaattactctgaaatgcccatgtagggctaattcctatgatattctctctgtaacaagtatctgcaacttccatatcatttttcttgtatagatacatatgagagttagtagtagttcttttttttttacacagttacttcttatacttgagagtagttcacaggctgacagacagtttctaatttgttggcgtcgttggaagagcaagaaacttgtagaatgcacatgaaccacaaaaccaccacatcaatgtaattcgttctcaagttcaaaagatttgtttattagtactacaaactggagatacagacatacagtatactacatcgatccaagtacacagcaaacactttctgaagcagcagctagcctagcaatgcaagcagcattttttttttctatagctagttgattaggagaaattcatggcctgaagaaggcagggtgagggcggccggcgccctggaaggaggtgttcttgaggtgctccggtgcgttctcgaaggagtgcctcctcgccagcgagaggatcttcttgtcggcggccacgaagtatgccatcccggccgccgtgcagatgatcagcgcctgccccgtcgggttgatgttcgccttcgcccatggcagcatcctcacgctcgccagctgatcgatgaaacaacacataaaatgtgctctaagttagtactcctactctgctaatgaagaactgacacgagaaaaagggctaattaatcctagcgtagcatgatctgagatagtagacacttacggttggaacggcggaggcgatggtcgcaacggcagccgccttaacccctgcaatgttcgcctctgcaggtattatgcatcagtttatattcagttaggtgccatggaattcaattaacgcaaagacgaagaacattgtaggagtagttgatgacttcgtatacgtaccacgcgagcagcgcttggccagggcgagcctctgctccaggtgagcacgggtcaccgttgccatcgcgatcaagacgatgatgggatgggagctgaagagaaagtctgaagcgaaggaggtgattaacccaaggagatcgaggagtactggctactagtttgatcgagagtgagttgagatggtgcttgaaggggagctctggatttataggcagcagcaagcaacgcaatgcaagggaggaggatgcgaaggcagcaaggcgggaagcatgaaggagaccatggttttgaggtgaaaccacgagtgggagtgggagggacgaatcgggaggcggttgcatgctggattggtcggtggcactatgctctctctgaaaccgggggcatttaactgttctctctctgaaaccgggggcttttaactgtttgccacttgaaataactatttgccatcaatgacatgtggcgcttattatactcccttcgttttaaaatgtttgacaccattcgtcttattaaaaaaatttatgaaatatgtaaaactatatgtgtatatgaaagtatatttaacaatgaatcaaataatatgaaaataataaataattacttaaatttgttgaataagataaatagtcaaatacgtactaaaaagtcaacggtgtcaaacattttgaaacggatggagcatgttgtacccgactcttttcagtacatctagtcaattttcagagttaaaaggtactgcgaaaaagaattttgagttttcagaggcgagatgaatctgaccgtccagaacagaacggcgacacgtgggaggtgacacgtactggccggtttgtcagtctgcctggctaatttttttttttacatctgattagtataagcaattaagcatacgcggaagtgagaaaaaacgagttataaacttgttctaccagctgtgctccaagatatgatgggccaaatataatgatgtagtgtatatttacatgaaaaatattttttatacgctagtaaattggctatggatgatatgacgatgttttaatttttagaactagcatatgcttacgctattaaatttgctctgatgactttaagtaatccatagtactctatccgtactcgcaaaggaagtcgtttaggatcaaacccttgggaatataaatcatgaataactcttaatttgttgagtttgaaaatataaaaattatatgaatagatttgttttaaaaatacttttataaaagtatacatatatcacttttcaataaatatttttatagaaacaataagtcaaagttgtgttttggagaccgtttcgctgtccaaaacatctttctttacgagtacgagaagagaatataatcgaatgcatgaatgagcagtggataagattgtctactactgcaatggacggaagctgcatggatagctggagaagatgaagcatatgtgtgtgcactgtgaagcgtgccctccagccctcggttttgggggcagccgtcgtctcgtctcgtctcccacgaaacaaggaaatccgccgcggtttcagcttggccgttgcagactggcggtttgccgacccaaccgaccatctgtgactgacacgtgggccccacatgtcagctgccgtactgctgaacagtcagataatactgtacgatggagaaactgtagtacggtttgttgggccaaaactacggccagtgttccttcccgtatatcgtggtgaacatacggcccaaacaaagttgggccgtaaagattccgaggtttaacgtgggccgtcgttgttgggccaatttactgcgggcctaatggaagcccatatatcagttgggcctagaacggggatcgctgttagacgtgtggcccatgctattactgtcagatgtctatttccttgagccgttcaaaggccgatagacagacagcgatagaagctactccgacaatcggccggctatcgggcaggctggcaaagatgccggccgtacttgagccttcagcttcagctccaactcgtggttgcaattcaaggcgtgtaaataatccgtggtaataattcgaccagtcagtcacaaatatctagattttacctcgttttcccgttaatacgttttttaaactaataaacggtgcgttccgtcgtctgtgcgaaaacattctatataaaagttgctttaaaatatcacatatatccatttgtcaagtttgtaataattataatttatttaatcatacatatgctaatagctttcttatttcacatactctaacttaatctttattttcatcagtttcagacaccacctacttagtgctctctctattctaaaataagtgcagcctttagtttaaatttgaatatctgtatttattttgaaaagaatgtacgactataaagcgatgtttttgttcagactaattattactccagttcgatacaaagacgatgacccgcactagtcaagtcttttctgatgcagaaactttcaggacgatattgttgttgcttggtgcaaacgaataaaaaggcagcttatcagcatgttcgatgtctctatgtataggaggtattcatcgtatggtcacaggagtatctgagggacagggaaagtacgtagcataatacatggcttgctctttactttcaggtcagaagctctcataccttactatacaggctcatagttaattcttgcatgctcaagtattttgtaaagttgagatgtttagaggttcaaatatataggaatgttacgtgcatatggtagaagaattaactcaaaaagtcttttttttggacgttgtatccgttcctttgacatgcaaatttactttgcgaggatagtatatactccctctgaccataaatatttgacgccgttgactttttaaaacatgtttgaccgttcatcttattcaaaaaatttaaataattattaattttttttctatcatttgattcattgttgaatatacttatatatatatatatatatatatatatagttttatatatttcacaaaagtttttgaataaaacgaacggtcaaacatgttttaaaaagtcaacgacgttaaatatttagggacggaggtagtatgtttttggtgtttaacgaagaacaaagagaatccataaaattgaaggtccggccctggtgtatgataatttgccgttattttggattggtgttgttttatcttgtctgtcaacgaaatgaggcaaatcttttgccttggaacgatttcaagcattatcgatagaatattggtaatgaagggttttccttaaagttctggtaggagtttatcgctacccggcgataaccacacggttaccaagaaaaacacgaggtttcagaaactaatattgacggagcgtggggctcctcaccgggagaccgcgcaggcccccctttaccggttcggccggggactcagggagagattctaagctctctgtatgtggaaggctcgcgagacaggaaacacacaagacacgggcgatgtatacaggttcgggccgctgagaagcgtaataccctactcctgtgttttgggagatctgtgtatgaaggagctacaaagtatcagccagcctctcccttgttctgggtttctaatctggaaaagtccagtcccccctctcagtgggcaaggtcctccttttatatcttaaggggataccacatgcaccatttctctcttttttgtggggacttaccccccccccctttttcataaatggacggagatttgtataattgccgtccgagtcaccttctgatgagacggcccacaactacctccactttcgccgggagcaggtgcgacgtggaatcgtggctgtctactgacgacatgaccggtatcagaccagtcacgtcggtcattcttgtccaccacgtgtcagcttagcaatctacatgctcgcccttcttcacacaacatcttgcctgtaatggttaggatgaagcctggcatatatctgaccaggactaacgtgccatctctgggaggtaacacgctagctccagctggggatgagcgcctagaagccctcgtcctgacgggatggggcgatgcgtgcgtcagatcgtctgtcgccacctaacccgcgatctgaccggtctgtgactggtcacagaccggataaacgagtgcactgcactgcgttacatgcggcgtgacacgctcagccaaaccgcaataaatgtggttaggtgagtcccactgtgctcacctaacccatacacgcggagcaaaaacccacgaggggtcggggcgcctcggccctcggggccgaggggggtgcggcccgaccccctcggggggactaagaggagggcgaacgcatcaccctcgggcccgacgtccctcgggggtaccaggccacgtgtgcgattgtgtctgcctcaaacctctagtcatgatactcctgatcccatgtcaccgacagtagccctcggcgttatgccagggcgatcgccctctttaagggaaacggtcgggcgtgacgccactcctaagacctggtgacaggtgggaccggtctccacaattgggcagaaacccaacggtcacaaaccacgcacatcggcaatggtaactcggctgtcaacaatgagcggtctcttcaagactgccacattacttgagtagcacacgaatctggacatggcgattcgtttcgtctgaagatatggtaacgtcgcttcggtcggcgagcgtaattaacgcgcacacgatatgatctacgcacgatatgatctatctcgactgccacaaccgcatacccacctcatgcgccgcaagcgggcgaatgggattagtggaagcgtgggcgcgagaaacgagggggcgaaatagtgggcgcgagaagcgaggagccgggcacagcgttggcaagagtataaaggcactgaggaagggatctgtttccttcctttcgccattattccccttgtcttcgccgcttgcgccctaactccttctttcatgtgccctaccttcgccacacacgctcgctcttaatcttctcttcctccggcgccatggcacggggttccgctctgctcgatggtagcgtgctgccgccttcccggatcgtgagcgagaggcaggctgggctgtcgcgccgcttcatgccggaatctgccaccggccgggagatagtcacgctgggcgagggacgcccggcgccagactacccggggcggtccgtcttctttctcccctatgcaatggcagggctggttccaccattttcttctttcttcatggatgttctggagttctacgatctccagatggcgcacctcacccccaacgcggtgatgacattggccatcttcgcgcatctgtgcgagatgttcattggggtgcgcccatctcttcggctgttccggtggttcttcaccgtgcagtcggtgtcgccgccatcggtagtcggtggctgctacttccagccatgggggccggtgctgaaccgctacatcccctgcgccctccgcaagaagtgggacgactggaagagcgactggttctacactcccctcgccgacgaagcgcgcctccgacttccgagccagcccccggcgcaggcctccagctggcgggcgccggtagatctgggggatggctatgacgccgtcctcgaccgcctggcgggcctacgatcccaggggctcacaggggccatggtgtacggcgactacctccgttgtcggattgcgccgctccagcgacgcgctcggggcgcttgggagtacaccgggtccgaagacttcacgaggacccaccagggagtgagatgggactgggctcctgaggacttcaagatattggtccaacgggtgctgaatctcaactccgtagaggcggccctcattccccaaggaatcctccccctctgcagcgatccagaccgtgcctccatcctgaccattatgatggcggtcggggcctcagaggagcgagctccaaagggccacgacggcgcaggcgggagccgcaggggggaacaatctaccccgagagggggtcgtgcttctgggtcccgcgacaggggcccggggagcagccgccctgccgacgcccgggggaagaggaagcagggaggaacacctcccccatctcctccccgagggggcggggcggcgcgtgccagtaacaggcgcccggagggggccgcgccaacatcgcagcccgagggggagcgcaagaagaagcggccccgtaagatgggggagacagaaccatctcggggaaacctcatttcccctccaaagtggtcgtttaaccgaccccctcgcaggttcgtctctcacccatcgtggctgtattcattctctcaacgcgagttttcactcacccatcttgttcgtcttctggttttttcttttgtttcagcgagatcccgtcgcgtccctcccgccattccaagtccggccagtctgaggccgaggatccggcggccgcagaggccctcaggcgggaatctgaccggcgagaggccgcggatcgcctacgggaagccgaggagaccgcccaggaggccgcccgggctcgccaggccgaggaaaccgctcgggaggaggccgcccgggcccgccaggccggggaagccgctcgggaggaggccggatttcgccaggacgaggcgatggcgacttccgaggcagctcgcgacgaggccgcgggcgcgtcgcttgggcccactccctcaggcgacactcaggcgacaacttccggggcagctggcgaagaggccgcgggcgcgtcgcttgggcctactccctcgggcgacgctcaggaccaaccgggtccgggggacatccccgagtccggcacttccatcggcggcccgagccgcgtggcatcctctccaaggcggctcttccccacgccttctatcgccctactgaacgcagagccccttctgcaggccttggccgccgcaaacaccacggtgttggatgggttaagtgcccaggtggaggtcctgcaggcagagcgggcggagctcgacgccgcgtgggcgcgtgtcgaagaggggcgacgctcggtggaggccatggtggaggtgggccgtaaggctcaccgccggcatgtctcggagcttgaaactcgtaagaaggtgctggcggagatcgccaaggaagtggaggaggagcggggggctgccctcattgccaccaccgtgatgaacgaggcgcaggacaccctccgccttcaatacgggagctgggaggcggagctagggaagaagctcgacgccacccagggggtgcttgacgctgccgctgcccgagaacagcgggcggcggagaccgaagcggcgtcccggcggcgcgaagaggcccttgaggcgcgcgccatggcgctggaagagcgcgcctgcgtcgtggagagggatctggcggaccgcaaggccgccgtcaccatccgggaagcaacgctggcggcgcacgaggctgcctgcgccgaagaagagttcacgctccgcctccgcgaggacgcgctcaccgaacgggagcgagctctcgagggggccgaggccgcggcgcaacagctggcggtcaacctgtccctccgcgaggcagcgcaggaggagcaggcgcgccgcaatctggaaggtgcccgcgccgagagggccgtactgaaccaacgggccgctgagctcgaggcgcgggcgaaggagctggacgcgagggcgcgcagcggcggggcggccacgggcgaaagcgacttagccgcccgcctcgcagctgccgaacgcaccatcgccgatctgcagggcgtgctggactcgtccgccggggaggtcgaaaccctccgcttggcaggcgaggtagggcccggcatgctttgggacgccgtctcccgcctagattgcgccggtcggcaagtgggcctctggagagggcggaccgtaaagtacgccgccaaccagggaggcctcgcccagcgcctctcgaagatggccggggctctccaacggctccccgaggagctcgagaagacaattaagtcatcctcgagggacctcgcccaaggagcggtggagctcgtcctggcgagttaccaggccagggaccccaatttctctccatggatggcgctggatgagttccctcctgggaccgaggaccgcgcgcgcgcgcaggtccgggatgccgccgaccatatcgtcgacagcttcgagggctcggcccctcggcttgcgttcgcccccaactccgacgaggagggcaatgccggtggtgcagacgacagtgacgtcgaggccggcgatccgggcgcatcggattgagtccccagacccccgccattcttcagttttttcttcttttctttcttctaaggccttcgggcctcttttttgtatagatcaacttaatctgtaatcaaaaatgaagaaatttttgtgttaatttcatcttgctgtgagtatgagatgaggatgatctgtgccgtggtccttttgtgtcttagcttgaataagggcttgtgcccaggttctggtcctcaaaaggcgcgggtcggggctagtgcctggggagatccacatgtcgagactggccaggccgggaacgtggtgaccgagggttatgggtgacccgattgtgggtttttgccgattcccccccggagttcaccacgcctcggggcacggctcggttctgggccccgtttggcgattttagccgacccgagcccccgagggcaggattgagcacgagtgacctatttcaagtcaagattcttcaaaaggaaaaaacagcacagatacagcctttaggaaattgaaactgcttttatagaaattcagatataagagaaataagaatatgcatatgttgtagcccccggccaaccctgcacgcccgaggggggtgcggggttggcccgagcccgaaacctgacacccgacccccccctcaggggtagaagcgacgaaggtgttcgatgttccacgggttaggcagctcagtgccgtcgcccgtggctagccgtatggagcccggccgggggacgccgaccactcgatacggaccctcccacattggtgaaagcttgctcaatccagcacgcgtttggacgcggcgtaggacgaggtcgtcgacgcagagtgatcgggcccggacgtggcgctgatggtagcgccgcaggctctgctggtagcgcgcggctcggagggccgcgcgccgccttcgctcttccaagtagtcgaggtcatctctgcgaagctgattttgatcagcctcgcaatacatggtagcccgaggagacctcagggtgagctcggatgggagaaccgcttccgcgccgtagacgaggaagaaaggcgtttccccggttgctcggcttggtgtagttcggtttgcccagagcaccgctggcaactcctcgatccatgaatcgccgtgcttcttgagtatgttgaaggtcttggttttaaggcctttgaggatttccgcattggcgcgctccacttggccattgcttctggggtgggcaggtgaggcgaagcagagcttgatgcccatgtcttcgcagtagtcgccgaagagttcactagtgaattgggtgccattatccgtaataatacggttaggcactccaaaccgggccgtgatgcccttaatgaatttaagtgcggagtgcttatcgatcttgacgaccggataagcctcgggccacttagtgaacctgtcgatcgcgacatacagatactcaaacccgcccggggcccgcctaaacagtcccaggatatcgagtccccagacagcaaatggccacgaaagtggtatggtctgcagggcctgggccggctgatggatttgcttggcgtggaattgacacgctctacatcgccggaccaggtcgaccgcatcattaagagctgtcggccaatagaaaccctggcgaaaagctttaccaaccaaggtgcgcgaggcggagtgggctccgcattcgccttcatggatatcggcaagaagcacaacgccttgttcccgaggaatgcacttcaggaggattccattagccgcgcgccgatagagggtcccttctaccagcacgtagcgtttggagatgcgatggacgcgttcactcccttcgcggtcctcgggtagagtcttatctgtgaggtatgcttggatctcggcgatccaagcaatcaatctaagggagttgggagcactcccctcgggtcccgaggcctggactccgacaggcctcgggggccggtcaggcgcatccgtctcccctaaggggtcgggtcgcgccgacggctgggcaagcctttcttcaaaggcgcccggtggggtctgggctcgcgaggacgcgagccgtgagagttcgtcggcaatcatgttatcccgtctgggcacatgccgaagctcaatcccgccaaaatggcgctccatacgccgtacttggcgcacgtaggcgtccatctgcgggtcagagcaccggtactccttacagacttggttaacgaccagctgagagtcgcctaacaccaggaggcggcggatccccagtccagctgccactcttagtccggcaaggagtccctcgtattctgccatattattggtcgctcgaaagtcgaggcggaccaagtatctgaggacgtctccgctcggagaggtcaacgtgacccccgcaccggcgccctgaagagacagggagccgtcgaactgcatcacccagtgggcggtgtgaggcagctgcgaggggtccgtgctggcctcggggatcgagacgggctcgggagccggggtccactctgccacaaaatcggcgagggcctggctcttgatagcgtggcgtggttcaaagtgcaaatcgaactcagaaagttcgattgcccatttcaccacccgtcctgtaccctctcgattatgcaagatttgaccgagggggtaagacgtaactactgtgacccgatacgcctggaaataatggcgcagtttcctcgaggccatcagaatagcgtaaagcatcttctgggcctgagggtatcgggttttggcgtcccggagggcctcactaacaaagtagacgggccgctgcacctttcggtggggccgatcctcttcgctaggggccgcatccctggggcactcttcgtccaagcagccttgcggggcgcacttatcttctgtgctgatgacctcagggtcggaggataacaggggcggccttcccacagtggcttcggggccgtcctgggggtcgggggctcctggcgtcgtcggaaaagcgggcaaagggccaactccggtcgtcaggggccttaggcctccgttcggctcgggggcctcttctccctgctctttcccgggtcgggtcagcacagggttagcctcggggtcgaagggcgataggtgcggccttcccacagtggcctcagggccttcctgggggtcgggggctcctagcaccgtctgacaagcgggcagagggccaactccggtcgtcgggggccttgggccaccgttcggctcgggagcctctcctccccgctctctcccgggccaagtcggcacagggtggggaagcgtgaaatgagaattgttctcatcgcgctccacaaccaatgccgcactaactacttgcggggtcgccgctaagtagagtaacaagggctcgtctggctccggggcgaccagaactgggggagagcttagatacgccttcaactgggtgagggcattttcggcttcctccgtccaggtaaacggtccggagcgtttgagaagcttaaataagggtaacgccttctctcccagcctcgatatgaaccgacttagggcggccatgcaaccggtgacgcattgcacatccctaagtttgctggggggcgcatccgctctatagcccgtatcttctcagggttggcctcaatgcctcgggcagagaccaagaaccctagaagcttgcccgcaggtacaccgaacacacacttatcggggtttagttttatgcgggcggagcggagactctcaaaagtttccgctagatctgagagtaacatttcctggttgcgcgtctttacaaccaagtcatcgacataagcctcaacattacgtcctaattggttacccaaagaaattcgagtagtacgttgaaaagtaggacctgcattctttaacccgaagggcattgtcgtataacaataggttcctatgggggtaatgaacgcagttttttcctcatcctccctagccatgcgaatctgatggtaaccagagtatgcatctagaaaacacaaaaggtcgcaccccgcagtggagtcgacaatctgatctatgcgaggcagggggtaaggatccttaggacatgccttgttaaggtcggtgtagtcgatgcacatccgaagcttgccgttcgccttgggaacgaccaccgggttcgccagccactccggatggatgacctcacggatgaatccggcttccagaagtcgcgccacctcctcgcggatgaaggcttgacgtttcggggcctgccgccgcactttctgccggaccggccttgcgcccggccgcacggcgagacggtgctcaatcacctccctagggaccccgggcatatccgccggtctccatgcgaagacgtcagcgtttgcccgcaggaaggagacgagcgcgtcttcctatttgccatccagaagaccaccgatccgtgtggtcttggacgggccgtcgcccagggcaacctccttgaccgggacctcatcgcctgtgatcatccgttgcctcggggtggcgggggcggaagcgccaagcctctcgtcgccaccctcgggcttggatgcagcggcgaggtggtccgcgcgctgctccagacaagcgagcgtgactttgaggtcgccatggacagagatggggccaccggggcccggcatcttcatctgtaggtaggcgtagtggaccgccgccatgaacttcaccaacgcgggcctccccaggaccgcgttgtagggcagactgaggtccgccacatcgaagttcacccgctccgtgcggaagttggcggatccaccgaaggtgaccggtaggtcgatgtgacctaacggtcacgtgtgccccggcgtcacaccgataattggctgggacggccggagcaccatccccggggccttgatggcgtcaaaggccgcaggggaaaggatgttgagggccgctcccccatcaatgaggacacgccccaacttcacgttgcaaacggtgggagaaaccaccatcgcaatctgccctccccgggcaacgcacggtgggtggtcggtctggtcgaaggtgagggcaacctccgaccaccgcgcccgacacgtcgcctcatgagtaggggccgcggccagaagctctcgcttcatggccttgaagctccggcgagaaacgtgagcacacgctcccccatcgacggtggcaatggtggccccaggctcttggaaacctaggtcatcatcgccgtcatcgatgtcctcggcggaggccttctgcttggcctcacttcgccgattaccggaaggaaccgccggggatttgccctctcggcgctcctgcctcctctcctcctcccacttcctcgtccgttcagccaaacttttgactgcacggcagtccgcgagatcgtgaagggaagtgttgtggacggtgcaccacttgccggttgggcgctccctgttgggagcgccggcctcgttctttttgcctcccgcaggcctcccctttcgggtggcccgcgaagcgccctcgacggcgaggacatgaccctcgtcatcggtatgggctgacctcttcttcctcctcctgtcacgccgccctatctgagcggcggatccgggggcggccgaagctgccacaccggaaccggaggggttctaagtccatgcctcctccttatgagccactcggtccgcgagctgaaaaagctccgcggtagtctggggctccttggaggcgatcttttcaagcatgcggttgtgccgcacaccccccctgaacgcgtaaatcaccgcgtgcgcagggatgcatggtatggtgttgcggacttgacagaaccgctgaatgtacgagcgaagtgactcatcatcccttcgctgtactgcgtgcaagtccgcttcctcacctgggcgcggatatgtgccttggaagttcatggtgaactgttggcacaaatcctcccaagagtggacagacgcgggtggcaagttcattagccaaccccgcgcttgtcctttcagggccatgggaaagaaattcgccatgaccctgtcgtcacccccggcggcctcgatcccggtcgtgtagacctggagaaactcggcggggttgacgctcccgtcatatttttcggcgatggtgggccggaaccttgggggccaacggacattccgaaggctcgccacaaaggctctacagccgacaccaccaaccgggggcacggagggctgatccccgcgtccgtggtgaggtgacactccggacgaggaggcgccctccgttgcgtggggagcacgtcggccattacgccggcgctcgatactgatgcgagcatccggttccccacgcagatcttcctgggtcggaggcgttgacgaaggagtggcggccgaatggcgaacagcggctgccgctcgccgcgccctccgtcttgacgatgcggagccggtggtagcagcaccagaggccttggtggcggaggaccgcccaccagcatctaggcgctgccgtgcagtcatgaccaatttggccacatcgtccagccaacgttgggctggagactccgggtcatgggcgacgggcgggtgacgtaggagcgcgcccgcagcttggagcgcgccctggggcgtgctgccgtcgccgtagacgaggaggcgacgctccccatctcgccgcccttctccacctcctgtgggtgtcgaagtcgcggatccttcggccctctcgagcgccttctcccgcctaggactttggcgtggagggggcggtggagtacgagctcgacggcgtgggtttggctccccgtcgtcaccgctcatactcggggagaggtcgtgcgcctttgctggctcggccattgggctgaacaggaaaagcttggcgcacacgaaagagtgcgagagctcaaaaaatccctcgcagagccccctacctggcgcgccagatgacggagcgtggggctcctcaccgggagaccgcgcaggcccccctttgccggttcggccggggactcagggagagattctaagctctctatatgtggaaggctcgcgagacaggaaacacacaagacacgggtgatgtatacaggttcgggccgctgagaagcgtaataccctactcctgtgttttgggagatctgtgtatgaaggagctacaaagtatcagccagcctctcccttgttctgggtttctaatctggaaaagtctagtcccccctctcagtggacaaggtcctccttttatatcttaaggggataccacatgcaccatttctctctttttttgtggggacttacccccccccctttttcataaatggacggagatttgtatagttgccgtccgagtcaccttctgatgagacggcccacaactacctccactttcgccgggagcaggtgcgacgtggaatcgtggctgtctactaacgacatgaccggtatcagaccagtcacgtcggtcattcttgtccaccacgtgtcagcttagcaatctacatgctcgcccttcttcacacaacatcttgcctgtaatggttaggatgaagcctggcatatatctgaccaggactaacgtgccatctctaggaggtaacacgctagctccagctggggacgagcgcctagaagccctcgtcctgacgggatggggcgaggcgtgcgtcagatcgcctgtcgccacctaacccgcgatctgaccggtctgtgactggtcacagaccggataaacgagtgcactgcactgcgttacatgcggcgtgacacgctcagccaaaccgcaataaatgtggttaggtgagtcccactgtgctcacctaacccatacacgcggagcaaaaacccacgaggggtcggggcgcctcggccctcggggccgaggggggtgcggcccgaccccctcggggggactaagaggagggcgaacgcatcaccctcgggcccgacgtccctcgggggtaccaggctacgtgtgcgattgtgtctgcctcaaacctctagtcatgatactcctgatcccatgtcaccgacaaatatggttacgacggtattgtaagagcaggcacaatagcatactataaaccaactataaacacacatcgagaagaacaaatttgtagccagctgcagcacaaatacaagacacaatgtttgtctgataagtgggaccaggtattactagtgtggtacatatttataaacaactattgtataaattgactgttaaattaactatagatgatttgaatctagtactattaaacttgctctaaacctctttgctcattacctgggtaagaagttaggtccccatcgtttggttttttatggaataaaaataaatttataggtaaaacttttatatagatgttcttggtggcttaaaaatcaatgttgaaaaagaaactatattgaaaatatcacaaaatcaaaaatttaaattttggctttttcttttactgattaggccatccgatgggagccttagtacttgtggcaaccagcctgatgctgctgatactacagcatagtggtgcatctgacggggctagggctgggtctggaagtatctggcagccccagcccgattgtccagctccagcgaagtgcggcaacgtcaacattccctacccgtttggcataagagaaggttgcttccgaccgaagggcggctttaatatctcatgcaagcaagaacaagcttatattgggtcagattttctgattaaaataaatattttatcttgatttctgttagcacgttctttcaaattgttaaacggtgaatttcatgcggaaactaaaaattactttaaaatatcagataaattcattttcaagtttaaaataattaactactcctgtactaacggttttcctgtactatacctttatcagaccggacattagggtcacgaattttgatgtagtccagagtgaggctcgcatcctgaccgatataccatcagggacggtagcatggaagtacaacaatgaatttgatccaattgcatggacgtccagaggaggattacgacttggtaatcaccatatggtttccagcgccaagaacagattcacagcaatcgggtgttcaactgttgcattcatctacggcagagacaaaaatggtagcaatggacagtttgatcagttcaccagcttatgtggatcgttctgcttcgacgagggtagcatcgaagacggcccagagtgctccggcatgggttgttgccaagtccccatttcaaccaaccttaggaggttcagtttaggattctataattataacacaaccaaaaaagttcttaattttagttcacgcagctatgcgttcgtggtcgagaaggatcaattcaagttcaagagttcctatgccaaagcagacaatttcatggaggagctcgctcgtgggattcctataattctccagtggattgctggtaatgaaacctgcaaggaagcagccctgaaggagtcgtatgcttgcgttgccaataacagcaaatgcatcgatgtgatagaggcgcccgggtacagatgcaactgcacccaaggttacgagggaaatccctacctcaaagacggctgccgaggtcagaattaattcatacgcatgtgttcaggttcatggttagaattgggtctttttatgagatggaggggataaatttgttcaaaaggactccaacaaataaatttgatcactctctctcaaacacacacagagcaagctaaattaattatatatgcaccctatatatgcgagttgctgttctccatggattcatatgaagttattattattgattcctcactttgttcagttgttaatattgcagacatcaatgagtgcaacgccacaagattcccgaattcttgcaagggcatctgcactaacaccgatgggagctacgactgtaagtgcccactaggaactcacagcgatgatccaaagaacaaggaatgcgtcccacaagtgaagctggtcattggtaatatgtttttcacgctacatttttcagctgccaaaactttttctctaactgttcatatttacagcgaattgagatgcaaaccatacagtttttttttcgactatatatgttgttttcttagcaaaaaataacaggttgttttgtttctgaaattttctacttatccgtttctattcaacctaaccaattccattccaacaaacggaaacaacaagtctgtcataatggggctagtcgagcttatgataggtaatcatccatttccaggtatttgcatcagcatcatcttcctcatcatctgtatctccactctgctgatcaagattcagagaatgaagctggaaaaagagaagcagaggttctacgatcagaacggtggccacatattataccagaaaattatctcagggcaagtcaatacagtggaaatattcacagaagaggtactaaagaatgcgaccaacaacttcgacagcggacaaaagcttggcgccggtggtcatggcattgtctacaagggcattctcagggacaacaatgtcgtcgccgtgaagcgctccaacttcctccacgtgacagacgccgaggaattcgtgcaggagatcatcatgctctcgcagatcaaccaccggaacgtggtcaggctcatcggctgctgcctggaagttgaagtgcccatactggtctacgagttcatctccaatggcactctctcctacctgatccatggcgatagcaggcggtatgcttcactgaaacttcgtcttaggattgctcaagaatcagctgaagcattggcatacctgcacctgtcgacgaaccggcctatcatccatggcgacgtggagtctctgaacattatgctcgatgatagctacacggtgaaggtgaccgacttcggggcatcacggtggctgtccaatgaagctgtcgagcaaattgcgatggtgcagggaacccgagggtacctggatccggagtacctgcaggagaggaagctgacggagaagagcgacgtgtacagcttcggcgtcgtgctgctggagctgatcactgggaagaaggcgatctaccgccacgatggcgatggcgacttcgagagcctcgcaggatcgttcctgcgggcgatggaggagagggtggagaacatcttggacacaagcttggctggtgccagcatggaggcgctgcccctgctccaggaggtcgccaaggtggggagtatgtgtctgagcgccaaggggaaggagaggccatccatggcggaggtgaccgacatgttgaaagctgtaagaattgcgtggagggatcttctggtttcatcggagtacaacgtgacggaggttttcgtcgacagttcagaagctcctccatctggcaacccatcttccgctgtgttctggacgccggacatgcagtctctagaagttgaaactttgaggtgatgtttacagtctagactgtttgcagatattcagagttgcattgtctgcagacgagttgcaaaggtgtttgttcttgttataaactattcctatgtggttttcgtgactgttctagctgtcaattctcaggtttgctatctcaaaatggctattacttagctttgccagcaatgattttagtagtctcaagtgtaacagtagagtaaagcatacattgatatctttcaaacaggtttcagatggcataaagtattcagaatatgatatagtaattaagttgcctgggggggtctatagtcttgttgtaaattattccgttttgacaactctaatttttttttctctgtaaattctcaattctaaactctattatcttctgtgtcgcccttcatcctagaacttgcgcgtcatatcatagatcgctgcagcggaatcgacatcgcgcacgccaaatttggaggccaaaatccttggggtctcgtggggggggggggatttggcggcccggcggcggcgtcgtgactcgtgtgagcaaagagtagagttcgaggagaggccggcggaggtggacgtacctggatgcggcggtggaggcggggccagatctggcggcgcagaggtcgtgggggcgcggagggaggcgcttcgccgccggtcgccgcccctcgcgcgcgccggcgccggcgccgcctaccctaattggctacggaatcagaagataatcaaatcataagtacacccatcgagctccagtattcgatttcttgaccgcacgatctccatccgacggttcacatgaacctaaatggggttcggggaatttttctccgaccccccacgcgaccaccattcgcatcgatcgccttcaaccactcctcgtacatctcgtccgcacgtgcttcatccaacggttcacgtgaaccaacaggggttcggactatttttcaaatttgggcggttcgaatttttttgcatttgccgctcgatcatatatagattatctccatctgtaaagaaattttctcctatagatctcacacaaatccttacggcatgttcagaactcaactcacaactgaaaacgtgctactccatttcagggtcaattcattcatagatggtttcatcagtaaaatactggcacacattacatatatccaaaaatcatatatctccattctgtttgcaatatagatcacacacttataagagcaaatccccacaaatggcgcggggccttaactcgtaatcagggttcacaaaagaaagagataaaaagagcggggtcttttccccagctcattagctttagtattattctgcttaactgaccagcaatggctttacatagcgttaaagttaaacagatactgtcctgtcctactgtacaaaatacattacaaattgacgaaggggcgacatcaccctgacggagcccgcccttgagaatatacagtatcatcatctgtctataaacggtcaggataaatataggggtcaccataatctggcaaacctcttctctacatttaccaagtcatcaaatgcatccagcataaaattgccagttctcatggctatcaatcatctcgttgccgttccatttgtattgaccggaaaatccgtgctgctgactctgaagcagttcgtgaattatgtggaacaaccttgataacattggtctggttgtcccggctgctatatgagggctgaggctggttgttctgagctgatactgtggggaaggcggatacaggaccacttccactgcattggaacctgtcaaaaggactgctagcgctgctggcctgtgcctcgctatctcttgaggcatgaaatctccaaatgccacttggatgtgacatgttacatgagatccacgactgctgctcaaagttcccataaggctgtggcatcgaaggatgtctcccttgttcgactacaggtgccggtgcagttgggttcatcactggtatgctgaaaggcgggaagtagttcataggcatggaaggagggccaggagcacccatatgttgtggctgatgaggcataggaacaccgtatgccgagttcatgaaatctccagctgttgatggaagactcaaaggagtacagttggcataaaacggggccaatatgctaccagctggagggcacggaccagaataaggcttatagacaaggccttccaaaggagacatgacagggacaagccattgattttgaggtggttgaagttgaacgccccagttattttgtttgttatcagaagcaacaggtgtagctcgacgattgcttttagagacgccatttgttgcagcttgatcacgttgaccactgccaagcccagtatcatgaggggagggtgggctgtcttcagtgttttcttttgatacctccggttgctgtagacttggctccacgtcatcgatggttgcgactaaaagaggttgtgctttcaggttttcttccaccagcttgttcttgctacccaacaaggcattgccaaggcaaggatcactttcaataagtacatgtggcgatgctgcaatcaacttctgcacctgattgtaagtcaaatacaagtgtgggttataaacagattatggacaaaatcctatccacgaattaacctgcttaagagtggctagaaggaagagaaatttgctagactcacttttaccaacttatgcagctcaaaaacctggacagcaaacaccctctgttgactgcatagagtttaaagaagattagagtgtaaaacaataaagggaatcatacagtagcttggtaaagcaatacctacaatatcactttaacagggacacttttacaatctttttaaatgagattatgccattcttcttgactaaaatgaaaataaaattgaaaccactatagattaaaattttcattgacatctccaaaagagaacatttcagtagtacaggtgtaggtggacaagaacaacagacaacaacaaaactgattgacctagttgaaaggaaaataaaacatgccggcattctgcagacaactaatccaattacaaatcagcaaatgttgaactagatatatattaattctgccaaagaaatttgtagacatgctgacttgtaagcccaaaatttggcataagtatgcacagtttccatgcatgaggtatttgaaatatcatctggagctgacatctattggcattcaaatatgaaataaaccaaaaacaaacgagatagtcatcatgtttttctgtctaagatgattaagatcaaccgcaaattaagagcaaataacagtaaagcaagggaaacaaaacaaattttattcatcaaagctacctatacgtaattagagctgcaaacaagtctagtttgagtgggccaaactaagctcaaaaggatagttttacttacttcataatagcacgtcttgctttccagaaatgctttgtaccaatggctccaacaattttatctggagaaatctcccaaccagttatacactccaccgaggaatcagacacatcatcaatgttctctgcatcgtgttgttctagcaaccttgacacatcatcacttttctctgcatcgtgttgttctagcaacctttttctctttgtacctgtttcctctatgcctccttgcggtaaattataatgcctatcagtattttcagaagatggattagaggaaatttcatttcttctcattggagggttctgaaatttcatggaacctccatttctgcttgtcgcttgatgcccactatttccaccatgtggctcatcagaatcatttataatgcccgtcttatccatcttaggatatactttagcatgcctgctttcaaacatatctttggaagcatgaaaggatgaacttttttcaacttccacgtttttggatgtctgtgctgcttccatctccttgtctttcaaaggggtccttgatttcacatcagaaacatggattctctccaatttcttgctaacagtgttataacactttgtggatgatttggacactgttgaagggcttttgtgtggatttgcagcaacaaggggtgttgattggtcttgaacccctgcattctcttgagtactatattgaggaaatctggaattgaagacagaaggaaccataaattcatcatcatcggccaatctctttcccgaagaactctttattgtattttctgctcttctttgtggtgcctcagcagttgatcttgaagcataaatatccatgcccttagtctgagaggataacatccccagttcttttcttgaaccactaatcttcttgttgatcttatctgaattgatcttttcagtagaatggccaggtcgattggaaggcacattgaacggctggaacagagaactgtcacgtccataaacctggaagaaaataaaatccatttcagtactactagatttagtgaaaaattgcgaggattccacgctaattggtaggaagcgtatttaaactatccaagaacttccatgttgaattagaaaaagtggtgggagattaagtatctcatggtaagatctcgattttttattttattttcgacccaaagaagggcaaaagagacataatactgcaaatggacttctttctttcttattttgttcacatttcttcatttggaaatctatgacttggacttttgccattcgcacttcatgtctataactatcccattatcaaaaggtagttggatgtgttgtgggaggctattgcagatttgttctaaagaatattttccactcctaaatccttgctgaaaacagtattagaaaaccgttgatatttatcacatacaggttgaacgtgtgcctgacaatcaaagcatatcaaccaccatttttatcattccctttcacgtggacctttttttttcggcaggcaaaaatgcaagacactaaggaggaacctagtgtcaatgatttaaggaaggtgagcacgtcagggagaatagaacacagtacgttgagcagcactacggctactctttgccacctgcgctacatgcagtttcacatgtggacctttttgtttgtatattacaaacaccagacctcagcaaacacaatcatagcatatctggccatatacaatttgcaataagctataatatccgatattgtttgcaaggaacttatgccccgtctccaaaactttaccggaagagctgatgtaaactgcatataatggttttgttctgctctttcgccttcaacacaagtgagttatcagcacggagaaagatcaataatgacactatgacaacgtgcaagcatgttactcctaccacaattgtatgactatatttgcaagtaattgaatcacatgtcgacggcatgatagattaatcagcacaaaaggaacatggcatttgtgcctcaaactgggcttctcggccttaatcttatccaatttttccatgtgtttagctccgttgcactaaattcgcccatcaattcatctatcccaaccgagataactacaaagggtaaggcgtgaaacgccccctctgacctagctcgtcgacgtcgagggcaccatttgtgcctcgaaattatcttcccagcttttagttctattcgatttgcaaggaagtttagctccattgcacagaattattgcctaccaatttaggcttctaattcgattcgatttgcaaggcgtttagctccatttgcacagaattgtcgcctactagtaccaatttagcagtcgcacacactacccccaatcgaatcgatcatacgggcaggacgtcgagtcacctggctctggctctggctctggctcgccgccgacgtcgagtgcgcggggctgcctcctactccgccgccgcctcctccgccgctgaagcgatgcgagggcacggtgaactgctcgtagagcgccatcttgttccggggcggcgcccgcgggcctccgcccttggccgcgtcgttgacgtggagccgcgggaacagcgggcccatcaccttccccttcgcctccttccctcctcctcctccgcctcctcccctcgtcgccatcgcctcccgccgcagcagcttctcgggggcgtcaggccatggcggggtggaggaggtcgccggtttttgtggccatggaaatggaagctacgggattgttttgctttttttttttttctcttggatctggatgccatgctcatccatacgcccattggaggagtgaaaggtgggcccaccgtgagtgagacattgggaaaaaagaaccggtcactgagccggtttataggctttatgatcaccgattcagtagtgtgacaaccggtttaaaccgtgatcatgaagcacatttttctgactgagcatgtataatcagtggcaggtctagaaaatcaattcattggtgtcataacatatatatcggtgtcatagtatgctagttatgcttagatcatgatgttataatatatggataagcagttttgctatagcttttgtcaaaagtcgtcggtgtcgtctggcaccggcccatatactgtagatccgcccctgtgtataatagtatgctataaaccagctataactttataagaatatgtgaaaaaggtaagagaagagagtgaagaaaagtgagatttctagccagctatagcatggattttaagatgttgtctgtgtatgagagggtaggatcagtcattaatggtataatatatatttatagataactattgtatgaataaattattagattggatataaatgatttggagctagtagttagctatgctattaaacttgctcttaggcttcattagatttgtctcttttggattagctacttcttttatcgctctccatgagcatactattttgaattgttgaatggtatctttttttaaaatatatattatatggaaatttgtaccgcaccataatcaactgttcccgctatcgacacccaacccctattttaccggatcaaggagacagagtgcgacggtgatggaactgctcctggcggcaggaagagaaggtattggtctccttctactcatgcatccggttgatgggagagataggcgatgcccaagatgccaacaacatgatgagagagaggtctcgctcagatcctgatcctaccaaatcgcttccagcgacactattgtcccctgggatgggaggtgctcatgacgacggttggacgggcgtagatgaggtcaaagagaaggccatcatcttcattgtagaaagagcccaacgttgttgcccgtgccaaatcgaacaccatgaaaacctgttccacgcactcattgccgtggacgccagcctagagcggtaaaggaactgtggtggtggtcgacatggctgaaatgtgaccaggcttcaaatcagtcaaggggggagctgtcgtcgtcatcggtaagccgaaggggtttgtttcctcctttgttacacggagtctaagccccaccgtcagcgactgcgatgggttgagtaagtgaatctagggctgctactgttaccttcatcattttttaatccactcgaaaatataagacaattttgaaatgactaccttcacccaaaaatataaaagtttattttaggacgaaggtttttcaatagtcgcaggtctgacagaagagtacaaacatacagaggtttcaaagagatttcgaattacaaaaagaaaaaaaaatgaagttcagaatatgaaaacaatgtttagatgaggaagctgacaatgagctctgatcaaattaaatgcgaggaaatgagtactccctctgtcccacaatataagggattttgacattttacctacactgtttgaccactcatcttattaaaaaaattgtgcaaatatagaaaacgaaaagttatgcttaaagtactttggataataaaataagtcacagataaaataaataataattttaatttttttaataagacgaataatcaaacagtgcaataccttataattggggaagtagggagtataatttttccgggccttcaaccaagcatgctctctatcagagtatcagttcgatctatgcttggaccattgagggtgtgtttgaggagtaggagattagagagattggaaagatacgtaaaacgaggtgagccattagctcatgattaattgagtattaactattttaaattttaaaaatggattaatatgattttttaaagcaactttcctatagaatttttttacaaaaaatacatcgtttagtagtttgaaaagcgtgcgcgcgaaaaacgagactcaatctcccctgtctcgcgaacgaacatagcatgaatgaacaaattgaacaatgtcaccacaaagcaaaacaatccttaaacacacaaattgtgttttgcaaaaaaaaacaaataatccttcagtttgtacctctatttcgaaagaaataaactttgaatcagacgatcatcaaatcgccatcgatctaaaccctaattagctgtggaaccagaagataatcaatcaaatcccaagtatagtgttgctggactcacgtccgtttgattattgaccgcacgatctccatccgacggttcacgtgaacccaacacgggttcggagaatttttctccgaaccccacacgaccaccatctcgtccgcacgtgcttcatccaacggttcacgtgaacccaactggggctcggagaaacctcgtcgccggagtgacgtcactcctccggcgagccaccgtgcggagagcgtgaggtcatcgtcccgacaggtaggagagcgcgaacgagttgctgatccccgacgacgtcacctgcatcccgccgtcgctggccgccgccggcggcggcaggccgaacgggccggggccgcgcgccgccgggtcgagcgcgaggaggtcgacgacgatcatgtccgacggcggcggcgcctccacggcctccgcggcggcgccacgcccctcgagcatctccaccacgcgcgccatggtggggcgcgcccccgccttctcctgcgcgcaccacagcgccacgtggaccagcctccgcaccgccgcctcctccaccgcctcgccggactccaccacccgcctgtccagcacctccatcaccctcccttccctcgccatgtctccggcgatcttcgggaagtacgtccaccgcggcgacgccgacgacccgtcgtcgccattctccgcctgcatcaggttgcggcggccgccgaccatctcgagcagaacgagaccgtagctgtacacgtcggacttctcggtgatgccgacgccgagcagccactccggcgcgaggtaccccgtcgtgccgcgcaccgtggtgacgacgcggctctgctccttccccaccagcttggacagcccgaagtcggagaggacgccgcggaagccgtcgtcgaggaggatgttctccggcttgacgtcgaggtggagcaccttgctgcggcagtcatggtgcaggtaggcgagcgccctcgccacgtcgacggcgacctggtaccgcgccgcccacggcaggtacctccggcggcggcgatcgccggagtgcggggagaagatccacctgtcaagggagccgtgctccatgtactcgtagacgaggaagcgcggcccgcgcgggacgaggcagaagccgacgaggcggacgaggtgggcgtgctgcgcgctggcgatcgccgacacctccgacttgaactccttatcggcgtggtcggcgccgccgtcgatccgcttcaccgccaccgccgtgccgtcgtcgaggatgcccttgtacaccgtccccgacgagccccgcccgacggcgtactggaacccgtccgtcgccgccgccagcgactcgagcgtgagcttgcgcggcagcccggcgaccttgcggaagtagctgtactccacgcggatccgctcgtcctccatcgacggcagccgcctcgccatgcgcgccgcccgcctccgctcgcccgccgcgtggtgcagcagcgccgcggcggccgccgacagcgcggcggagacgatgacggcggtggagaggaagaacggccgcgacagccggaagcggaggtagagagcgagctcgaggaccagcagcacggcggcggccgcgccggcgacgatcttggccgtcttgctctccatatctcggccacgtgacgtcacgccgtcaccggctcgccgtcgccggcgacgccgcccgccatggtcagttctttgctcactttggacgcgagttaatttcggattttgacatgatgggttagcaattaatacatgtgagaaaacacactgaaatcttaagagtgatagctacatttcaactaatgtttgtgcctagtgcatcactattggatttatctaattatcttgcagtagtaaggagctgacctgatcaaaaaaaaatgaagggaaaagatatgtaggtgtggagatcaggaatggttcaaatcaataaagtggattaaatgcagtgcaaattggaattctgtcacgccgaatccgtccaaaattttcggtattttgtgtggtaaagttaacactttggttgaatgcatcctcacgtgaatgacatcagtgagtggtgaagtgtgtggtgctggtttggccaaatccaagtttgaatgcatcactgtctcactcatcaaagcaacaaattgaccacgtaagcagtaggaaattaaggatcatataaagaaattacaaaagcaattgactgtttcatccaactgcttggttataatcaaagataactgaactggataggagggagaaggatcatcagaatgctgacttcatttgtttaaactgaattgaacaggaccaaggtttgtgaaatgttcagataacagatcatacaccaaaataaatggtccaggtggccattgaacatggaatcatccatcaagacaaacaaacaaacatacctattttgaattcgactaaggtgtgctgaaaaagagaattgcatatcattgtttactgaatcctgttatttgcatgaacaaatctctaaaaagacaaactttgtttttccaaaatccactgctgctccaagtcatctgaattgagagttgacatggatatggccatatccagtgtttttattgctagaggtgacttctgcaaccttaatgatggtggtgatcgtcgtcatcgtcatgcccatcaggatctcctccttctcctatcacctcaagctgtgaacataaagttgcaagttgatagctcagcgaacatcaggacaacataccaacatatgcgcgatttagtggctcatgcagaaattgctctcacaaggcaagcgattttgtcaacagaaagtaccaacataccgagaaatactgagtgcagacagggcattcatgtggcttgcctttctccaaccaaaaccacacgacatcatgctcgtcctctgaaaatatcaatcattgcaatttgcagtttaagttaattccattggtggttagtcgatgaatatttatagagaagatgcaggagaagatttcatcctagaagcttctttataggtcaaaaacaaggaaattagcatgcacaggtactatacctccttcaccaccgggacaaccaacaatccttttgttgtagtatgactgaataacagctggagcttcctatacaacatggaaaaaatattagtccagttcgatcacgcaggagtggaatgaactaaactgaacagtgacacaaaaggtacaaagggaccaaatcaaggttagatgcaacacgctaaagagtagtaccattcatcaacaggccaaaacagaatgaaaatgatgcccattaatgtgctgataaccttatcagatcacacctaatgcaagtctgaggggaaatgtcatgagaaaaacaatttgtaggaaaataggggtgataaaacaaaagaaaccactgaataaataaataaattgtataacatccgtacatgtatcgatcaccacaactagggggcaatctgccttagagactagagatatatgggaaagcgaagaattttcaaaacactgcacttattttatttcctggagatagacaacatagaaattgcaaattcaacttcatgatcaaatgtactattattgagcaaccaataactaaaaggtccaacattgctggttcaactagaaacctccatattagccggatccacatggacagaatcagagaataaactcacaagatatagtagcagggttttccaagtgaaaatatatttctatgagcatgtaaaggaaagtcttaacatgaaattgctaatcaacaattctctaaagaaaagcaaaatcaagatgcctccaagtactagatataagacaggcccccataattatgcatggaaattcagaatgttatagcctacaaaatccccaaaattattttaacatgctgaaaaaaaatgctctactaaagttataatgaaaacaaagacaaacaaaatcctctttgttaacacaacaggagtcaggcaacacagcccaacctttcttaagcaagcacatctgacaagtgaacaaaacagctatttatgcaagtttttcctatcaacaggactatacgaaaagtcaacacataagatgtacagaatagcaaaagatgtgaccatacgaaaagccaacacatagcaaataacataagctggaatgcacacaccatacagcaaggcaaaaacttcggttgccaatgaccagcccacaaaaatacaaatcacagatcagtgtaaacataaacagaattacctatgttgtaatgactttattaaacgtatgtgtgttgaacttttgcctaatgtttgtgcataaaaatctttcctatgtagggaaaagaactggtagctgaaccaatgctacaatctcacatattcatattcagtgaacaaaatccctgccgtgacccagctgctgcatctgcaacatcagaaactaacacctatctcttcgccgattccgttgagccaaagaagcttatcacctaatatcagaggggaacatgtcaagctattaagagagcgttgcatccatggccacaagtcttaagcactacacatcagcattaattcagtcagcaatcacacactccatctaaccaatcaattcaatagctctcaaatacacgggtcaaaacatccatggaattgatgtgaaatggaaagctctcagcctctcatctcaccttggtaccaaagggcccgacgggcgcgtccatatcaaacctcttcttcccctgaaatgaaaaaaaaattcagaccttccatctagtaaaaaaaaaaaaacttccactaataaatcaatatcaagaggagaggtggttgacctggagctcggcggcgatctcctcgcgctcgagcccggtggcgatcggcatcacgtcctccaccctcgtcctcgcctgcgccgcatctgcgcgggacagagacagacagacagacagaccgccccgtcaaatcgccgcctcaccacctgccgggatcgggccggagttcgggagggaatgttaccgagcgtggagaagaagagagcacggggaaggacgccgccgccgatcgccggggagcggcgggtgagggcggagcggtggtggaggaggacggaggtcgcgcgcttccacatggcgggcggcggcggcgacggcgagcggcgggagatggagaggccggagcggtggttaggaggaggaaaaaggaggcagctttcgggccaatttggggtggttttgtcggcccacggaaatcagaacaatccacttgggtgtaaaaatttaacaaattttgcaacgaaattcgtaaacaaagtgtgttagaacagtgagatgattgtttaaatgcaaccacggtttggttagtttgacttgtttattttaaagttattattaccaaatgatagtggtttcgatggatagatcgttattagtatggtttggtgaaccaaacaaaattgattgtgcatatatctcgtttttatttatttattttagataccacaatgattgggtcttaagattttctttaattattcgacgataggcatgtactattgatatgaaaaataattccagttacacgtgactaagtgacttatattcatatagtgatatagatatactagcttgtttctaaaagaaaaaaaataaaataagataattgcaaaagaaaaaaacaaaaaggatcgacaattacgtgtagagtaacttaaagttgaacaaattgtgttcatttgtttaacttttttttaagtatgattggttatttatgtatataaataacacttcttttacctaggatcttcactgcatatctacgtggcatccggctcgtaatatttcacgccatatcggcctctgttgtcccccggtgaagaacgcgaagccaaaataggacactcgttctcccgtggcgaaacgatggcgtgtgacatgcaggaagagaattgtgagggtgcattgtggaggtcatatccttatcacatcatgccttcacggtcgtggtcgcccccgctcctaaatcacatggctatgtgaaaactcatgtccttatagagttttaggcctagctagcaagtgagacccgagaagtgcgtgtcttgcattgctactgtcctttactatctcacataatttaaagaatacgtctctgtccaaatttaatatatataaagttatcgacaacaatctaaaatttacaaattttctcaggttttactgtctgcagtatctatcttcaaaagttcaaatggtaacaccaccaccatcaacttggagcacgaaattcaaagcacaatccaacggcggaaacacacgatagccaccctttaaaaatcccacccccataaaccctagcaacccaaccccgtcctcctcttccccaccaaaaacctcgtctttctcctcctctcctcccatggcgtccctccccaacggcgccgcctccgcctccgcctccgccgccggcggaggcccggcggtggtcgacaaggaggtggacttcgccaactacttctgcacctactcctacctctaccaccagaaggagatgctctgcgaccgcgtccggatggacgcctaccactccgccgtcttccgcaacgcccaccacttccgcggcaaggtcggttgggtttgatatcttcggtgcgattttggggctctgtgttgatggattttggtggatctgtctttgtcaggtggttcttgatgtgggtaccgggagtggcatcctcgccatctggagcgcgcaggctggcgccaggaaggtgtacgccgtggaggccaccaatatggcggagcacgcgcgcgagctcgcgcgggctaacgacgtcgccgacatcgtcgaggtgatacaggggtccatggaggacgttgtgttgccagagaaaggtgattctctctttttttttattcctcgattggttgttattagtctctgaaaataagggggaattgatgtggctggtggtaattatattcgatctcttgcgaacgaaacatagcttaagaatttgtttcctaaggagaggaaaagttataaagaatttaatggaaacaagaggttaccataatgtgtgttgagtattgattgctttgtttctgtatatctttggaacggcagttgatgtcattatatcggagtggatgggctactttctattgagggaatcgatgtttgattctgtcatttgtgcgcgtgatcgttggttgaagccagacggtgtaatgtaagtctatttatacttctattcatgctaatatagacagaatttttgaatgttgcacacactcttcattctctggaaagcaaaccgtggtagttagttagttagttatccaatatctttgattacattagcaaatacggtcttgtcatttttctggaagatggcaataacctctcaattctgttgttggttcaatgaaatatctgtttcactttcagccaatgtaaaatcaattttggttgcaggtatcccagtcatgctcggatgtggctagcaccaataaggagtgatctggctgaaaataagatggaagatcttgagattgctatgcatgactggaatctatttgttgaggataccgagtcttattatggggtcaacatgaatgttttgacaaaggcataccgtgcagaacatgaaaaatactatcttaaggtatgcctgaatctgtacaaagactggcatgtttgatttaatcttttgtattgcatgtgctgtctgcaagaaaaatgcaatttaaacaatcttataaatatacttgttaagcaagaatccattcatgataagataaataccaaggtgcttgcagcacatatttgattagtatagttcattacttattttattctgtatgtaatataggatccattagtatctctggattacttgttctggttgttcctaaggtctcagcaaaaatagtagtgaatgcacattttcctgcaagctcagtgtacatttggttgtattcttctgcagtctgccatatggaataatcttcatccaaaccaagttatagggcaagctgctgttattaaggaaattgattgcttgacagcaacggttgatgagattcgagaagttcgagcacaggttacaatgccaatcaagctggatatgacaagattagcagctcttgctggatggtttgatgttcattttcgagtatgtcaaactgaactggcacttaatttatctcatgattcagtgagatatgctcactattttctctttaactctttctagggtagtaagcaaaaccctgcaactcaagaagttgagttaagcacagctcctgatgtgaatggtggcactcactggggccagcaggttggtttcctggaattaagctattgtattttataactgcagaaatttgttaccagctagtccataatttgaaatgtatgtattgttctttttaatgtgtgagtgttgatatgtaaagaagaaatcatgtaaagagggaagctccagtctctcttttatttacaattaattgtaaggacaaacagatttcaaaacctttcatgcaaaactgatacttagataaagagcaatatctttatttgaatggcacatgtttatgtataagggcttttattcaaaacaataatttctttcaattgattgtcattatggaaatgcatatcatagaccatagttatctggcacaattcacacatatttactattgctctgattcttttcaaggtattcttgctgactccgcctctgaaagtaaacgaaggggacaatgttaaagtttctttcacaatggttcgctcaaaagagaatcatcggctcatggatatggagttcacatatgaattgcatgagtcatctggcaagcagcttcccgcaatcacaaccaagatttacttagaatagagcaaggtttggttcctaagactacaatgtgtttatgcatttttctttctttattttcaaagtcagataatatgccaacatataaactgtagtgggcactaatagtcatcttaatacccgccacgcaatgctttatttcagtgctttctgtaacaataagaattcaacctaacctggtccttttttttgttgctgtcattacagaacgctgactggatctgattcaattgatgaaaagattgtgtactggctaccatgtctgaaccttgcttgatagttggagccaagctgaactcctccctggtgtatttggtttttaatagagggcctaatggccacattgtgtaatactacccagaatatgtacaccgaggctgtgttgtgtgaggcatgataaaagtgccagagattttgttgtatcagtaattcatcgctcgattggttaattggcttcatgattgctgtcatatgcccatgtgtgctcagtctcaaagtcaaacacctttctcaacattttacaggagtagttgatgctcccagtttgagagggctcagtaatgataaatttgctgttttctgaagaagtcaacagcctgaaggatttgatttagccgttcattcacagttcacacccaatttcaacattttatgatctcattcagagaggattcactgcatccaaagttctgaagggttactcgattacaatttagacacagctctctcttcacttggagtcatacacacacacacacagcacatttattcctcgagtatttacatcagcaagatgattatccccttcctgttacaagcacttgatagggtttaacataatcatcatcaaaacagggtttatagtatgtacagcccccatgaacagattacagtaagcatctggagcacagataaaaacttgcaagctctttcagtggtgcacacaggctgtatctgccatggcaatctcagtttcctctgaaagactgaagaatatccatgaaacagcaatttggctgtcttctaccagctcaaacttgctgcacaacttttcattcttttctagctcatttttccttcttacttcatcaacaaaagtgcgtctcggtgtcgccctaaaagggtcagtgcggttgctgcgatgtgatgagcagtcaacccagccatgtcgagctgctctgtgagcgaagcgtgttcgatgtacctgtctggtagtacaatgggtcgccactgcaagttaacagaaagtcactgtttgaaattatcatttatacaaaacatgaatggagcacaaggcaagtggcatattgcaatacaaaagggtgaagctccattgcaacttgcaagaatattggatggatttatactagataacaggagttaaaatccgtgtaagagtttaaattcttacctttattttgccatcaagcaacccatcgagtgaaataaattgcgagacgtgtgagccaaaaccaccaaccgttccttcttccacggtgattaggaaatcgtgttgctggcacaacattcttatcagatcaatgtcaagtggcttgcaaaatctcgcattagcaacagttgcctggatgccaaagttgaacagaagagatcgagctatcaagcatctctggaccacatcaccataaccaagaaaagctatctctttcccctcagcaagaatctctcctttaccaatctgaaagagagtccccaaaactaataagaacagcatgcaaaatgtttaagcgcacaaaggtattgccagcttgtttttttcagttcaccaaagaacaccagcttttaggtgggcatgaatcccagcattagcgtaactgatagctttcaagctgtactattttccaagtgacttctgcttagaatcaaaaaaagaaattgaagtagagctacctcaagtggattcccatatgctaaagtgccactagtcccaacgatggcacccttgggataccggaagcaaatgggtctgtcctcaaccattgcagctgttgccaccatgtcaataagttcatcctcattagatggtgacatgacgatcatgtttggcaggcatgacatgaatgtaatatcaaatggtcctgagttagtcgggccttcagatcccaccagacctgcacttgtgattgcaaagcgaactggtatcttttgcatgtccacatcttcgactatctggcatatatgtgagctttatcaaatgcgaagtacttgcagtaaagcagccatacagattaagtggagctttagtctatagcccactattacagaaactatgcttgtttcaactattttattgtagtacatgaaaatttggaagatggcttacaaagcctactaatgattgtttcaaccatgtagcagagcaaatatggagtacagttagagaggaggaatacatggggagatgggagcaaagggcacctgatcatatgctcgctggagaaaggtggatggaattatgcagaaaggctttaagcctccgcatgccaaaccagcagaaaacgtaacagcatgttgctcggcgatacccaaatcgaaaaatctgtccggaaatctggactgaaataattggattgatcgatctattcccatgcctccatgaaccaccacaatatgcttgtcattctctgcttctgctattagtgattctacaaagcaatcattatatgtcctagaaagaccattttctaaaaactttagaatgtcttggcttgagtctggaggccctgttagcagagaaaaaagttaataaattatagattcattttagtatcctatatgatttgattgtgcaaagacatgtaggaaggatctcaaaggatagttgacttatacatgtaatatttaacataactgatatgtgaaaccttaaagttcctgaatgttgtgaattgtgaatgattctacaggtgagaaccgattcacatatttcatttgaaatttcagtagtgtgttctatcatttttcaaacaaatacaacattcacatgcatattgccactcaaacaaatccttatcgcgctgtttccttcctcaaattcatgctgtggtgcttcacttatctctctgtattaatatcaaagcaagacatccagaatgtaaaatgagaaaacagagaaagcagaatgtacgctatcatattcataggattgcagaaaatttcgttgacaatttgtaattgcacaccttcctcgtcgggagtaatctcactattaaattctccacctgagtctttttcattctcagtgattacatgcacaagtactgggccggtagaatctagagtagaaacctccttgagtacacaaatgagatcatcaatgttattcccatcaataggcccaatataatataatccaagttcttcaaaaagagttgctccatgaggacctatcataccacgggcatactcatcaattttggcagcaaattcatgcatccctttaccaaaccatttggaaagtccctagaaaggaaacaaaattcgtatcaaagcaggaaactcaaggcagtgcaagactgttgttattaagaaagtagaaagacaacccatgccaaaacttcctggaaatttttcatcataatatgtacagcagcaagtcaattagcaggcttttataacaataagttgaaagtaacaagtacatttgtcactaccagataaaaaagagaactgaaaagaaacaatcaactagaaactatatgtctatactataatcataatcaggaaataacaggacagttaaaaaaaactatgttttattagcaagttcaaatctagtacattatgtcatacagaagcataaagttttacctttgcagcctccctaaactttctaaatcctttgctggattgaaccttgctcagagcactagagagggcattaatagacatctttgattggctatctgctttaggaagcaaggtgtgccggctgtcatttaaaatcactaccatgttagaatcaaggaaaccggcatgacccattgcctcatacacctgaccagccatagttgtccagttacttataactgttactattcggtttttcctcccacctagatcccttgcgactgccatccctgacaagagatcattttcaagctataaacgaataaaaggaaatcatttgacataaaagaataaaacatcaggagattcatgattaaatgtagaaacatacttaggattctaatagactatgcaaacttctataatgattattaactccattagcaaaataagatagtttaagaatttcatatcatgactgctgataccacaccagaaggatatgaacttgaatacatcagaacttatattatatttcttgaattatattttgagtcgtacatcccggcactgtataccttggtttaaaaagcaagaagcactgtttttctctgtttcaggtagctgaactattgataaaatgcatggaagctaatcggagtcgaagatgaaaaaaactatggaatattgtacggattccaaacacaatgaaatcaatatcttaaggaaatccatttaaatagaaggagaggtctaacaacaaagcaagcagttcttgaagtgcaaggcatgaattaatgtattaacatttaacagaggcaacactatatataccaaggcctgcggagagactattgcatccatgtcctgcaccaaagggatcatattcgctctcgaaacgggatgtgaaacctgaaagcccctttctttgcttaatagtatgaaagagtgagcgccttcctgtgagaatcttgtgtgcatatgtctgcagatgagaaaaaatattgaacacaaaaggtaaaacatttccgattatatgaaatggtatatgatagcttactggaggcaaaatcttagcacaaaacaaaaagatagagggatcatacatgctgaccagcatcccataatatcttatccattggggcattgaagacataatgtatagcaatagcgagctccacaacagaatgtccagtgttacatggttggcatttcctcgacattatgaaagatatctccgatcgaacttcaccagctagttgctttaactcctgtctttcaatgggaattgtcaaaaattcctcagccataacatagttagagagtatgctactatgcttaagatagtatgactgacgaccttactagatagatttttcaaatggatgggtgcatcgatcgtgtccaggattggagttggatccttctcccaaaagaaatcatcgacatctggcagcgcagccactcttctattgaagcgctgtacaaaaagagagaacattcaccatctgtgagtatgagactacaaagttcagagtccttctccggccacaaatgtatccctagtgaaatagttatcaaattctggcaggctgcgactaaagctcacacaatgtacttcattcttttattctttgtgggactaaatatctaccctgaagctaaaatgttagccttgtctgcacagtgtactgcagatatggagaaagaacatacccttgatggcatattgaacaccagtgttcgacatggcttcaaattcgatgttttgcatctcaaacacagacaagagtggagacagcaacttgttgagcgcacaaaagttgattcctcacagattaaattaacagcaggtggagaatgcagatatctcccacccatcctgcgcaaggagtgacgaccaaaagcctgaaatttacagtattctttagcctgtgagaaacttattttttttctaaaaataaacatggagagatcactggatcctaaattcatcataaacaattatccacatatgttttcagtgttctagatgaagatgagcacacaatcaagtatcagtccttggaatgacaccacaccaagaatcagctacaaacagcaaactcatctatccatccagggacagctaaaatggagaatcagacggccaaaatccgtaatccccaatttacaccacaggcaaccagcttccactagaaaccgaaatagccgcggggggcaaaagaaaaccaagaacccatctaccgttacctcctctcctccttcaaaccggccacccgccgccgccgcacgcgcaggatcggcggcgagggagccggaggcggctcagcgtgagggggcgctgctgctcgcgagtggcagcagcagcaaccctagctccggtttgggatttgggacgcggagtgctcctctgcgctcttgacatgacagattagttaggcattaatccgagcagaaaaggggacgatgattaatttgacagaggattagctactaaactaatcacgtctctcctaatcattcattattcggttaacttgttcgtccgtactcgcggggcccaactgccagtggcactggagtggtttgctcgggtaaatttacgagattgcccctgggatgagatagagacgaagtgaaaaagaaaaaagcttcgattttttcttttgcagaggtggtggatagatagcgcggcagaggaaagaggagaagaaaagatggcggctttcgcctccgctctccgcgttctcccctcgccgccggctgcggtgcctcgtcggcttcgctcggtgagctcctcgtcgcgaaacccatggataccttcttcttctttctgccccttgctcgtgcgctcgctggaagctttctcatttggcgagctgccttgttcttcgatttgtgacttgagatttgataaaagggataggaaggggaagggagacactggcatttcaaagagttagacgtttggaattcgagggcattgcaggttttttccttgcagattttaggatagtgcgaatttgaggactttaaatcgattaataattgattatgagtggcactataatcttttgtaccatattattatcggtctcaaacatgacaccgctaaagatcatgtgtgtctgtgatgttacaaatcaatatactatttgataagttagtgatcctttatggtggatattcagcttttgtgagtaatttttcaagccctagttttttaagaacaggtttgtataggtggtgggtctatgtagtgtcatataatctcattgtagttagacaagatcgtttctctatgttgttggtattcaccacggtaagtcagccacgtctcatttttcttccatcttccactgtgcatatgcagtgtaagatgtttaatgtttctttgtgttaaatttggtgaactgtgccagtttccatgataatccgtgtcatgcttgcgtagtgctcaagcaatgctaaagagagcttaggattgtgtgtatcacgctgacactgggcttagcaaccaatgttctattgtgaagttggaatgacattacaagctttgaagattgtacctcagcttttgtaattctacgggcccttgactatgatgtttagtgctggttgcaatctttacgccttctgtttgttgcagagagaacaaaggcagggctgtagatctcgaaggtattcaaaagtcgtggcttactacgctctcactactccgccgtataaacttgtatgttctcctcacctgttaatattgcctcgacagattacattctgccatttaaaaggaaaagattttaacttatagcttgtcctatggtgtccaggatgccctggaaccttatattagcaagaggacagttgaacttcactggggtaagcatcagcaagactatgtggatagcttgaataagcagcttgctaccagcatgttctatgggtacactctggaggaactaataaaagaagcatacaacaacggcaacccattaccagaatataataatgcagcacaggtaatgttgttattatttggcttttttcccccattagttggatattttatttgtacccatcaaattttcatcctgatagcttcagtgtacatgtttaattgttgcacataactgaaagcctgaaaaaaggatgagcagtaggcttattatggttctaattttcaatcttctgaaatacaggtatggaaccatcacttcttctgggaatcaatgcagccagaaggtggtgggtcaccagggcgaggtgtcctgcagcagatagagaaggattttggctcttttactaattttagggaagagtttatacgctcagcattatcacttttggggtctggctgggtttggcttgtctgtaagttttttattttcattttctttgaagttcagcctgtacaggcactgttggttcaatctgacttcctgaaatgttgtttctacaatctaaatttagtttttaaagtctgatttatacacgtctggtctatcttttgcttgtttcagtgaagagaaaagaacgaaaattttcggtagtccatacacaaaatgccatcagtccacttgcacttggtgatattgtatgttttctcatttccttttgaaatgtttagaataatagcatcccaagtataaacctttgtgatgacattccatgccctcttctcttgcagccactcatcaatctagacttgtgggaggtaaggaaatgacactgcgtttagatattacattatgctaaatattgacatatctacttttgtgtttcagcatgcttactacttggattacaaggtattttctagatcctctttttcttcttatacctaaaattgtaattcaccaagtactaagctatcataaatcactggtgatgcttccttttgatgcttcaggatgacaggcgaatgtatgttacaaactttatcgaccatcttgtctcttgggatactgtcactctacgcatgatgcgcgctgaggcttttgtgaaccttggtgaaccaaatatcccagttgcatgatatgagatgatatggatatgacctagagatatctatgcatgtattctcatcatgaggtaaaatccagcattttgcaacatcatatctggtacatatgcagcttaattatgtagttcatcattcagtatatatacaaaaagaaactagagaatcattcagtttttggtgatgacttattttcaactatgacgcatcttcagcattagcaatgccagaaatcatgctcctaggacattatcttataacacaaaaaagttttctcttgaaaaacagcacgtgaggcaatcaatcaaatatcgggattgagatttaaacacatgctgctgggagtatcagggagcatgtcgcttgatgctgttgcttcggctgggttaagaaacagaatcaagtgccctcaaagaaacagaaatcgacaatacatgatagcatcttatgacgaattagattgaagaccgtagcagacaagtcagtaaaatttggttgcacaatcgaatctgattattagattgtgcactaatgagtatgaagagcttagtgttaattacttcattgtgtcctcctttacagatatggtcactaaagaaaggacctatacaacttgcatgcaggccgctttaagaaaatagctaatttgtaactgcacttccactaatacttatggtcttatgcacttaacttaatcgaccactcactatgaaactcttagtgaggtatttttcttgagcaagaatgaagttctattactcctttgatcctttcaataattcgtccattttacttatatatgtagagtcctagttcttttgcaaggtttcctaggactttgaagttgtcagtgaactggttccctgtgaaacttttagtcttaattagacatccacaacttcacattgatgctatattcttacaaaaaggaaaattattactaaagctttactagacctatcgctttccatgtcctacggtgagctagttgatgcaatgttcttgcatccagtatatgtcagtgcacaaccgcgtgggtccttattccccaaagtggtcctcatgtctttccttgtaaccacagacagcgacaacttttttgtttttagactctacattgttttgcttgatatgtagcaggagtagactatgctaaaatgtttttatcttgttctctccaattttcagcgacgccgaggaatttctagatcacatgatacctgatgctgagattcgcatgcatgagagacacttacaccacctcatgtcctgcacggtgaaatagtggaaatctgcttgaggataaacagctttggttttatcgtcaccttggaattttgatatagcatcaaagcaaccttgacactagagcatgattacagagtatgggccatcgatctaacttcttcttgaagctgcaccacttcttgcaaacgtttatgcttcagaactaggacccatggtcccattatgctttttagattagatcttcatcctaagtttcgacaactcatagctgtagtttttgtctttcttttggcacagaattctgtcattgttaagcctagctttgttccctctattatgtaacctgacctttatgtccccattgctcattccttttgtcgacattgaattatttgatgcgatattttcgcatccattactaagcttttgctcaaagtcacagcctattagccttcacctccaggttattttatcaaatgaatgtaatggcctttggaaataaagaagcatccttggatggactgtttcctgctctgccctgtcatgttggtggaaattctgtgttagattattcagatttcagaaatctgtggaccgcgtcaaacagtaggaaataaattatgtggacacatatataaaatttttacccacaaattatcgtttttcttgttgataaaccgtactgcttataaccagcattaggcgaaccgatgacagcctaagaggatcgctgtttgttttaactctttcttgaaggttgtgatcatcggcttcttttgaaactacccagcagataagattatgggctagcattacatccatttaaccatgttggccttttcattttacaacacagttgcaatccataaagaagttagcatgaaactgccagaatgggcttaaatcagcactactcattccattcatctttctgttgtaacagaaatgcagccgttctgcagcaccacatggctgcagtctgcagacatctttgtcttctactctgtaaactgcaaccaataacctgctcatgtgatgtctactgtcaatagtggatgtaccctgcaacaactccaattgaaaaaccatttgcatgttccatgctgattggtatggcaggttaacctgctcaacttgtcactggatcaatcaaaacagtaggaagaatctgtctgtacgactgt

SEQ ID NO: 7981 - DNA, 987 bp, Oryza sativa
ttttttctggtaactcaggaagcaaacacacccatctcgttttgattctttcctctggattacgacgtaagtgtggcagctatgtcgtcgtcggcggcgccggcgaggaaagcagcaatggcaccgtcgccgcccccgccggctcatccgccgccgccagcaacacgttccacgggctcaactccggcagcgccgccgccgccgtcgcagccggacgtgcgtatgttcagtcgccgcgagcgacggcgctgcggtcgcgcgaggtgcgagccagtcaccaactacggcatgttcccgaccaccggcgcttcggcggcgaggacggccatggcggggcgaacgatcaatggtggcgcgtcgatgctgacgacgacgacgacgacgacgacgccaccgcacctgatccagcagctcatggtgttggctggctggaccacccggagtccgtggctccagaaccacgcgtccatgtcgccgcggggctcgccgtcgtcgttctcctccgggagattctccgacccccgtgggatgccgtcgacgttcgcttaccgaacacccggagctagtagcggccgcgttatcgacaacggcgccgtcgccggccgtggcaagcagatggccggaactagccgctcacttgagattatcgccgttgataccggcgccggaagcagcaagaacgcgtcgccggccggcggccatgcaaatgccggcgtggtggtgaaacgtttggcccctgtgctcgcgatgccgagtgccggagccgccggcaaagggaaggaggaggcggcggcggcggcggcggctccgtcgccaaatggccgcggccgtaagcgcgcgccgcccaaggtgagcaatgatccggcggcgggatccgacaagaagccgaggaagagggccaagaaggcggcggccgctggcagcaaggtgaccgtcccggctgacgtgatcatcgtcgacgacgacgtcaaccagccgagctcgaac

SEQ ID NO: 7982 - DNA, 1629 bp, Oryza sativa
gcccctccgccccaccgccgctccgtccgccggcatgctcctgccgccgctcctgcgaggacgaggaagagcgaagaggaagagaaacgagagccgagaaggacatgtggggcccacgtgggccccaccattcttttattgatttatgtgtgagactgacatgtgggtcccatgaagtttattatttttccggatcaaattgccacgtatggcgccacgtcaatgccacatcaaaagaagactaagtcaaatttgccacgtaggcgccacgtcagccaaaaccaccctcaaaaccgccgaggggcctcatctgcactggttttgatagttgagaaacccgttgtatctggttttctggttgaaggacgaaaatcggattcattgacaaagttaagggacctcatatgtacttattccgcacccagccttggcagtaaatggtgggaaaaagtacaccgaaggtccctcaacttgtcatcgggatacagaaacatcctcgaaccataaaaccagatattcggcgtcccttaactatacaaaaccggccatatcaggtccttcggtgattttaacccggttttagcctacgtgggcgtgggacccacgtgggccccacatgtcagcatgccacatcaacttccctttcctctcttctttcccttcctcccctctctctctctctgccactcttctatcgcaggccaaccgacaggtagggagcagacggccgggcgacgagcggggctgagcggcggccggcggaggcggcgtgcgagcgcgcggcggccggtgaagcggaatggagcggaggcgcggagcggcggtggcggcaggcggccgagcgcgcagcggccgaccatgtgaccgttcgggagcatgcccttgtacacggtgccgaaaccgccggcgccgagccgagccaagtagttgttcgtgaatccggccaactgctgcgccgtgaaccggatgggcttctcgccggcgatctctttaagaaacctctcgatggtggcgttgcgtatctgggagtccggcaccaccgtgtacatcgccgccgggccgtccccggcgcgaagctcgtgttggtgttgatattgacggccgggaggccattcttcttgacacatctgtacatgaggtaaacaatggcgactgatccagcaatgctcaacaccgaaagcactgcatcaccagagatcaaaccaagcatcatctcagtgaaaccagttcatcatctcgaaacaagaaactgaacaaaagaaagaaaaacaggtacaaattgtcgaaatttcacgcaccgacgacgatggccagaaggagttgaaagtgctggaggcgtgcgtgccgacccgggcagaggtggctgggagggagaagaggggcacgccctcgatgcggcggcggaggagaaggaggacgccggccaccgcgccgcggcgggatccggcggggacgagggggatgacgacgccgacgaggaggagaggatcccattgggaggagcgggcgcggggcacgccgacgccgacgaccaccatgcccgccgctaggagggccgccacctccaccgcctccgcctactggccgtcgctccccatccgccggccgccgcgtgcgcggccgcctgcc

SEQ ID NO: 7983 - DNA, 14838 bp, Oryza sativa
tgttttttcaccttactgcactctctaggtgttccattctttcttcttttatgaaataatattatacatgttccctttctataagaatcaatcactaaaggggtgaataagcaatattaaaaataaattacacctaatcaaaactaacttaagtgactaggctttgtgaaggataagactaactaagcaactagattaacttttgcaatcctagggtgatagggcttaagtatgtctctatgaatgtaaattgcatagaattacatgaaataaggtagatgagataagagacaaggaatttttcatccgatgttcggaaattcgcgggttttataatttgcaaagaattttataaaaaatatttttttgtctttttaatttttcatattttttgtcttttttatttttcttttcctccttattttatgtatttgcactggcccaatcacgcattgtgtggcccaactacgcacatggagcggcttttcttctcttttatttcaattcaccattgtaactcgcacgctcgccagttttatagagagggtttcttacccggtgctttttctgtcgcttgtatctcgccacatgtcgctcagccaattagctggcataaaaccaaccaacatgagatacatagatagattgaaaaggggaacgatattttaggaagcctttagaatctggatgttgtaccttttgtttgcttctcgatatttttttcgtatggatattctctagatttatctcaaagagtatagataattgtgaagtgtagcgcccgttccgtcgtggcgcctagcgggaaaattatctcttaaaaaccctaattgcgaaatttgtttctttgcttgttgtctagtgtccgtgccatctcaagatctcaatccccgatctatcgtcgagttcaactccgaatccaattcctttcaatcaaattcctccgcaaaagtctattttgcctcccccgaggtcgatgggccgaatctcgctcggcccatcttcccctcttccccggcccatctctccctctcccccctgggctctctctctctctcttccccgcccgcacgctgctcgcgcgtgcgagagcctccccgagcgcctctctccccgccccccctccgccccgcccgcgcgccgcgcgcgcgtgcgcgggagtcgcccgcgccgagcgcccctcccctcgcgcgagctccccgctcgcaaagacgcttcccgcgcgccgtgttcgcgtgcgcgcgcccgcgcggacgccgcccgttgtttcccgcacgcgcgcgccgagtggccgaccgcccggtcgccgccgtcgtcagcgtctaccgcgcctgtcgccagtgtcgccgctccgctccaaaccgcccgccgtcatcgccgtcgtcaccgcccggcccccgccactccgcgcgcaagccgccaagggaaggaggccgcgcccctcctctctctgccgcgtcgcccccgctcccctccccctttttcccgaatcggcaaaggggcaagccccctttctccccctccttttccccttttccctcctcgccggcgtcatcctccctgtcgccgctttggccgcgaccgccgagcgccagctcgcgcccttgaccgccctaagtcggttcccaaaccgacattgccatcctataaacccaagcctccccctttcccttcctctcccattcgcctcctcaccgttgccgccgcccccgtgctctgtctcgcctccgccgtccttcgccaagcgccgggagagccggtgcgttcgaggacgcggaaggggacttcggccgcgccctctccttcctcttccccggcccgaggccggagagattactcccgcgccgccggcctctcgtcacagcgcccctcctcttctcggtgatgtctctctccgttcttcctcctcgctccatctcctccccctagctttcggtagtagcttgagtagcctccccgtagttagccggcgccgccccgaccgctgccgtcgctcgccgtgtgttcgccgccgtcgccgctcgagctccgtagcacccgctcgtcgccggcctcgctcggcgtagttccgcccaatccgacgctagcgtcgagttcccgaagccacgtagatgctctcaccgccgggaatcgacctctcgtgacctcgtcgccgtttccctcttctcccgccgccggttgccgccgccgcaatccgccgccgtcgagcaacctccggcgaatccgagccgatggctcgccttcccttgtcacgtgcaaccgcccggtgtgctcgctgttgcccgtatcgccgtggttcgctccgccgctcgccgccgccgcccgccgtccattcgaggccgggtcgtcgtctacctcccgccagcccacgtggccgccacgtaggcgccacgtcggcgccagctcagcctagaccggatcgagccgaccccggtcagtccctccccgtgcgcgcgttccaccgcgagccgtgaggctgcgcgtgggcccgccgcacctgcgtccaccacggaccgcgcgcgtgcaccgcgtcctttccccgcccgcgcgcatgagccacgtactccctccgcatggtgagccgagccgctgacaagcgggtcccacccgggaccgcgcgtggtgagcccggtccaccggactctctctcctccctcccgcgcgcgcgcgtgcttgggccgtcttgggccggccggcccgttaagctcggccgagccgctccatttaccttggaccgcgccctagccgcccgaggaaaagtctaatttccatccctctgttctttcttttcttttctttttcaaaaaggatttaattaaatccttttcctttagaccaaaaatccaataatcttataaattcaatatcttcccaaccgtaattccatttgactccattcaacttctaaaatttcccaaatctcgagatctatctagtggcacgcttagaggtctttaatagggctctattttcgccgttttgttgagttgtcccgtttcgcgtgtagtttcggagcccgaagacccgcagtgcaaggatttcgaggatcaagctccagatctcgagcaaggcaagccacctttgaacatcttgagcctatatttgaaatttaattattttgcttgcgaaatattatgcattgataggatcacacttaatctgttgtcccgtctgcaaggcagattggcagacctacctaatttgttgcatttgatccttcctttgttaattgttataccatgtccccttgtaaccacccagttgcacctcgatattcgtgcactctgtgcgagtatcgacggtcgccttcaaacttaaaatctgagaaacaacttgggtaaaactggagttttacaaaagacttggaaaacccgacacctgggtcggtgcttgcgaactaaatgaatttccaaaaccgcggaccggggaacgtaccgggtgtacggtttcccgctctcgcacttaaggaccgattccttagaatttcatccaaacataagacaagtacgaccacatgggtggaatgggacacccctggctgagtaactagcttatcaggggagccttgatgccaagagacatgtggattcgccggggtggtgtcggggaggacccctgggcttcctggcacagtatggtctgggacctaacctgttgttggtctgggacccctctcgtcggcatatggtaaacctgtatcggctttcgaaatgccttgtcatgaaagcttggaggtctcccgacgtggctgatccccacgggctgggtgatccgggttagtaatgtcgtgtgggtaaagtgtaccccctctgcagaggttaacaaactgttcgaacagccgtgctcacggtcatgggcggatgtgaggtgattcctagtgtagttttgtctgactactgcttgtgaaattgctgttgtgaaactgggttcgatgtttgaaaaatcagcagctgacgggatcagctaggcccgggtggccgtttgaaatgttgttggcccgggtggccgtttgaaaagctgttggccgggtgccaaccctgtttcaagatctaaagactgatacattgcacatactccgaccggacgagacgcactgtctcatccgtgtcgtttgagaagcactcacttagactttttagaaaagagttcaaacaaaatcaattacgaaaacaacagcctttccttgaagcctgcattaaacacttatttcccctggcttgctgagtactcccgtactcacccttgctctatataaataatcctcccccagttgctgaagaagatgaagtggatcctgctgacgaggagttcttccaggagcaagtcggctacgatgagttttagggtttcggcctagttcccaagtcgcgcctgtgatgattggtccaagtcctggcttccgctttccttttgtaatgcagttgtgagctcgggatctgtccgcagcccaatatgactgtacttctactctataataaagagacctctgttgctgtgatactctgtctccctgtgataccagcactatttcctgggactggtatcgattaacaggttaatttggagcgtcacgggctagttccggtcgggactagttcggggcgtgacaagagatggtatcagagcacaggcttggccctagggcgaaacccgacacttaggacgaccctaaggatactaagttcaaaactacttgcgaaaagctaaggtttcttttgtcttctttattttcaatagtttgtttctaaaatggttactgatctttctccctctttcaaaattgtagatggcagtgaacgccagtttcagttcccacggttttggtgagggtcaccacgtcgctcagcttcgtgacctcgcccgtttccttggcttctcgtgtcccgagtacacggggtactccgtggaccgtgttccccctcactgtgagctctctgtgtacctttacccccgtggaggtatacacggagctggccttcgcccacaccacttcactgtagccaggcccactctccagatcgcgtaccaggacctctcctggactgcgcttcgtcgcctggcccacgactacagccaccgtctcggaggctccgccttccggcagcttccacgccttccttctggccactcagacgccaggtacccttgtccgtacagcgagtctcagccagtgctgactcgcatggttgagctttcggaggctcaggccactcagcacgacctactccttgaggcttaccgctcccttgcccgccgctacgccgccttggaggcccgtctggccgaggagggtgtcacctcagttgacactatctcctgggactcaggccgcctctgccacgccagccacctgtcctcccacagctcccgcggctctgcccgcactcccagtggcccgcgctcccccagctcgcgtgcgccgtactcaccagtgtactcgccctacccacacccagttagcccttcctacaccccaggacacaccccagttgcttcctcctgccgtggcccacgctttatccgcactgcgcggaagcgtgttgttggttctgccaccgtgttccgtttccactacccagctcccctaccgccagcggcccgtgctgctgccggccctcgacaggttccgccggtcccttcgcgccagccgatcgacgtttcttcgactgaggagccgactacaggaggcagccaggccgacgaggagtagaggaggcagtcttcagcagccgtccgtgtgataggcccttttgttccgccgccaactcttttggagtcgtggcgaggtagtgcgtgcgtgtgtttgttgtgggtgttgtttggtagtctggttctcctaggtggtgtgcgcacagtcaagctcggcgtagctctgtgacttgtccacacccgttgtatcaggtgtttttatgatttgaaaaatccagtttatgcctagtgtgtgctatctgagttgctatttgctttgctccttgccctcctaagtgcttatctgactcttaccccgccctcttctgggagtttagatggctagccgcccccgccgtgcagctcgtgcaccagcccgctttggttttgaggatggtagagttgagccagaagaaaatcatgaatcagctaatgagcagtctcaccacagcaaccgttcgcatcgtactgtttcccgcaacgcagaggttgagcaaccccgccgcagcagccgctcgcatcgcacagtttcccgtgatgcagagatgggacagtctcaccgctctcaccgcactgccagtcacaattctggagaagaacgcctccctttcccacctcatgtggaaaccaacatgcaacacttaatggcagttcagacacaaatcttgcaaggactaaccacagccatagccagttttcagcataatgcgcatggaaatggccaccctcacatgggcaacaacagatccaagctgacagactttctgaggtctcgtccgccagagttctctcagaccgtcgagcccgtcgaggctgacgattggttgaaagatgttgatagaaaactcaacttagtgcagtgtactcctgttgagaagatgctctacgcctctcaccaactaagaggacctgccgcagattggtgggagaattactgcaatgcacaccctgaacccactaacattgcttgggatgagttcgctacggctttccgtgcagctcatgtgcctgaaagcactattgacatgaagaaagaagaattcaacagacttaagcaaggcaacagcagtatcaatgagtacctaagtcagttcaacaagttggctcggtatgcccctgaggaagtggacacagacaagaagaagatcaggaaattcttgaaaggaatcgcagttggaatgagactccagttgcttgctcatgacttccccacttttcaacatatgatcaacaaggcacttctacttgaggatgccagaaaagaggctaccgaagaatacaagaaacgcaagtctaaccatcagggaaattctttccgaggcgcacctcgccctcgctacggtcaacccatgcaataccaccagtcggtcactcaggctaaccgccagccaggctacgcccctcgtcctcagataaaccgtccggcacctcagccacagcagcgtgcccctagtggcaatactgcgcctaacagtgttatctctttcaagtcaccgcagggaccgtcagcagttcagtgtttccggtgcaaccagatgggtcactatgctagacagtgtcctcagaatcctaccaacaccaactcagggcatgctaatggcagcactgccagaactcctactccagcggcagctcagtctcgtcctagctctcaggcaagtggacaaggttcacgtgcttccaacaactttggtcgaggccgtgtgaatcacattcaagctgaaaccgctcaggatgctccagacgttgtgatgggtatgttctctgttaactccgtacccgcaatagttctgttcgattcgggagcttcccattctttcatatcgcaagcttttgtgaaaagaaatggttggaaaacccaaaatttgcgtgtaccaatgatagtacattcccctggaaggaatataagggcaactcaaatatgcccggaagttaaccttagaattgaggaagttgacttcctagccaaaccgatagtcctagactcgcaaagcttggacatcattctagggatggattggttggctaagcacaaaggacagatagattgtgccgaaaagtccatcaccttgcaaggacctggaggaaagcaagtccgctttacccctaacacccctaccgcaagtcggtctatcctaacctgtttacaagtcacctccttggagtcggtgcccatagtctgtgaatatcccgacgtatttccggaagaattaaaaagaatgccaccagaccgagagatcgagttcgccatagaactggcaccaggcacagctccaattgcaaaaagaccctaccgaatggcagctaatgagttagcagaagttaaaagacaaatcgaagagttggagagtaaaggttatgtgcgacctagctcatccccttggggagccccagtgcttctggttaagaaaaaggatggctctgagagaatggtaatcgactatagagccctgaatgaagtaactataaagaacaagtacccgttgccacggattgacgatttattcgatcaacttaaaggagcaagagtcttctcaaaaattgacttgaggtcaggttaccatcaactgaaaatcagatctgaagatattccgaagaccgctttctcaacgcgttatggtctatatgagttcacagtaatgtccttcggactcaccaatgctccagcattcttcatgaacttaatgaacaaaatctttatggaatacctggaccagtttgtcgtggtattcatcgataacatcctgatatactccaagaacgaggaggaacatgctgaacacctgaggcggataatggaaaagctcagagatcatcaactattcgcaaaattctcgaagtgcgaattctggttagaccgagtagcatttcttggacacgtgatctcgtccaacggtgtcgaagtagatcccagcaaggttgaagctgtacttgcttggaacccgcccaagaatgtgtcagagattcgcagcttccttggcttagcgggatattatcgaagattcattgaaggattctctaagctagccagacctatgaccgagctgttaaagaaggaaaagaaatttcaatggtctgcagcctgtgaagacagcttccaagaattgaagaaaaggttgaccactgccccagttctcaccttgccagatatccgaaaagatttcgagatcttctgtgacgcatcaagacaaggcttaggatgtgtcctaatgcaagaacaaaaggttgtggcctatgcatccaggcagctcaggcctcatgaagccaattatcccacccatgatctcgagttggcagccgtggttcatgctcttaagatctggaggcactatttaatcgggaacagatgtgaagtatacaccgatcacaaaagtcttaagtatatcttcactcagaccgagttaaatatgagacagagaaaatggttggaactaatcaaggattacgatcttggaatccactatcatcctggtaaagccaacgtggtcgctgatgcgctaagtcacaaggcctattgcaatgtagctcaaatacggcctgaccaagatcacctgtgcagagaattggagaagttaagactgaccgtggtacagtcaggtgtccctgccagcttgacagtacagcctaccctagagtcgcaaatccgggaggctcagaaagacgacgaagggataaaagaattaataaaaagaatacaggagaagaaagacaccaatttctccatagacgataaaggcacagtttggtgcggaccacgcatctgtgtaccggccaagaaggagttaagagatctcatcctaaaggaagctcatgagtccgcctactccattcacccaggaagtacgaagatgtaccaagatatcaaggcatacttctggtgggctggaatgaagcgagacgtcgcagaatacgtagccctgtgtgacatttgccaaagagtcaaggcggaacatcagaggccagctggtctgctgcaacccctaccgattcccgagtggaaatgggaagagatcggaatggatttcatcaccggtttgccaagaacccccagcgggtacgactccatctgggtaatcgtggaccgactcacgaagtcagctcatttcgtgccagtgaaaaccacctatgatggaaagaaactagcagaactctacatgactcatgtcgtatgtagatttggctgtcccaagaaaatagtgtcggatcgaggcactcagttcacctcaaggttctggaagcagttgcatgaagccctcggaactgatctaaattttagtacggcctaccatccacagaccgatggtcagacggaaagggtaaaccaaatcctagaagacatgctacgtgcgtgtgccttggatttcgaaggcacttgggatcgttgtttgccgtatgctgagttctcatacaacaacagttatcaggccagcattcagatgtcgccgaatgaggcaatgttcggaagaaagtgccgcacccccttgtgctggaatgaggtgggcgaagccctggtattcggtcctgacatactcaagtcagcagaagaacaagttaagctgatccgagagcgtttaaagacagcgcagaaccgtcagaaaaattacgcagacaatcggagacgtgaccttgagttcgaaaagggagatcatgtgtacctgcgagtatcacccctccgtggtatgagaaggtttgggatgtccggcaagttagcaccccgctacatcggtccctacctcataaccgccagacatggcgaagtggcttatcagcttgagctacctgaaggtctcgcagatgtgcacaacgtgttccacgtatcccagttaaagaaatgtcttcgagttccagaagagcaagttcccctgggtaatatcgagctggaaaagaatctgacctacaaggaaagaccgatcaaggttcttgaagaggtagaacgtcagactcgaaggaagaccatcaagttctataaagtccaatggagcaatcattccgaagacgaggcaacctgggagcgagaagatcttctccgcgccgagttcccggacctgctcccttaggtgttgaatctcggggtcgagattcttgttaggggggttggtttgtagcgcccgttccgtcgtggcgcctagcgggaaaattatctcttaaaaaccctaattgcgaaatttgtttctttgcttgttgtctagtgtccgtgccatctcaagatctcaatccccgatctatcgtcgagttcaactccgaatccaattccttccaatcaaattcctccgcaaaagtctattttgcctcccccgaggtcgatgggccgaatctcactcggcccatcttcccctcttccccggcccatctctccctctcccccctgggctctctctctctctctctctctctctttcccgcccacacgctgctcgcgcatgcgagagcctccccgagcgcctctctccccgcccccccctccgccccgcccgcgcgccgcgcgcgcgtgcgcgggagtcgcccgcgccgagcgcccctcccctcgcgcgagctccccgctcgcaaagacgcttcccgcgcgccgtgttcgcgtgcgcgtgcccgcgcggacgccgcccgttgtttcccgcgcgcgcgcgccgagtggccgaccgcccggtcgccgccgtcgtcagcgtctaccgcgcctgtcgccagtgtcgccgctccgctccaaaccgcccgccgtcatcgccgtcgtcaccgcccggcccccgccactccgcgcgcaagccgccaagggaaggaggccgcgcccctcctttctctgccgcgtcgcccccgctcccctccccctttttcccgaatcggcaaaggggcaagccccctttctccccctccttttcccctttttcctcctcgccggcgtcatcctccctgtcgccgctttggccgcgaccgccgagcgccagctcgcgcccttgaccgccctaagtcggttcccaaaccgacattgccatcctataaacccaagcctccccctttcccttcctctcccattcgcctcctcaccgttgccgccgcccccgtgctctgtctcgcctccgccgtccttcgccaagcgccgggagagccggtgcgttcgaggacgcggaaggggacttcggccgcgccctctccttcctcttccccggcccgaggccggagagattactcccgcgccgccggcctctcgtcacagcgcccctcctcttctcggtgatgtctctctccgttcttcctcctcgctccatctcctccccctagctttcggtagtagcttgagtagcctccccgtagttagccggcgccgccccgaccgctgtcgtcgctcgccgtgtgttcgccgccgtcgccgctcgagctccgtagcacccgctcgtcaccggcctcgctcggcgtagttccgcccaatccgacgctagcgtcgagttcccgaagccgcgtagatgctctcaccgccgggaatcgacctctcgtgacctcgtcgccgtttccctcttctcccgccgccggttgccgccgccgcaatccgccgccgtcgagcaacctccggcgaatccgagccgatggctcgccttcccttgtcacgtgcaaccgcccggtgtgctcgctgttgcccgtatcgccgtggttcgctccgccgctcgccgccgctgcccgccgtccattcgaggccgggtcgtcgtctacctcccgccagcccacgtggccgccacgtaggcgccacgtcggcgccagctcagcctagaccggatcgagccgaccccggtcagtccctccccgtgcgcgcgttccaccgcgagccgtgaggctgcgcgtgggcccgccgcacctgcgtccaccacggaccgcgcgcgtgcaccgcgtcctttccccgcccgcgcgcatgagccacgtactccctccgcacggtgagccgagccgctgacaagcgggtcccacccgggaccgcgcgtggtgagcccggtccaccggactctctctcctccctcccgcgcgcgcgcgtgcttgggccgtcttgggccggccggcccgttaagctcggccgagccgctccatttaccttggaccgcgccctagccgcccgaggaaaagtctaatttccatccctctgttctttcttttcttttctttttcaaaaaggatttaattaaatccttttcctttagaccaaaaatccaataatcttataaattcaatatcttcccaaccgtaattccatttgactccattcaacttctaaaatttcccaaatctcgagatctatctagtggcacgcttagaggtctttaatagggctctattttcgccgtttgttgagttgtcccgtttcgcgtgtagtttcggagcccgaagacccgcagtgcaaggatttcgaggatcaagctccagatctcgagcaaggcaagccacctttgaacatcttgagcctatatttgaaatttaattattttgcttgcgaaatattatgcattgataggatcacacttaatctgttgtcccgtctgcaaggcagattggcagacctacctaatttgttgcatttgatccttcctttgttaattgttataccatgtccccttgtaaccacccagttgcacctcgatattcgtgcactctgtgcgagtatcgacggtcgccttcaaacttaaaatctgagaaacaacttgggtaaaactggagttttacaaaagacttggaaaacccgacacctgggtcggtgcttgcgaactaaatgaatttccaaaaccgcggaccggggaacgtaccgggtgtacggtttcccgctctcgcacttaaggaccgattccttagaatttcatccaaacataagacaagtacgaccacatgggtggaatgggacacccctggctgagtaactagcttatcaggggagccttgatgccaagagacatgtggattcgccggggtggtgtcggggaggacccctgggcttcctggcacagtatggtctgggacctaacctgttgttggtctgggacccctctcgtcggcatatggtaaacctgtatcggctttcgaaatgccttgtcatgaaagcttggaggtctcccgacgtggctgatccccacgggctgggtgatccgggttagtaatgtcgtgtgggtaaagtgtaccccctctgcagaggttaacaaactgttcgaacagccgtgctcacggtcatgggcggatgtgaggtgattcctagtgtagttttgtctgactactgcttgtgaaattgctgttgtgaaactgggttcgatgtttgaaaaatcagcagctgacgggatcagctaggcccgggtggccgtttgaaatgttgttggcccgggtggccgtttgaaaagctgttggccgggtgccaaccctgtttcaagatctaaagactgatacattgcacatactccgaccggacgagatgcactgtctcatccgtgtcgtttgagaagcactcacttagactttttagaaaagagttcaaacaaaatcaattacgaaaaaaacagcctttccttgaagcctgcattaaacacttatttcccctggcttgctgagtactcccgtactcacccttgctctatataaataatcctcccccagttgctgaagaagatgaagtggatcctgctgacgaggagttcttccaggagcaagtcggctacgatgagttttagggtttcggcctagttcccaagtcgcgcctgtgatgattggtccaagtcctggcttccgctttccttttgtaatgcagttgtgagctcgggatctgtccgcagcccaatatgactgtacttctactctataataaagagacctctgttactgtgatactctgtctccctgtgataccagcactatttcctgggactggtatcgattaatgtcacaccccgaagttttcctcccaagccaaattgtaaattacaaatgaccccaagaaaatgcagaggaaatcaggataaaaccctaagaaaacaatgcatataataatcggatttgacatgtggaatttttcttgaattctacatgtcgaaatgcattaacaggatttttagtggaattttcagagctctagaaataattttaaccaattaaaaatcactaaagtgcaattttaattccagggaaaaccctttttccttt

SEQ ID NO: 7984 - DNA, 9009 bp, Oryza sativa
aggatgggagaagggagagagaggaagaagaagaggggctctagttgaagagagggagatgctgagaatgacatgtggggcccacgtgggccccaccatttttttattaatttatgtgtgagactgacatgtgggtcccacgaagtttattattttttcggatcaaattgccacatatgcgccacgttaatgccacatcagatgaagaccaagtcaaatttgccacgtaggcgccatgtcagccaaaaccactctcaaaaccgtcgagggacctcatatgcactggttttgatagttgagggacccgtttatctggttttttggttgaaggacgaaaatcgtactcgttgacaagttaagggacctcagatgaacttattccctggtgtgccgatggcctgttgctctgcttggcccactaatgaacttgtatgggcccaattatagtggcagtaatagttgggcctaattgtagtgacagtaataactgggccaaattttagtggcagtaatattttgggcccaattatagtggcagtaaaaaaaaaatgggagaattgcatatttgccactactttcaccccctaactcaaaatagccattataaaatcatgaattgcaaatttaccactgaaaacagcatgagcagattccgtatgccattgccgttccaatttgtacgagtaagaggacaaaaataattcatgaaattaaattaaaaaacaaggcaacgtgataagaccatgttgcccttgccagattcgaccttatccgctttcttccccaactctaccgcatcagaaacatctgctcgaacttctctcctctcccacgatgaaccctacaagcccaatcctctcatcccttcattcaaatcaggagcaaatcgatcaaaaatcggtcacttgggagtagtagatgccaatgaaagaggtgcagatttcaacgagtagtgcagtaaggcaagcagcggcttgcggcgcgcggctccggcaggtgtcggcgtcgactgccgcgcttgcggctgcttggcgacggctacagcaggctgcatcaggctgcggagggtgtcggcgttgagtgcggtgggctgcggcgtcggctgcttcaggcggtgtggtggctacgatgggcagtagcagaaagaaacgtatatactctatactgaaatggttgtgacctgctatctctgtctatcgtgtaggcatttagatgtagattttcatctgttccttgttgatctactagaatatttctccttttttttttgcttatcctgtaggaatggccgaggttcttgacagccattgttagggttaagtcttatttcaccacatcgtttttttctttttgtcaaagggcatatgttaaaggaaacaatgtcaaaatttctatcgaaatgatgctagttgactatgttcttgcttgctgcctcaaatattgttttattgatgccaaaatgttgtcaatttcacaatttcatgggcaagggcatccttgtcctaattttcatgaaaaccagccatctaacggtgttagtctaagctgttagtccagtggcagttatgttagtttcatactgtttttgatggcaaatttacaattatagtttttttagtggcagatccacaatacctgatcaatccagtggcaaatatgcaattggcccaaaaaaaatctctgtgcgtgtgactataattacgtggctttccttcctgaagccgtcctcatcgtcatcatctcgtcccccctcttcccggcgcggcggttgctctccagccatggccgccgccgccgccgccgccgtcgcctgcggcatgtctacgtccttcctcatccgcctctcgccttcgccgccggcgtcttcccacgtgcctctccctcggtctccggcttcgtcggcgcgcccgcggcgagcgtcttccgtctccctctccaccgcgcctaggccgagggcacgcgccgccggctccgactctccctccaactttgggtacgtgattctgcactcggttggctccacggggtgttgttcttcgtggctgcggttgacgtgatgttttgtggtctcccccattgtgtttgtgccaatgcgtggtaacaatggcggagaactcgtatgtctgcgagtagcccccagcttttggccggccgccatcgccctgagacatggtcagcgcgtgcgagatgcgagatatgagaaggagcagtgtcgaccacccgagtcttagccgagcggaggccggaggcctgaagctttgggcggcgagttggccaccgaggttcgtggcggtgtgtgcggcggccgtacggggtggcacaccggcgtgtggaggggagcgaaatactgtaagaaatagaggacgaggcatttccccaaatattgcggtatttgctagattagtgtcttggagttggatgctaaattttgggtaggatatgttcagatatgtcagagaaattacaatagcgctctagcagaatctgtagactagtagcatgattccccttttacagtatcactatggaatggaagaattttctgttaaaattttacttctaaaatctcaatccaagaaatttacataggaattagtcttcagtcttttcttagtgtagttcctattgatgtcctattactttgtgattttttttcctgcgctgcgcgtttaatgttcaataaaatgaattttaatctattgccgatgcaatcttgaatggcgttggcactcaccgcgcctcattttccatacatcctctgccagcgacgacgccgtgccacacatcacaaggattagagattgtaatagatagtaagggtgtcactactgagttaacaaggatgaactagtggctatttagctgttaagtggcccaactaagacaaagacactatcatctctgaaaaaagcggtgtattatatatgagcacctttaaatactattgtgatgtcttcaagtcaaacttaaattatttgtgtgtgcaatacatctgcatggttcatgttcacaaatactaaactatgactgtgacttttccttatattctgttggaattggcagcttgccatcaaaatctgaggtcaattctgtaacaatgtatgttctttcaaattctgtagtagtttctttctgatgttgaatacagtctaattatggagtgagttattcctgataacgcatctccttttatttgacagaggtcaaacatcactgatgccaccattcagccttatgcttgatgaaggctctagatctaaaaagccatatagatggcaaagggtgttgcttaaagtaagtggggaggctcttgctggagatcacacagaaaatattgatccaaaggtgaggttgcttttagtggagcattatcaaatttaaaatactgaatatttgatggaacaggtcatgtaagtgtgtaatgttgttgcagatcacgatggcaattgcaagagaggttgcttctgtcaccagactaggtgtagaggtgtgccagtgcctttcattcttttattgcttatttacccgattaactgtttgaagattgaaattaaatcaagtgaaacataattaggcatgtacatagtagacatttaaagttcaacaactaaaccgccctgtgttccaacgaagtggtattatgctatgtgtatgttcctcttgtcttctctattgtagaaacatatgctgtacattaaagatcgggaacccttgcaggttgctattgttgttggtggcggcaatatcttccgcggggcctcttgggctggatgtagtggactcgaccgctcatcagcagattacattgggtatgatgttcagttttctaatgtctttcataattgaaccatcgtaacatcctgtggttggcaatcgagaatgcattaaatgaagtggaagcgccatgagggttaacctaataatgacacaagaacacccaactcggcatgccttagtagttgcatgcaaccatgcaaatatgctaatttatgtaatccatgctaacttttttttttggctatttaaacatctataataccacgcctgattgtgcctatcggcccatcacgtagaacacatctaaatttcatagaacaaaattccataacaaatttccaagcagaatagtgtactgagtgtaaacttatagttcgattttacaaaccatacaatcaataagtatatactgttctctgtaagtgcaaacttacatgtaagtatttaacatatggtctatatcctttgcccataacgtttttaaaaatgttttttaggttttgttttaaaaaaaagaagacatcattcctgttataagtgatttcataatttctcagcataaaatagttcaccactttatcttactcttttcctaattcagcatgttggctactgtgatgaatgccatatttcttcaagcaacaatggagagcattggaataccaacccgtgtccaaactgcatttcgtatgtcagaagttgcagaaccatacatacgccgaagagctgtcaggcatttagagaaaggaagagttgttatatttgctgctggtacagggaacccattctttacaactgatacagctgctgctcttcgttgtgcagaaagtgagtttatcctccgtttctcactaatgaactggtgtaattgtaatcataaaatctcaacaaaagtagtattggagatacgtgaatacttttatattttaaagccaagtgcttataagctgcaatttcatgtcgtatatttaacaatatatagtactgcaaaacattcaaggtacttttgcgagtttgtcatttatgttagtcatcatgcccctgtcagttgctggtaatagaactagagttctacccacaatagctcgtaatgttagtagcctcacctctgagtttatcccatgaattcatgaagacccttgtgcgccctaaatggttaagctagacagttaggctagacaaggatcgatcatttattttcaaccttgcttcccagaaactagagacatgatgcagagattgttatacatgccatgttagggtgtgtttaactattctatttcacaagaaatcattagtcacagtttccattatgcatgtagaatcattttatcatgaattgagtttgaacttgtctttctataatgatttctcaaataaacatcattgtctcattttgtttattccatcttacaatggctttttttctttcattttgcagtcaatgcagaggtagtacttaaggcaacaaatgttgacggtgtgtacgacgcagaccccaagcgtaacccaaatgcccgccttcttgaggctgtgagctaccatgaggtgcaaacaagagacctctcagtaatggacatgactgccattacgctatgccaagaaaacaacattcctggtaaggagagagctgtcagtttctgagacttgatacagtgtttgatttgcattctttttaatttggcctgtaatcttgcagttgtcgtgtttaatttgcaaaaacctggaaatattgcgaaagctattgttggtgagaaggttggcacgtttataggctgcacaaaagatcaggaccagattgtggggaatgcactggatcaagaaagaagattggtgaacgagttatgatttcactggagctctctgtcgctagctgtgtagctgcattgcctattgcttggtaacatgtggatctctagagtttttaggctagaatagcttatccaaatcctggttccttgtacaacctttgagcaaaaataaaaaaaccaatggtaacagagattttccagctgatatagctgctatgttgtcatactatgtacaatggaatctagagcaatctgataaatcacatttatatcttaaaatcattgcatgtggcatgtatgatgtcttcacctaaaaacagtttcttccttacattcatgtgcagctgaagaaaaaagttagaaaagcgactacggagaaagcgagggatctaatgaaaagttcaaaaccgtagtggacaaatctggaagatggtaaaaactgcctctaagcacaataggaaatcaattaatgaaattaatataaggacttgatcattttgttgtccaaatcaaccataccaaattttgatactccctctggttctatattaattgacgttttgaacaaggttgagattaaacttttataactttgaccatcaataactttaaaaatatttagtttaaagaaactagaaaaacatatatagatttgtctttcaaaacactgtaataaaagtaaacatgcatttatttattgtatatattataatagaaaaataaggttaaaggtatatcttgtagagcgtgtcattgtccaaagcgtcaattaaaatgaaactggaggtagtacataataataaaaaagatagtgttgtctttgtttggtttaatatctttaccaaattttccgtttagaaataccaaaatttgttaaggtactaacagtacaaatgtgtttagtttgttacctcgataataccaagatttaacaaagttgaaagcggtcataaactgaacagtacctaaaatgaggggggaaatagggaaagaaaaagaggatcagacaaggaagaaagaatggaagggtggtgagaaaatcccaattagcaacggtcacctgatcacctcgggaggctattacactaaccattaaccaacctcgcgtcatctctcccatctcccatattcccatccaagagtagaggagagaagagaagacgcagctcacgcgcgaggcgagtgagcccaccaccgcccccctcctcctcgccaccgccacgtcatctccccaccctcctcctcttcctccctccgccgccatgggccgccgcgcgctgccgccgtcgtcgtcgtcgtcgtcgtcgtcgtcgacgacgaccacctcgccggagctgcggcggaagcgcacggccgcgccgcccccgccgccgtcgccgcggaggtaccgctcgatctccgacgtcatgcgccgctcgctgcccgtcgacgcggcgccccccgtggcgcgcgcctacgagagcacgcggtgcgacgtgtgcgggtccggggagcgggacgaggagctgctgctgtgcgacggctgcgaccgcggccgccacaccttctgcctccgccccatcgccgccagggtccccaccggcccctggttctgcccgccatgcgccccgcgctccaagcccgtcaaaagtgcgtcgccgtgcgtgccgccacgcacgatctcgcccatttccatccttttctaatttctcaccccctttttcttttctctcgtgcttcggattgttcttatctcactgtttttctccttgtgtcttcggtggcgtggggggtgttagggttcccgatgactcagacgaagatcgttgatttcttccggattcagaagggcgcagaggatgccgaggcggagaaatatgggctttttcaaggtaattttgcatttgggaaaagtgcaccattgttctataagtctgaattgtgataccattttgattgcttggagtgccttactgatgatacagtggttagcttatggataggattccatcttataatttgtgtggcttaagcttttgtagtagtggtgacaaatagcgacattcatgctactgctaattatctgattatcagtatgatctacctggttaggaccgttcagtagcagagattctgctattatgcaacctatatttttattatgcgtaatgtaggtcaattctagtgtagttttccaattacgctttgtaggacttgtggtgatggtgagaaatagccacatgataagcgtactgtgctacagctgaatatataagtggatatatccgggcttgtccagatttattcctagaagttgattctttttgggacggagggtgtatccaataggagcgtttagtagtacagattctgttagtatgcaatttatatttctgtgcacaatgtacgttaactctagagttgttttggctgcatatctagttagtagatgcaataggtgggaatagacaatactgtgaccctccaatatgaaatgctcacttacgtctccactggaaatacgcgggaaagctctccctgctgtaaataggtggggaagttatattgagcaagcatttaagatgtaataatggtgcatgcattcgtaatagcaacaagaatgtgtaattttgcaattgggagaggtcatgaaaagtgcaccattgtacaagtctgaattgggagaccattatgattgcgtggggtaccttattgatgatacaatggtgaggcttatggattggattctatcatatattcgtgtggcttaagcttttgtagtggtggtgagtagccacatgataagcataccgtgctactgctaattatctggttatcagtatgacatactccccccatcccaaaacaaatcaacttctagctaggttatcagtatgacatactccccccatcccaaaacaaatcaacttctagctatgtatcagctagaagttgattctttttaggacagaaggtgtacctgataggagcgatcagtagcagagattctgttattatgcaacctatatttttatgtgtaatgtaggtcaattctagtgtagttttgccttaagcttttgtagacttgtggtggtggtgagaaacatccacatgataagcataccgtgctaatgctgaatacataagtggttatcgctatgatttactctccgtccaagaaaagatcaacttttggggatgaatctgggctagtccagattcattcctagaaattgattctttttgggatggagggtgtatccaatagaagcgtgcagttgtatagattctgttagtgtgcaatttatatttctgtgtgcaatgtatgttaactctagagttgttgggctgcataggcgggaatagacaatgttgcgaccttccaatatgaaatgctcacttatgttaccactggaagtacgcgggaaaaactgggggatcc

SEQ ID NO: 7985 - DNA, 5038 bp, Oryza sativa
acggactccgggtggtccagccagccaacaccatgagctgctggatcaggtgcggtggcgtcgtcgtcgtcgtcgtcgtcgtcagcatcgacgcgccaccattgatcgttcgccccgccatggccgtcctcgccgccgaagcgccggtggtcgggaacatgccgtagttggtgatggctcgcacctgcggcgaccgcagcgccgtcgctcgcggcgactgaacatacgcacgtccggctgcgacggcggcggcggcgctgccggagttgagcacgtggaacgtgttgctggcggcggcggatgaggcggcgggggcggcgacggtgccattctctttcctcgccggcgccgccgacgacgacatagctgccaacttagtcgtaatccagaggaaagaatcaaaacgagatgggtgtgtttgcttcctgaaattaccagaaactaaacaggaaacgagtaaaaacgtagatcaaaacttagttgtaatccagagtgtttgcaatccatattagtatgcattattgttgcttgatttgcattctgcagcctctgaatcttaattaatgctttctgaattcgttcgcagctgtaaaacgaggtgaagatggaatgaaaacatgatcagctaaggaagttcataaaaacacacagcaagcaaattaattactgtcaattgtgatatatcaaatccttaatttgtcctatactgactctaatgatcagcaatctgtgcacctgacgatcgacatgcgttttctgaatgaacgaaaatatgtattgagagacactgagaattaatgcgttatgattcatgaacaaatttaacaaccaattacgcgttgtttgccacattattaatttgccatatactataaacttccttcctgctgtcatttgcagatgtaaaagctaaaaagctgaatgataattgtgaaacgtactccaatattcagataatttatcacgatatactgatctgattttttgggccatatttagttcaggtctgcaagttgaattcacctctacaaatgttgggatgaatgacaatatttggtaacggagttcagcagtagcatacattttcaaggcattgattatagatgcacctccttgatgtagcataattgttgcgtatcaacaactttagactggcaacaccatctcacgaaagttttgatacgtttaaggtgagagttcacggtggagtttgtcggagattgccacctcatgaaccacagagctaaggacacattctttttttacaattttaccacaagtattctacaaaaggccatatatcaaaaatccagttttatatgtgctaaaaaatgtaatgtggttttctcaaatttataattcatcatatttcaatccgctactcacttttatgataattggttgtaacttttttgaagcaaatgtcagaataaattcaattgtttaagtacccaaaaccattgagttactcggttgtaacttctaaatagaaaccgatttgaaatactccctccgtccaaaaaaaaaactcactttaagtaagttgtttttttgttatggagtctagattcaaggggttattcagtttgatgtcatttctaaccatactaatttttaactaagttgctatagatgtacctacatttagttccttttttttttaccaaaatttggtaaatacattagaaataccaaaaatttgttagtattatcaacttattaaaattagcattgctaaaatttaataagatttgttttggctataatccgaacaacccctcgagctaaagtatttttttaaggagggagtggtaggggaaaaaaaagaaaaagcaaaatggcgaggccgctgcctgacaaatgggcccctttgacgacgactggaggcctttctgcgccgtcgatccatccatccggcctcgccgatccccatcacctgcgacggcgagcagcgtcgccggcgtccggctgcctccgccgcatactcggctcggtcgtcttctcgaccttcactctccggaggtctcctcgctagccccgccgcgccgatttccatccatccctcccgcgaggtgggtgccgccgtcctgccgcttccgcctccgctccggtgagctcccgcacatcccccttcctttcgaatttgccctaacctttaatatcttatcttctagatctggaagctatagttttttctctttttcctattaaaccttaatactctcaatactaagaacagtttttttccccaactcccctgaaatgtttattttctgaacttatggtggatataggttggctcctgaagttgattaggtggtgccatgggttcaaaggattctcaagtcgaagctactttacaagatgggaacaaagaagatgaagaggatggtactgtttcttttttttttttttggagcatctactttctataattctttgggacaatttggacaaaactgtgaccctgttgtgttgtgttgttgctgtggtgcatgcagattgggaggcgattgcagatcgtggtgaaaacgatgagacgctaacgctagcgcgttctctcgagcagcaagcaaaggtttctcctagtagttcttctgagaaaattagcactccatcttcagggcccaagaggaggggaaggggttcgtttctttacgacaagagtgttctatacagtgatcagtgtggtctagaaaatgatatggatgaacaagagtctaatgatcagagtggatcaaagggccgtgtggatgagcagaaacacaagagtaatgcaggtatgatcaggggatccatttctacgtgtccaggtagcctgttcattgtgaataaatgaagaacttagttttttgcttgattttgtagctgcgaaacaatatgggacaaggcatgtccttgttctttatgacttcccacctagcacactcgcagcagatttggaaaagattttcgacaagtttggggaccatggagttgccattcgctgggttaatgatactgttgcacttgcagtttttcggactccatcagctggtaatttgattgttgtagcaatttcttattgacttaatttaggtattccaacttttagatgagccattcatgtggttctctccaaggaaccagattgaacatgtgtcatatatggctactgtgtttacttagaaatttagaattttctgattgcttggaaatgtattacattgactcatgcctgtatcgaggaacatggcattgtttgcagtttgcatacatgaatggcacatggcatgctcatacctgagcaagttttcttgtaatgaatcgacataattcacatgcaaaactgtccaaattgtgtagagcgaaagcaagagattgctccttccatgatgatccattgttcctgtgattgacttgttgctggtcttagtgcaccagatcactggcatggcaggaaaatggggaggacaacacgttttgggcaaggctaagttacccaagattagtgacaacctccttttgtagtgaaacatagtaacttgaacaaggaaaaaatattgcaccccccttcttgaaaagaggttgtcataacctgctagagtgctggtgcttattacgttctttccatccttaatgcaacccaacagcctcaacaatggatggttcatattttgtttgtcttacctcaaaatagatggtgacttattttcatttggtatgaaaaacagtacattctttgctctgcctccccacaatttttgaactgatatgttaggttgctgtgccataactaaaccagtaaaatacgaggggcaacccttattttgcttgcaaggagaagggcatcttatgatgtacgtttcagtttttatatgttgacctggatcaaaacattgtgtttttcaagttacatccagactgtcagatgcatacttaattcatgatcttgttcaattcaatgcggtctcgatctttttccctttctgttggtgtctagaacttattattgatgacatgaactgccaagctatcaattacttttgtttctgtaccttattctgttttctcaccaatcaacttgcagctaatgaggcacaagcttgtatacctccaagatataaagtgcggccactaaaagaggatgacgatctcttgacaaaaaatgatggcataggtatgtatcttaaatcctgtgactattctttcctgcttgatcttctttgcatggatgatctataggttatatagcttgtacttgagtattttattcctacgttctcgatggatactgcgtaccatgtcttgagttgcttcttccgcgttgcagaccttgaaccaccaactccaaggccgaagacatctgcaagaacagcacaaaggctgattgctcatggaatggggctaaggcagtttacaaacttcgggtcagacgagctgaagaaacaagaggaggcgaggaggagtcgaatcgctgctcgacaagctttgcgggacgacgcatggggttcagattgactgattcgccgccttcatggatcatcgcctctagcagccaggctgctcccaggcctggtgccattttgtgtgacctgtggctgtgggtgcttaagaccatgtctctgtacttgggttggtttgtgccgtttctttccgacagagaggaacagaggtagcgatcaagatatatagataaactcgcgtcgcccaagcaaatgtcaagcatggcggagtatgaatttactgtaagggaataccctgaattctggcggttttggtagaccgtaattccctggattgatacgtgcttctttcagaaattctggaaatgtgtcttatttccgtagttctgaaaggtgttctgcctggattgaaatgatccgtagttctgatcacacctccgctgccaaaactcatttcagaatttctacgccagcggaggctaagagtttctgaaatggtatactccctccggaccagtggcgtggctctaaaataaagatgggacagagatatagacaaaagaacagccgagagtataaaactaagagcaggt

SEQ ID NO: 7986 - DNA, 8722 bp, Oryza sativa
aaacggagggagtactacttagtgtttacagtggtacctgactgggaaagaattaccatttgtgcatataattctggcggggtagttttctacatcatacactgtgtagattcaggatggtgtaagcagtaagcacagtgctttgatctttcccctgcaaacggttaacccttgtgcatagctcagttacttgaatgaacgtttaaatgacaagaaacaagaatgaacactgccactaaatgattcaatgtgcaactatttctgctaacaagctttcgttgaagatgtttaaactgtatactggttaagtggtttatgaggcttggtcgttacagggcaaaggtattggaagaaccatcataactgatgccataacagaggtacctatcttatctattaattggttttgctgcccttgcaacattatataggtcacataggtgcaactcattttgctgtttatttcagttaccactactaagaaagctagctctggatctttgtgatgcttctgaagaaggctacgatagcccaaatgtgagtatattccaaagattttgccgagttgggcgggttaataataataataactgaataaagatgctaatatctttgcaattgttttgaagaacccggaggggaagatgatgaggaccataacgatgagcagatgcaagtcggtgaggtcttgtttcgagctccacagggaaggatcctcaaactcaaaaccagtgcacaaggagacgattgtgttggaatggagcagcagacagctaagaaccaccatagtgaaagaaaaaatacgttggagtacgccgattttcttgtaaatttgatatttcactcccctagtcccctattaccaatttttttttttaaaaaaagaaaaaacgcaaccttaccagcccaaaggcccaaagcccacaacagagaggagagtgggcgacggggggctagggcggcggcggcgcggcgaccagcgacgggcggcgcgcacctgaccggaatggcccacctcgcggcctctgccgccccgcttccaagcgctgaccccgacgccggcgaggagtcctcccactctccgccgccgccggagaaggggctgaggaaggtggtggtggtgatgggcgcgactggcgccggcaagtcgcggctggccgtcgacctcgcgagccacttcgccggcgtcgaggtggtcagcgccgactccatgcaagtctacggtgggctcgatgtcctcaccaacaaggtccccctccacgagcagaaaggtctcctcccgggattccccagttcttcttttgaccaaacctgcttcagatcgagcttaacagcgctatctttgccgtgttaccaggcgttcctcaccatctcctgagcgtgattgatccctctgtggagttcacttgccgcgatttccgcgaccatgctgtgccggtgagcctatgatgttgctgctacgacttttagtgctcctagtgtgccatgtttactgattagttgatgtttcttagtgctctgctcaccaattatataaggtatattggtttactgattaattgctgtttctgagtggtcacagattatagaaggtatattggatcgtggcggcctccctgttattgttggtggtacaaacttctacatccaggttgatacttaagcgcatgaggattcctgtatattaggctatttttcttctgaattagactatatctgatttttgtccttttaacacttattgtaggctcttgttagcccattcctctttgatgatatggcacaggatattgagggtcttactttaaatgaccacctagatgagataggtgaatgatgaaagcttagcacatgtttcttgttgttagcatgttttgatcaatggttgtgtccaattagtgtttgacttgttaaacactgcttaacacatgccaagcagggcttgataatgatgatgaagccggtctgtatgaacatttgaagaagattgatcctgttgctgcacaaaggatacacccgaacaaccatcgaaaagtaagggtgttgcacagttgtgcccttaacctgttaggtttctttggtagcaattggattttccttgtggtgttgccccatttgccttatccggttatcctgttctgcatgcttttttgttgtgttgaccagataaaacgctaccttgagttgtatgaatccacaggtgccctacctagtgatcttttccaagggcaagccacagaggtgagaaaaaaatgatttcccttttaattaatttctttattctgacttgttgctgactctatagtccatgtgaaatgtgcaaggactttatgcatattatcatgcgcacaacacattttttgccgtacgagttggacctcatgcgaactctaaatgtcctaatgaggtcatttgttgtcaggacagaagtggggtcgacctagtaactccagatttgactgttgtttcttgtggttagatgctgatcttcatgttctggatcgttatgtcaatgaaagggtcgactgcatgattgatgatggcctgctagatgaagtgtgtaacatatatgatcgagaggccacttatacccaagggctgcggcaggccattggtgttcgtgaatttgatgagtttttcagattttattttgcaaggaaggaaaccggtgagataaagatggattcctgtacaactatggcaggtctccatgatgataacctgaagggcttattggatgaagcagtctcacaactaaaagcaaacactcgcagacttgttcgacgtcaagtaatctcgacacttttttaagtaaataattgaaaattgcattttgtgtgttttatattcttgcctttcttcagagacgaaggctgcatcggttgaataaatattttgagtggaacttgcgtcatattgatgcaacagaagctttctatggtaatgatatgtgcatttcatgttttagttcaaagccaaaagatttcatgtcttacgaaatctaatgtgtttgcttaacatgtcatgcatatttctaggtgccactgctgactcatggaacatgaaagttgtgaaaccttgcgtggatattgttagagatttcttgtctgatgatacaattttggcaagcagagatggttctagtgtaactggaagccctaggatgtcttcaagagagttgtggactcaatatgtttgtgaggtaattgggaggcttttcttattcttaccaaaaagaatgttgataactgtatcgtcatttgtgcgttttgccacattttttgttagtgggacagcaatcaatctgatgaaactttcttgcctttcctgctcctattttacaggcctgtgataaccgggtacttcggggaacgcatgagtgggagcaacacaagcaaggccgatgccaccgtaaaagagtacaacgtttgaaacagaaggctagtacagtgatatcattataggcaattagcactgtttgcactctcggtgttcatgaacctttcttcattctctgcaactgtccccatgcatcctgtttgtcaaattggctgaagactacaccattcagaaggtagcaagcagcagatatatttgttaatagtaccttgctagattcttgtgccagttccaaacatccaatgcagagaatacaaactctacagattggtcagcacaagcacgtccgattgagcagcatctacactgatgaccagttggagtttctccaatctgctgatcatttctagactagttttcccattaaggacaccataaattgggtaggcggtccagcttgttagcaaagtggtgatagtgattagcaattaagcatgacattgacccatcgaatatttgcatatcttggtcttccagattgcatgatttttccttcatatgtgactggaaacagtggggccatgctaggttacataaattcctgggcgtgatacactgcgaatagtagctatcatgtttactactgtcgtgttgagactactgtacagtagctcgtatgtatttctcgtatgtttgtgcataagtgaggggtcgatgagagtgacttactagacttttctcatcctaaattcctaataactagaaaagatgaccgaaattgggaaggcgacttgtgcctcttttggaatgatcgaaatatagaggaactttcatgttgacctgattcttacgaaaatcatgtaaaactcgtgttcgttgtcaaaaggcccaacttcatctcagatgagcataagtataccatattaatgcttcaaaatggttaatgctagctcgtttttactgcacaactaatgctcgatgtccaaatatacttgggttattattatttttttgaaggatttttcatgtgagtctcgccgaggtccactaaccggtacacaggcgccgacctctggcacattattttacacgagaaatttaaggtaggcatgaaatcatcagtcgcacggatgcaaacgtgacgacatcatcagaaacaatatactgctgcgccgatttaaactacacttaaattaaataattctattagtggtacgagagtagtactactcctgtatgtagaatagatgtgcacgggcgcacgtgtttcatccctctaattctgaatccccacgtgacgatcgagcttaaagccgaacgggcggggcggggggataaagcgggtcccccagccgctgtctccagttcacacccacaacccgaagtcgatcgctcgtgttcgtgtccgcctcgacggcgaactcgacgggtcccgacccgcaaacccaacacccacacctacttatacccacctccactaatccctcctctcatcgcaccaccacgccactgagctcaagctaagctaagtgctaacctaggtgttcgaccatggacaccgaggacacgtcgtcggcttcgtcctcgtcggtgtcgccgccgtcgtcgccgggcggcgggcaccaccaccggctgccgccgaagcggcgggcggggcggaagaaattccgggagacgcggcacccggtgtaccgcggcgtgcgcgcgcgggcgggggggagcaggtgggtgtgcgaggtgcgcgagccgcaggcgcaggcgcgcatctggctcggcacctacccgacgccggagatggcggcgcgcgcgcacgacgtcgcggccatcgccctccgcggcgagcgcggcgccgagctcaacttcccggactccccctccacgctcccgcgcgcgcgcacggcgtcgcccgaggacatccgcctcgccgccgcgcaggccgccgagctgtaccgccgcccgccgccgccgctggcattgccggaggatccgcaggaaggcacgagcggcggcggcgccaccgccacctcggggcgtccggctgccgtgttcgtggacgaggacgccatcttcgacatgccggggctgatcgacgacatggcgagggggatgatgctgacgccgccggcgattgggagatctctcgacgactgggccgccatcgacgacgacgatgaccattaccacatggactacaagctatggatggactgacatgtatacacacatatcgttcgagtatatatgcttacagatatagataatactccatcagttcctactaaatacggagtatatatttttagataaaggatttatataaaacccggcttctacatcccgaagaatgtacacagccaatcctactaaatatatataagcacctcttgtttgtttagaaaaaatgagattaagggaaaatattctctttttgctgtctcacgatcaaattttgaattttgatgaattactggatcatcctaagcatattaatatattagctaaaaaatacttgcatccctgtgcattgaaattggtgtcacacgagtaataaacacaaaaccatccattttggttttacatttgttttatttgaataaaatgtttgtcgaaatgtttatattgttacaaaattaaaatcctaaaaatactttgacagtagatggatagcaaaggtatccacacatacacacataaagttcagacaagcgtcagccttagctagctagggaaaagagtaaaaaagggcaacaaaatattttctcaatagacaaacgtgtgaatcaattaatttgcagatatttggctaataactttttgaatatcttgagtggacatcctctaattatcattatataccctaaataccatataattagtttcaaatcaaaattttctccaaacatgtggcactttttatataacgtacatatatataatatctatgatcaaggggtgaactcataaatttgttgcacccgtgacatatatagtactgtacatgtacacggatcgtgcttaagagacatatatgcatgatgtcatcttctatcgagaaacaatctaacacacagtaggtcgttttgccaaaaatcttttggccaatctaacctcaaagtaacacggtcaatctgcaccttagagcaagtttaatagtatagccaaatgttaactccaaatcatctataactaatctaatagcccattcatacaatagttacctataaaaatatactccctccgtttcaaaatgtttgacaccgttgattttttagtacgtgtttcaccattcgttttattcaaaaaatttaagtaattatttattcttttcatatcatttgattcattgttaaatatagtttcatgtacacatatagttttacatatttcacaattttttttgaataagacgaacggtcaaacatgtgctaaaaagtcagtggtgtcaaacattttgaaatggagggagtactacagtattaatacccggccggtcccatctctcatatacacagaacgtcttgtagtccgtgttgcagctggctataaatctgtagtctaggggtgcaagtgggtcaaccgcgaacccacttatagatcaaaataaacgagcttgtgggttagtttagcctataaatgggttttcgcgggtagccacttgcacccttactgtagtcctctttcttttctctcctcttttcttctcaatatggttatagcggcttatagcctgctattgtaattgtacttgctcttacaatccccacaaattcttaagtctctaaactcaaagttacacacataaagctgagccaagaggaccggcacgcaactcgggcagccgcctaagctcactggtgggccacaatactatagattgatcatactatatattattttcttcaaaggagaaataaataatagtacgatcgatatgactactaagtaaatcggtcgtactattagtttctgatatgcatgaatatgattacttaaggaagaacttttaaccttacatttactttttaggcttagagacatagacatacattatcttaattatggatcgacactttgtaaccactagattaatgtgcatatttatctaaaaaatatgttatatacaaaatatgcatataactttgtaaatattttaaagttttaatatggtgcgggggccggcctcctctattgttttcagttttcaggtaaagaaacatgtttttgccatgggttcttcaaagttttcaggtccatcactggcactgcttgcacaccaggagaaaaaagagttaactagctagcatatatatatatatatatatatatatatatatatatatatatatatatatatatatatatatatatatatatttatatatatatatatatatatcagtagtaatttctcgagagattaatttgtgtgtttactaatgcacataaaatttgagagatgtttcctcaaaaacatgcagatcgatgaaattatatctgacaattgattaatttgacaacaagatcgagataacaagattgattaatttaactaaatacgggtcgatcgactgctaattgattaaactgagtagagctagctagttttgttggcatatgcgatatgatgaagtagctcgatcgatctccggcgccgcacaaattaactaccaacctgaactttatagtaaatgacctaatgacaacgacggcaagaacgcacatattatacatgtatcgcataaataataataaacaacacgtgttgaggatttacaaaagggtagcacacggtgaacactatatttacatatatatatattaatcatgtatgaaacgtacgtctgtgagacctacttgctcttttcattcctacctttaatttcttacttctcacgacgctaattaaacatcatatatagagtttatctcctaacgcagtcaaatacacacacacacacgtgtttgtgactgtgtgtgtgatatttaactacacatgtagatgtagtcacataaaacacatcaattttttttttgctgtgtacatatattttgaatgtagaggtcgggttattttaatccattttataaaaaataaacacatcattttggtcttcttatagtatgttataagtcaaattttaaattttaaacatcgatctgctttcagatatatatatttggattggaggcatgaaaaaccatatgcataaatttgtctcgagaattatcttggtaataacataattgttttcaaatataattttgtatgccctcattacaaaatataattattctagttatgtgtatatactagtggtgagaatcgtatcttgaagaccatgcaaatgtctgaaaataacatactttcgtagggctgcaggaa

SEQ ID NO: 7987 - DNA, 6353 bp, Oryza sativa
cggccctctagggcaatgggtgcaggttatacatgatagggagtagtactatattgtatacttacggtactgaaccatttatatatatggttttgtttggcatgactgcaattacaactgaattttttttatagaaaatagattttatagactaaattaaagtgttttaatcttcttcttttttcttaaatgtacataaaatgtctcatccagatatccttaatttaccagcatatatagctcgacctttaagaatttctatagctctaaattaaattatacattaatggagctgaagttttgaccagcataaatgtcgatatagcaaaattctatatgtatcagacaatatatatgtcacatcaatcactaaccaacttgctcatactctatatagcaaagcatatatgcttaaaaagtagaagaaatcacttgattaccattattggcagcataactcacgagtagtggttaataaaatataaaacttaaggtgattttgctttttttttgtgcagattattactgacacacaggcttgtagattctccactagctagttggtcggtgtagttttcgccttttcttcttttattattttactatacagaaacttacacgcacataggcacatcaccacggactgacacaccacactactagcgggtgtcatgatcgagtgtgaaggacatgattaaggttaacttttgctattgaaacatgtcttaattaattaagcataaatcatgcaatcaagaagagtaccacactatgtgaagggagttggattttaagcacttaagagagatatgttttacatgttactcgctataagatgtcagtttcacacgtttgataacactaatacaatatttgtctactgcccccacaaaattaaagtcgtaataactaaggtccaaatttgatgggcacaaccaaaaacatactttcaacataatacgcgaaattcttatgtacacatggcggcacatgtggaaggaaagaaaccacaacacaaatattccaaaaaaggtgtagttgcactatatatttatatatgtttgtatttgtttcctttcttaatgtgtaaattgagtttacgctagcttgaaattatgtcacttgatcttttataatttttcagaaagtacattagcggtggcattggaaaagtaggatcgatggttttcccatgttatgcacatggtgcacagtagactagcatatctcattgcaaggacttgatgtacatgtaagaccaaacaccaatagtttcatcactttcaacatatatctctatcatgcattgtgttagcactgtgtggagtcagctgtttatttacatatacacacacacatttgtctataaatatatatggacaacatatatgtgttggaaatgttccagatttccttttgacatgtaccatgcaaaaggagaattttggattttggtgtgccgggccgtaactagctagctagcaaacttggtctagtcgattcatcaggtagaaaaagtgatcgaatcgaacggcaaatgtgtatagacaaagagaagagaacaatcaaaagcaagcgagagcaatcaaaatgtgagggcagcgaggttgttcacccaactagctccgacaaggaaaggaatagtaccatcatatcggtcgtcgatttcactgtcgcgatggattactgtgtatcaccatcggtcgtcgtcgctgtcacacaaacgggaaaaggtgaaggcaacaaacgtgaatttttgcgatgcgttatactccatatgcctgcacgtgtggctctgcacgctttaatttcttggaccgatcgagctagctcccgccaccaattatacgtttatatatccccatcaattggatccaattgattgctttaatttctgcattttcatcggtcacttaatgcacgtttgtcacacatatgttgtatgtacacaatttaattccccgtccggtattattaaatatatgacgttgttaatttttaaatatattttaaacgtttataatattaaaagctatgtagttattatttatttcattgttacctgattaaacatatcttatatttttgtgcttgcaaacaaaaaactaacaatgaatggcaaacaaatgtcaaaaaatgaacggtgtgtagcatatattaaagacatgagggaatatactgggttttaaaaaaaacatattaatttatttttataatttttaagttaatatttaattaatcatatgttaatgatatctttcgttttctatgtcggaatgattcctaaccaaccgtaccgaacataacctactacattgttatatatgattggccagaaaattttctcgtggacgattattcgtagggattcgatttggacagccccacacagcaggcgacattactacaggtcaggtcaatggacgccaccgaccaaaatagtgacatccatgcagcaaagtcggttgcttcaaggactagaacattttatgaccatcactgtcgtttagctggtttgcccgagtggttaagggggaagacttaagatcttctgcacagaagtgcgcgtgggttcgaaccccacagccagcactatttttgattttttaaatgatttttgattttttttaatgatttgcaattcagattaattgatttctttttactttttgatttttaaaatgatttgcaattcagattatttgattttttttaaatgatttgcaattcagattatttgccttttcaaatttttcttcataacataatttttattacttcttttttcaaaatgatttgcaattcagattatttgctttttcaaatttttcttcaaaacttcatattcaagtcaatgctcgtgatattgtacagtttttattttttattttttaaatgatttgcaattcagattatttgctttttcaaaattttcttcaaaacttcatattcgagtaaatgctcgtgatgttctataaagatttggacaaacacaaaggttttgctcaacatttgcaattcagattatttggtttttcaaaattttcttcaaaacttcatattcaagtaaatgctcatgatgctgtacagttattattattattttttggaatgatttacaattcagattatttgctttttcaaaattttcttcaaaactttatattcaagtaaatgctcgtgatgttgtacagttttttcaagtactgctcctaatgttctataaagatttggacaaaacacaaaggtttagctcaaaatgtccaaacttaacgagtattagccttgggagcaaaaatcataaatattaatcttaggacaataagttttgttatttctgcccatcgtcgtataatttcactagttatagcataacaccaaaattaatgagtactatccttttgaaaaaaaaacatatgaatatgtctggccaaatatttcattactgttatccttggacccgttaaaaaaatccataaaccttaaccctatagtaaaaaaaaattcatggtttacccttcggcatttaatttcattaggtatagtctttgatcaaaattcatgagtattaacctttgcaaacaaacgcaaggatatttttctttagctcaaaatttcaatgagtattagtcttaaggactgttgtgtacaaaatcgtgaatattaacctcacaaaaaaaaaactattcatgatttttagccatctacctatagttagtgatttatagctttcggccaattttttttttaaaaaaagtgtggttatgtttctctggtccaaaatttcatgagtactcgccttaggcgtattaggccaaaaaaaaagacttgaatattaacctttagctgaaagaagatatccaaatcaacatgatagggtaaagtaaagctcataatgatttgctttttcaaaattttatttacaattattagccaccacttcatttttatttttcagtttttttcttcaaaaaatttcaaatgattttttttcttcaaaaaattcaaatgatttgcagtttacaagagtaatgcttgtagtaatttgatttttcgaaatttccttcaacaatattcaaagatttccagtttatacacaagtaatgctcgtaatgttctatagttttttaagtactgcccgtaatgttctataaagatttggacgaaaacaccaaaggttttcctcgacatatcgtgggctggaccagtcgctcttggttgcaccacaaatataagtaggccggccctgaattgtttccaagtaggcaaaacatgcaatgttatgctttatcagtgaacacaacggaaggcaatcaaacttgcagttggatcatggatggtagtattaaaagaggtcttttacttttactacaagcctttcacttaaagatattgcaagttctaacatgacagcaaggaaaaggaagtcacttgcgcatgatgggcaaatacagaatccaaacacaaggcaacaatgacggggaagaaaaactctaatcagatggacatagattagagaggtgcaccatcatcgcacaacatctttatcttcttaggatttaaagcagagactaaagctttctggagcaaactaagaagacccgtccggggatcggccatcaggcgaatcatctctttccttgctttctttccacttaacccaggcccatctcaacacaataaacgctccaagagcataaacctacagaagtagcaaggcaaatcgtcttttcagaaatatgtgaagtatgttgagatagcacaatgagtgaacacaagagcatatatattgcagcacaattcaaaatgaaaaacggatgctgaaccacatatggttctctgaagtctgaatgaatatgttgatttctctgaaatttggagtcattgattagcagatactaacagtaatattttctgcattaactaaaaaagtgtgagtatcttgttagcaagaataatagggtcccgaattcaagacaggctcgtttccttgattgcatcatctgaacaagataactgtacccaccttgctgaatctcagctcctgattttagtaaatccaacatcaagtggtgattaacttgcagaatattcgcatgcacattttgctcccacggacacaggattgaggtgtttggcaatattctatttgatttttcggaatcgtgcatagcaaccacaattcactacatgggactttgaggtagacagtcatttggtctataactggatacacacaatttgggtaaagcacacgataaattacagtttcgatggagacaattggaaggagaaacagtactaaattcttagaaagtttgaaagacaaaacaacaggtgctaattctcagagtaggtgtgaaatttaaaatacccaattgggaacattctacacagcagcctggtgtggtaatccacttgtaattatgcatagtactgggaatgagtatattgccttcaagtttgtgcattctatcctggactaccaacttaccaagtgctcgcggattagatcacaggaaatgagccattgaaagttaaaaggttgcttatctaagacaattgttttggactaccaagcttcgcggataagatcacaggaaatgtgcttattaagacatatggtgttgcaaagggtgcatctaatctaacaagagtattactgcacatttcaaaagacaatagcaaacaaaataatggtgaatatacatggtgtgtgtaaagccatctgaaaatccccttcatgttgtgtgtaatttatctgttgtatattccaaacaaaacaaatattcgagtcgcagtttcaggcgatatgacaggttgaaacgcgggaagaaattggcatagatccacaaggcatagaggttttggtgggtttaatcgcgcagacagagagatggtcggagcgggattgggattagttggggctgtacctgccagaggttgcggggggccatctcctcgtcggcgacgggcggagggggcacgtcctcctcctccagcttgatgggcggcggctgcctggccttgggctggtcggcgctggggtagaatcgcacggtggacggcggctggcggcgggcctccgcgtcctccttattattgccggcggcctgctccggcgagctcccggcgttgcccatcgccttccgattctcgctctcctcgccgcggcggcgcctctcctctcctctcgcctcgtctctcctcgctaagagactcactcgactagcttgtaattggtgttggtgatgatgataagatggattacttgggagtaacatatgctcttttcttttgtattttctgtacactttattaccttttcttttatttgctacattcttttttag

SEQ ID NO: 7988 - DNA, 50864 bp, Oryza sativa
ccctcatctacacgcgcacgggtgagcgccagctctatcgccgcgcttcggccatggatcccgatcgccatggtccatctctctctctctaatccctctcttctccttgcttagggcacgccgaagctcgtccgctagccgacgccgtcctcccgtggcttgccgtcgccgtccgccatcgcttcgtccgcgccggccaccctcggtgaggcatcccctcccttcttttccccttcctctcctcctagagccgctagccgccgcttcgagtcgtcggccgtcgccttcgactgccgccgccgtttcccgtgccgccggtagccgccgtcgtcgcacgcgtgccgtccccgtttaacccagccggccggtcggctttgatgccgagccgcgccggcggccgcatttatcgccgcccgccgctcctcctctagccgccgctccccgccgccggtcggtcgccttcggtcgccgccttgcgccgctgccgcatgcgcgccgccgccgtgtgagcgccgcgccgccggcgccatggtcgccgccgtctcgcgccgcgcccgcgcgccccggccgcgaggtccccgtcgccgtccgatctacccttgggtagatcggggccgtcggttcggccgccacgtggcgccgccgcccctccttttccccgtgccactgaccagtgggcccgcgagccgccacccctttctctctctcccggtcgctgaccggtgggccccgcctgtcggcgccgcgccccctcgctgacgtcagccctggttaatattgcgcaataaattatttaaggatttcttttatagtaataaacacagtgaatcttctaaaattcatatctaattcatccgagctccgtttaatcccattcaagtctcagtaaatcaagaaaaatgtgtagaatccattaaaaatggttttgttctctgtttcagtagtcttatagcctgtttgcaatgtttgctttgtatgtcgttagattccgatccctccgacgctccggtgtacttcgagatagtcgccgaggtccctccagcagcagagcaaggcaagtcatgcttgtcacttgaacatgttgatcccattttgcaaatgctctattgttttctttcaaatattgcattgttttataatatcactatgggatggatacctattgttacagccatgcttttggatatcatgctcctttgttagcttgggttataacatgattagactttggactaggaattgcttagccatgcttagttcaactagcacacattggggatctcatttaaaacctagattataggtttatatgataatgttggtttaataccaccgctctggtgttggttaaataaaatgaaccacatggtgggctgtgggtgcatggttttgctagtcgcacccatggcagttaaggaccggttcgcgggatgccctggaagaatttatcgtacttaccacaagccagcgtgggcaacggctgggcttgtagtgtagctttcctctagtcgacgcatccaggcaagggtgggcgtgatggagcggggcgggccctgcgacggcctctgtcgcttccggattcacctaggcacgagaggggactgcccgtcgcccgctggggacgggggtgaaacctgaggtgtggtgtgcttggctagagggggttatgcgaagggtcctgtcacggcctctttccggtatgtcgtggtggcatgtcggcgcacggaaacgtgtcgtggggctgtgtcttgtgggtacagttgtacacctctgatcagagtaaaactattcgaatagccgtgcccgcggttatgggcggtcaaccagattcaccatgattagtctcaccctagagtaatctgttgaacttggatagtttaggtggatggttgggcctgtcgcaacgtgggttagcgttggacagcggagatttaatactgcttaattattacaaccgttttcgcattcaattcctgtttataaatgccagtttttatgcaaatgaaccactctagctcttctttgttaatcccctgcatcatacccctattccggtatgacttgctgagtacagtgggtagtactcagtcttgctctacttttcccaaccccagaggacgggtatgtgtcagatgaaggcttccctgaggagtaggcttcgtccgtgccgtcgaggatgcctgtggagtggtgttcccgctgcagtttagtcaaggcttagctccagtttcttttgttttccgctgcatttctgtaagacctttataatgtttgtaagacgtggatctgtatgtcaacattgtcgtttgtgcaccccggctggtcctggacgggggttttaatacacattctgcttggaattctattcgggaatttctgggcgtgacaagttggtatcagagccgaccttgaccgtaggacaagccaaatggaaagacctaagagccctctgaatccttttcattgcatatgttccttgcaattggattttgttccgggaaaatggggatctgttcttgtggttcaagggaaaaatcttggtcgctcgtttaaagtgagttttttaaaacgagtcagtctagggttttagtaaaattattgggatttattcgtcagtcagttggggtttgaggggtgaaatgcattaggtcctagctcggtaacatgggttgtaaggtgtttatgctttgttcgttattattattatgtatctaatttcccattattttatcgttatgtgagtcttatttattcgcactcatgtaaaatgatctatgcataaaattttgctcttatttgattcctttatttgagtctttattgctttatttaaatttggatttgagcatgcattgatcctactcctttgtcttctctagatggccggtcacccacccaaccaccgcggagaaggcatgattgatttcgtggcagagttggcacgcatgaccctggtggtgggctaccccgacgcgccggagtacacgaccatcccaccgctcagtggcgagcttcctcaccgtgtccgcttggaggtccatggctacgtggggacttgcctcgctaacatggcggttgaggcgtcaggaggcaccgcagatcatgcctgtcaggaggcagcctacttgatgatggccaggttacgggagcgccacgactacatcttccacgacacggcgtaccgctaccacccccgtcgagcccatggtgatggcgtcagctccttccgtccgacagctggcgagaacgacaccaccttcggtcacatgtgtgctgtgatgaggggattggataggatgcactcggacctgcacaaggcgaccaaggccttgaacgatgggaagctcatgaggatcgtcgctctgaaggacgaggtagcgcgcctgaagaaggagaatgctcagttgaagggtcttccagcaccaggaggagtccggatccgcactacgccccgtaagaggacgactgcacccgtgcgcatccagcttgcgcccaggaacccacctccaccagcagctcccgcagcaccttcagttctgcccgcagttcctgcagctccagcttcagctccagctccagctcccgcgttcactctctccttcgctccagcatcagccgccagaggttcagccagtggtaccggaggttggttgtccgctactcccagtggcagcggcgagactgatctgtcaggctccaggagtcgctcagagggaccaggtgacgagcaggaggacgctttcgactccaccgaccgcaggagccgttccgagcattaggctcgttttcccattagtttatcgattgtctagtttctgcttgttagtttgtgtgtttaggttgcttgtttggggtcagttgacggtcgatatcatgtgcctatgatatggctgtcttaataaggatttttgcttgcctttttaagtgttttaattcagatcagaacaattgcagttttaattcctatataataaagcttagtccttgagcatctgtttttcttcttttccccgtctgctttcccctcaagatggtctacaccaggactggtagccgcgcaacaggcgagggcagcaacggtgaagaacgcgctgatggtgtgcaccccaacggtgattctggcaatggtccgccaccacttcccgagaatccgacccttgcccaagttatggcacatcagactcagatgatggcagccatgatgcagcagatgcagcagcagcaccaacagatgcaccagaggatgatgcagcacgccgaacagcagcaccagcagtttggtccccctccccctcagtccaagttgccggagtttctacgtgtcaggccacccaccttctccagcaccaccaaccctatggaggcaaatgactggctccatgcgatagagaagaagctgaatctcctgcagtgtaatgaccaggagaaagtcgctttcgccacacaccagcttcagggtcctgcgtcagcttggtgggacaaccacatggccacccgcccaccgggtactgaagtcacatgggcagagttctgccgtagctttaggaaggcacaggtgccagatggggtcgtggcacaaaagaagagggaattccgggcgctccaccagggcaacaggactgtgacagagtacctccatgagttcaatcgcctcgcgcgatatgcaccagaggatgtccgcaccgacgccgagaagcaggagaagttcatggcgggtctggatgacgagctgaccaaccaactgatatctggggactacgccgactttgagaggctggttgacaaggcaatccgtcaggaggatcagcgcaacaaaatggacaggaaaagaaaggcggcgcagttccggtccaaccaaggtagtcagcaccgaccgcgcttcactcccggacagcagggtggacctaccaccatgatcgtccgccagcaccgcccgttcaaccctagcaacttccaccagggcactagtggcagtcagaaccaccatggaggccagcccaaccgcggtgcagctccacgcccaccgatggcaccggcacagtcaggccagcccgcacaagccaagaaggagacgggagcaaaaccagggtcctgcttcaactgtggcgagcttggccacttcgctgacaaatgcccgaagcccaggcgtgccggaccaaggtttatccaggctcgtgtcaaccacgcatctgcggaggaggcacaagcagcaccagaggtcgtactgggtacgtttcctgttaactcaatccctgcaacagtactttttgattctggtgcaacgcattctttcatctccaagaaatttgtcgggatgcatgggttaataagagaggaacttagcacaccgatgcgggttcataccccagggaatagctccacttcggttcaattcagcccttctataacaatagaaattcaaaggtcaccgtttctagccaacctcatccttctcgaatccaaagacctagatgtcattcttgggatggattggctgaccaagtttaagggagtcatcgattgtgcgagtcgcacagtcaccctgaccaatgagaaaggagaaaccgtggtgtacaaatctctagtctcgccaaagaaaggagcctcgttgaatcagattgagacggaaatcccagtggacaccgaagagaagaacttgagaaaattggaggacatacccatagtctgcgagtatccagaagtgttccccgaagacctcaccaccatgccacccaagagggagattgaattccggattgatttggcaccaggaaccgctccaatttacaagagaccatacaggatggcggccaacgaattagcagaggtcaagaagcaagttgatgaacagctgcagaaagggtacatacgaccaagcacttcaccttggggcgctccggtcatttttgtggagaaaaaggataagacaaagaggatgtgcgtcgattatcgcgcacttaacgaggtcacaatcaagaataaatatcctttgccgcgaatcgacgatttatttgatcaactgaaaggagctaaagtgttctctaagatagacctgcgatcaggctaccaccagttgagaatccgggaagaggatattccgaagacggccttcaccactcggtacgggctatatgagtgcacggttatgtccttcggacttactaacgcacccgcattcttcatgaatctgatgaacaaagtgttcatggaatttctggacaagtttgttgtggtattcatcgacgacattcttatctattcaaagtccgaggaagaacatgaacaacatctccgtctagtactcgagaagttgaaggagcaccagctatacgccaagttcagcaagtgtgacttctggttgacggaagtcaaatttctgggccatgtcattacagctcagggtgtagcagttgatccatcgaacgtggagtcagttaccaagtggaccccaccgaagacagtgtcgcagattcgaagttttctaggactggctggttattaccgtcgtttcatcgaaaacttctcaagaatcgcccgacccatgactcagttgcttaagaaagacgagaagtttaaatggacagctgagtgcgacaagagctttgaggagctcaaaaggaaattagtatccgcaccggttttgatcctgcccgaccagacgaaagacttccaagtctattgcgatgcatcccgtcacggacttggatgtgtcctaatgcaagagggcagagtggttgcatatgcctcgcggcagttgcgtccacacgaaggaaattatccaactcatgacttggaattggcagcagtggtccatgctttgaagatctggaggcactatctgatcggcaaccgctgcgaagtatatacggaccataagagtctgaaatacatcttcacccaaccagacctaaaccttcgacaacgaagatggttggaactaatcaaagactatgacatgagtattcactaccacccgggtaaagccaatgtggtggcagacgctttaagccggaaaagttactgcactgctctatgcatcgagggcatgtgtgaggaattgcggcaggagtttgagcatctcaacgtgggaattgttgaacacgggttcgtagccgctctggaggcacggcctacgctcgtggatcaagttagagccgctcaagtaaatgatccggaaatagcagaactgaaaaagaacatgagagtcggaaaggctcgggatttccttgaggatgagcatggcacaatctggatgggagaaagattgtgtgtaccggacgacaaggaattgaaggatctgatactcaccgaagctcatcagaccccgtactccattcatccaggcagcactaaaatgtatcaagacctcaaagagaagttttggtgggtcagcatgaggagagaaatagctgaattcgtcgcactctgcaatgtttgccagcgagtgaaagcagagcaccaaagaccagcaggtttactccaacctcttcaaatcccggaatggaaatgggaggagattggaatggactttataacaggactgccccggacatcatcgggacatgattcaatctgggtagtcgtggatcgactcaccaaggtggctcactttataccagtacataccacctatacgggaaagagattggcagaattgtacctcgcaaggatcatgtgtttgcatggggtacccaagaagatagtatccgaccgaggtagtcagttcacctcaaagttctggcagaagctgcaggaagaattggggacccgtttgaatttcagcacggcctatcacccgcaaactgatggtcagaccgagcgagtcaatcaaatcctggaagatatgttaagagcttgcgctcttgattttggtggagcttgggacaaaagcttaccatatgcggaattctcgtacaacaacagctaccaggccagtctacagatggcaccgtttgaagctctatacggccggaagtgccgcacacctctcttctgggatcagacaggcgaacgtcaactgttcggaacagaagtattagcggaagcagaagagaaagtcagaatcatcagggagagattgaggattgctcagtctcgacagaagagctacgcggataaccgtcgaagggagctaacttttgaggccggagactacgtgtatcttcgtgtcactccgctccggggagtacaccgtttccagacgaaaggcaagttggcaccacgcttcgtgggaccatacaaaattttggaacgaaggggagaagttgcttatcagctagaacttccatccaatatgatcggcatccatgacgtgttccacgtttcccagttaaagaagtgcttaagggtacccgaagaacaggctgattcggaacacattgatatccaggaagacctgacatatgtggagaagccggttcgcatacttgataccagtgaaaggagaaccagaaacaaggtcacccggttttgccgagttcaatggagtcatcattcggaagaggaagcaacctgggaaagggaagatgagttgaaagccgcccatccgcacctcttcaccagctcctccgaatctcggggccgagattccgtttaaggggggtaggtttgtcacaccccgaagttttcctcccaagccaaattgtaaattacaaatgaccccaagaaaatgcagaggaaatcaggataaaaccctaagaaaacaatgcatataataatcggatttgacatgtggaatttttcttgaattctacatgtcgaaatgcattaacaggatttttagtggaattttcagagctctagaaataattttaaccaattaaaaatcactaaagtgcaatttttaattccagggaaaaccctttttccttttcctttttctttttcttttccctccctttttcctcctttttcttttcggatgggccgccggcccattcccctccttcctccccctcctccttgctgggccggccgcaggccgagggcccagcctggcagccgccgcccgcctcctctctcggggtcgccgacaggtggggcccacctgtcgggtccttcccccacctcccgccgatcccggcgcaccgccgcgccgaaaccgccgccgcgcccacgcctccgtcgctcccgggccacgtcgaccacgcccgcgcgtgcgccgcattccccgcgcccgttcccctccctctcccgctcgcgcccgcgcccgagatggccgggattcgaaaaccgaatcccgcctctctctcctccccactcccccacgtcggccgtcgaatcccgccgctcccggccacgtccggttcccccatcccctatttaagcatcgccggcaccccctctcgctttttccccattgcgccgacctctcccgagctccccaacgcctccgcgccgtgcaaccacccgccgccgccgcttttgctactccggccgccgctagccgccgctaggctcgccgccgtctcacgccgtcgccgccgttagcttcgcgcggtcgaggtccacctcgtccacccctcctccgtcgaggttcgtcgccggagccctcatctccacgcgcacgggtgagcgccacctctatcgccgccttcggccatggatcccgatcgccatggtccatctctctctctctaatccctctcttctccttccttagggcacgccgaagctcgtccgctagccgacgccgtcctcccgtggcttgccgtcgccgtccgccatcgccttcctccgcgccggccaccctcggtgaggcatcccctcccttcttttccccttcctctcctcctagagccgctagccgccgcttcgagtcgtcggccgtcgccttcgactgccgccgccgtttcccgtgccgccggtagccgccgtcgtcgcacgcgtgccgtcgccgtttaacccagccggccggtcggctttgatgccgagccgcgccggcggccgcatttatcgccgcccgccgctcctcctctagccgccgctccccgccgccggtcggtcgccttcggtcgccgccttgcgccgctgccgcatgcgcgccgccgccgtgtgagcgccgcgccgccggcgccatggtcgccgccgtctcgcgccgcgcccgcgcgccccggccgcgaggtccccgtcgccgtccgatctacccttgggtagatcggggccgtcggttcggccgccacgtggcgccgccgcccctccttttccccgtgccactgaccagtgggcccgcgagccgccacccctttctctctctcccggtcgctgaccggtgggccccgcctgtcggcgccgcgccccctcgctgacgtcagccctggttaatattgcgcaataaattatttaaggatttcttttatagtaataaacacagtgaatcttctaaaattcatatctaattcatccgagctccgtttaatcccattcaagtctcagtaaatcaagaaaaatgtgtagaatccattaaaaatggttttgttctctgtttcagtagtcttatagcctgtttgcaatgtttgctttgtatgtcgttagattccgatccctccgacgctccggtgtacttcgagatagtcgccgaggtccctccagcagcagagcaaggcaagtcatgcttgtcacttgaacatgttgatcccattttgcaaatgctctattgttttctttcaaatattgcattgttttataatatcactatgggatggatacctattgttacagccatgcttttggatatcatgctcctttgttagcttgggttataacatgattagactttggactaggaattgcttagccatgcttagttcaactagcacacattggggatctcatttaaaacctagattataggtttatatgataatgttggtttaataccaccgctctggtgttggttaaataaaatgaaccacatggtgggctgtgggtgcatggttttgctagtcgcacccatggcagttaaggaccggttcgcgggatgccctggaagaatttatcgtacttaccacaagccagcgtgggcaacggctgggcttgtagtgtagctttcctctagtcgacgcatccaggcaagggtgggcgtgatggagcggggcgggccctgcgacggcctctgtcgcttccggattcacctaggcacgagaggggactgcccgtcgcccgctggggacgggggtgaaacctgaggtgtggtgtgcttggctagagggggttatgcgaagggtcctgtcacggcctctttccggtatgtcgtggtggcatgtcggcgcacggaaacgtgtcgtggggctgtgtcttgtgggtacagttgtacacctctgatcagagtaaaactattcgaatagccgtgcccgcggttatgggcggtcaaccagattcaccatgattagtctcaccctagagtaatctgttgaacttggatagtttaggtggatggttgggcctgtcgcaacgtgggttagcgttggacagcggagatttaatactgcttaattattacaaccgttttcgcattcaattcctgtttataaatgccagtttttatgcaaatgaaccactctagctcttctttgttaatcccctgcatcatacccctattccggtatgacttgctgagtacagtgggtagtactcagtcttgctctacttttcccaaccccagaggacgggtatgtgtcagatgaaggcttccctgaggagtaggcttcgtccgtgccgtcgaggatgcctgtggagtggtgttcccgctgcagtttagtcaaggcttagctccagtttcttttgttttccgctgcatttctgtaagacctttataatgtttgtaagacgtggatctgtatgtcaacattgtcgtttgtgtaccccggctggtcctggacgggggttttaatacacattctgcttggaattctattcgggaatttctgggcgtgacaattaacaggttaatttggagcgtcacgggctagttccggtcgggactagttcggggcgtgacatgaagtctctagaaattggatttgtgtcttttcttttcttttatctattttttcttatgcataatttccttagatttaacctaaaatttaacaccaccatgtgacccaatgaaatggctcgagacgagccagctttagaagatagactagaaaataagcatgtcagttggcacgccaattagtttatagcccgtgtgtattttcttttataaaccatatattcaaaaggattatttaatgggttttaaatttttttgtttgtaaaatgttgtggaacaaatcaaggcagaattctaattagtggtcttgtcatgctgaacgactatttaatttcaggaaatggctaaagatgatatatattagtgaaaaaacttgttttatttatatgcatcattttttatacatgtaagtcatagatgttgcataattagtaggaaatacatatctaaataaatgtgtatttgattacccatttcattttctagaaataaaaataaaggacaccaacatggtaaagatacttatcttgattttatatatccaggatatactaagtgtagatcggttggttacattccgtgtggtggaacatgtctattcaggattaaggtatagagttaacatgtgtggtcttatttacagctatttgttttttcagtggtaggtgatgtaccagccattatcaattcctagatatgaatgatgatttaatcttcaaagggacaaatatggattgaaatttcggaacaaatttcggaaatttcagtaattttgcccccaccggcaagcacatatcttgcccgaaactttcctttttttttgcaaatttatgtgaatttggtaaaagtttatttacattcatttaaagttagttaaattttcaaataatttaggccaaaaaataccaaaacttccgaaattttggtgatttcgtgaattcggaacccctggcaaaaaaaaaccctgttcaaaattgaaaaccctgggtacagtagtggtaggatgtgtatgtggtgtgtctataggtatgggtgtacattacatagtagtttcacacgcttagaaattcctttaagaaggacatattacgggaatttaattttgtgtttgtcaaagaatgagaaaaaccaaattatgttaattgtgacaaacatgtaattaggggtgccaaaattacttctttcgtttattttttatgatgttttttatatattcaaatatttttacgaaattatttgtatttatttttccctactatttcttctcctatttctgtttgctcatgggtgcctgttagtggccacgaggagccaacgtccaacgtgcgaattctagcatgaacagcatgaaacgaccagcccaggtacacatgattgggctgtatagcccacagctcggtgtcaacctcagccctgtgcgtgcgcccgttcttccttttttttttcctttttgccggtgttacgtccagtttaaaccgctgctagctagagatgcgtattcacgagtcacttcgcaaaatacggcgccacgtggaccaatcaaacttagaaagaatggccagctttagattagtagactagaaaaaaacacgcgtgcaacactcgatgggccacactatttggtcgtattgagacagaatgatcagtttaacaacaatgcaagttgtagcaaaatactatattgcacaatcatgattactacagcagagtattaaattttaaaaattaatctatggcatataatgtgatatagactgtataatctgaacaaaacacaatagttatcctatatacttatatagttcatctccattaagtgtagttaatgctatttctctcttctcattaacccacatcaccctaattatttctagcctttggatgatagatctatggtctaaattatttcttctttcttctctcttaaaaacatgcaatctcaattacttttaggctcaaaattgtatcaaattgtttttagttttgtacatattatgcaacttaattttccgcagcaacgccgcggggtatgagtatgtgacatattatagacatttgatctggaacttaaataatggaagattttaataaagctccctatcaattttgtattagagtaactggaaagtagatgagtgtaggttcttggtgagtgctaaatacatcaaaaataaattggctggtagatgagaggataacaaaagtatccagcttgggctataaatagcaaaagtcagtgttttcttcttcattattttcccaaaaaaaacaataattagaatccttgtcaaagtatgttactgaggaaccagcaattctttctcatgcagtacttaacacgatgcagtagctaggttgggcaagtatgaggtttctatgtagtgtcaggtatatatgtgaatactacatgtaaacagggtatctggtaggtaaccgtgaaattgaagcagccatataaggtaatacacttgcttgaaatggtgccaagcttatgcacagtacagtagtaggttaattatatgattgaaaaacaaatgattttaaatatgagcaattgtttacctgatcattactgttcggatcttcataagctcttttgcctgacaaactgcttgtctctaaattacatggctcagcttccatgctctgaatatcttggggtggttctcactaaattaagtgtgtcaatttttcactatagtggcagaacagagaaatttaaccaccagataatcacaggaataaatattcgaggaattaaattaagttaaccaactgaaagtctgaaacttcttatgcatgggtagtctcctagtcaatacaagccccaaagctggagctaagcaaagacttaacaaataaaattcaaatgttataattaatcattggcgaaattgtcaaacaaaaacagaaaacctcatgatattggaacttggtagagtaggagtagtaccagcatcactaaacaaaatatattctacaagggttctatcttcttaatgaagatggtcctcattatgcgtttacaataacaaagggacagtaaaacttctttccgaatgcttccattcccaataacttatactataacaaatagtctaatatatatcagtgaagtaacagatctagctggtttttttttaagaatgaaaaatctgcaatatttatatcactaatacatgtgattgccattcactgaactcgccaacgtcgtcctcgcggtgcaggacgtgctcgccgcagagataccggccgaaggccaccgcctcctcctcgtggtgttgtctctgtgcaggacatgcttgccgcagaggtaccggccggaggtcgctacctctttctcccggtggatcagacaagatggagaatgaatgtgaaacaatgacaagagaaaagaggaacgattatagaagatgaagagtgaatcaagattgtagaagaccaagagtcgtgacccttccggaaacatcaggtggctttgcactttttgattttactccaacgtaagattgttttttatattttagtccttctcaagtgtgggagcgcacgcacgaaccacgctgtgccacgtggcatcgctaattgctcgataatttgcacggatttcgatagtaagagattagcgatgcctagaaaatcagcgtgccgggcggcaaatttgcacaaaattcgtgttataagattagagattgaccgcatatatggcaatattgcgtggagaccgattccgtgagtgaagacgtgcgccaacgattaatttatacagaatttgtgttataatattattaaaggttgaccacatgtatggctggttgtggtaaatctggattctttctgatttctctagaatcgtctagtgatattccatattttgcaagggattctttctgatttctctagaatcgtccagtgatatttcatattttgcacggcctgttaattttgcagttgtccgtgggcctattttttagcaaaagtcacgccaacacaagtgcgaggtaggagctctttccggcgaaaccagttaagccacatggcacgagcagctgctagagttttgcacaaatttcggtattagagattagtgatgccttgttgagttccacggtgaaattcgcgagagctgtggtcgatctcgacgagagttcatcactaacacacaactagctattgccgatcgaaatcacaccaactagatgtgcacaaggttgttgtaaagaatcatatttgccgccaagcatcgggaaaatcacaagattttacaagttactccctctataaaaaaaaagtgaatataggactagatatgatatattttagtacaacgaatctgaacaaatgtatgtctagattagttgtactaggatgtatcacagtactagattttttttatgggacatagggagtagttagctacagtggacgatggacagaaaagtagaagaaaaagaagaatggacgagctggggggttttgggacgagctggggtttttgagagagcatcggcgaggagtgccttgcttgtctcggaaatctgcctcacgggcctcctcgtcctgacccaagactaagctgcaaggtgaacagacctctacattcgccacgcactgtatcgcctcaaatactataaggtataaatacttacatgtaatacttctactcgtaatacttctacttatgtttgttggtttcactaacctccaattattttcattgaataataataatatcttttctgatcaatctcattgccatcatcatcacttgtcaaaacagcgactacagaagaacaagcagcatggtgacgataagctgaaggaggattattgccttctgtatgttctcctggataaggataactatgcattaaggatgatggcagtaagctgcggcttcttcagaagcatggatattttaagcactctgaggaagatggcatattagattggtcctttcgccctgaatactgcttgcttgcttccctggatgactatcaacgcctagtccctctggacactgtaagtagttctgattatattcatcataacactatttgatcttgtactgtattccgtagtgttagtaagatattatgacctacttgtggttagtggttaatatttaataacagttccaaactatgaatttaagatagtttttttctcagaaatttaattagtggtacattcttattgtgaatatctgggtgatctggtttctgcaccaatcgcaaagttatttaaggacccaaattgtcgatatatatgtggactcatgatgagcttttttgtggaaaatgtcatgctatgtccgctgaatgtaattgtatagcattatttgggtcgtaaaggaaaataaattgaattacacctcaagactataaacgaattatccctcccaaattaaataccaaacatttcacacccctaattcttcaaatggaacgagttacccactaaataaatcaggagtggttttggttctacgtggcagtttattcaacaaaagtaatattttaaaaataggttgacacacatgttagtatattctcccctatattaactattcatatctccaataccttgcaagtgacgccggtgaggcgaggttagcgcaacaccgttctcgcacggaggaggctatgttggatcgagatatcgactagagggggtgaatatgcgattgttgggttcttaaaatatgaccatatcagtaaaactctgctacggattaaccttaccacccataaacagatttaggacttggatgttagcgcaacaccgctctcgcacggaggaggctatgttggatcgagatatcgactagaggggatgaatatgcgattgttgggttcttaaatatgaccatatcagtaaaactctactacggattaaccttaccacccataaacagatttaagacttggaaaaaaatcttgctccaaaagcttttaggggtaacctcaccacccataagaacaagtatctacacacaagatgtacccatccaactaaacaacatatcttgtatgcaaccatcccatcctccctttgctacaaccaaccaaacaacattttatcatatccagctatatgtcatgcaagcaatcaaacacctgcatgtgtatcccacatacacgtacttcagcttcacaagatgcaacggctgtaccaacccagccgttcgattaactgatcactcaagcccttgtcactttatcaacgtagattagcacattcatgcaacacaacttcaattgcaaggcccgattagtaacaactttagatatatagctggagttgcaacgatgttagtagtagcatcttaagaagaagctggaggaggaggaggaaatggcacctccaaacggccttgcagcatcaagatgacaccattcatggatggccgagactgcggctccgcttggacgcaccacatggccaccctcaccaccctctccacctctgccgcctccaccgtctcgtcgctgctcatggcgctctttgcctcgctcttcaccagcagccactcgtacgcccactccgccagcgtccgctcctcctcgccggcggcctcctccatctccatgctcctcctgcacgccaccgtctcgagcagcaccacgccgtagctgtacacgtcggccttcaccatcaccgggccggcgccgcggtaccactccgacgcgaggtacccgcgcgtgccacgcacgctggtgaaggtgcgcgtctggtcgggctggagcagcttggccagcccgaagtcggagatcttcgtcgtgccggccgcgtccatcaggatgttctgcggcttcacgtcgcagtggatcacccagctgtcgagctcgtcgtggaggtagtggagaccccgcgccacgtcgagcgcgaccgatatgcgaacaaacgataaagaacaatagatcaatcacagaagacacgagatttaacgtggaaaaccctcccaaaacaggagagaaaaaaccacgggcgctagccagcaaaatatcttcactatatctggggtgaggttacaacgccgcacgacggcttacaagaggtatatatatggtagaaccctaaaagggatgacgatccgtttcgcccaagcctcccggcgacgggcctccgctccactacggcagaagctggcctttattaagtgcaaatgaatttggatcacaactcaacaaactccaccttgagacaaattccttcttgtagcatgaaccaatccttcaccctgaacacaacaaagacaaaaaacactttcggcgccaaatagcctcttgggctaaaccactataccaactaagcttgagcaaagctcaaacttagcaacaggaacatgctttatcatcatatcagcaggattatcatgagtacttatcttgcatacctttagcttaccttgcgcgactacatcgcgaacataatggtacttgatatcaatgtgctttgtcctctcatgaaacatctgatctttagtaaggcatatagcactttgactatcacaaaacaagttaatgcaagaatcaactccacaaagctcagcaaacaatcctttcaaccaaactgattctttacatgcttcagcagtagccatgtattctgcttcagtggtagactgggcaacaacaggctgcaatgttgcattccaactcacagcacaactgccaatggtaaacacataacctgtgagtgaccttctcttatccaaatctgcagcaaaatcagaatccacatattcaacaagccccttatcagtcctgccaaacttcaagcaagcatcagctgtgcctatgaggtacctgaaaatccactgaacagctttccagtgttctttaccaggattagccatgtatctactaaccaaactcatagcatgagataaatctggacgggagcaaactatggcatacatcaaagaacccacagcactagaatatggaactctagacatgtattctacatcctcatcagtactagcacattgtaaagctgataatttaaaatgaggtgcaataggagtactaacaggctttgcatcatgcatgttaaaacgctgaagaaccttcttaatgtagctttgctgactaagaaataacaaaccagaatttctgtctctagtgatttccatacctagaattttcttagcagcaccaagatccttcatatcaaactcactactcaactgtttcttcaatgtagtgatttgttccttgctcttggcagcaatcagcatatcatcaacatataacagcaagtatataggtgatccattaacaaatttaatatacacacagctatcaaattcagacctcttaaagccatgtgacaacataaatgaatcaaaccttttataccattgacgaggagactgtttcaaaccatacaaagatcttttcaacttgcaaacataatcctccttaccaggtactatgaacccttctggctggtccatgtatatctcctcctcaagctctccatgtaaaaatgttgtcttcacatctaactgctcaagctcaagatcatgcatagcaacaatactgaagaatgtgcgaattgaactatgctttacaactggagagaacacatcattataatcaacaccagcaatttgactgaaaccttttgctactaaccttgccttaaacctcggaggctcactaggagataagccctcctttctcttgaagatccatttacaacgaacaggcttcttctattttggaaagtgcacaagctcccatgtgccattcttctcaagagactgcatctcctcctgcatagctgagatccacttctcacggtctccagaaacaacagcttcaatatatgtggctggctcaagagtattctccacctgttcagcacaactaaaagcataataaaccatatcacattcctcaataaggcggactggagctccacaactcctctttgttctgcgatgtgcaataggttcatcttgtggctgcaaaacaggaggtgagtgctgaacaatatcattaacatcattaccaacaatttcagtttcctgatcatccacgtgctccacctgcacgctaacatattgctgctcctcatcagaaccacctggtatgacatctgtgggcaagctgtcattaaacataacagattcattgaaaacaacactcctgctcatgaatgtcttattagtttcaggattccataacttatatccttttactcctgaaccataaccaagaaacagacacttaatagctctaggctctaattttccattatcaacatgagcataagcagtgcatccaaaaactctcaactgtgaataattagcgggcataccagaccataccccaataggagttttcttattaagtgggatagaaggcgacatgttgatcaagtagcaggcggtgttagcagcctctgcccaaaaacgcttgttcatgtgaacgttggacagcatacaacgagccttggagatgattgttctgttcatgcgctcagccacaccattctgctgtggagtgtacgggatggtgtgatgcctaacgatgccttccttcctgcagtaatcatcaaaagcatccgaacaaaattcaccaccattgtcagtgcgaagtacttttacctccttttcagtttgcctttctatcatgactttccactctttaaaagcagcaaatgtatcatctttatgtttcaggaaataaggccacactcttctagagtaatcatcaataatggtaagcatataacgagcaccaccaagagagggcttacgagaaggcccccacaaatcagcatgtacataatcaagtatacctttggtgcgatgaactgaggtattgaattttaccctcttgtgcttaccaaaaacacagtgctcacagaacttcatgttaccctgagtacagccatccagcaggttcctcttcatcaattctgtcataccaagttcactcatatgtccaagatgcatatgccacaggttagtcttactaggttcatctttagaaacagcagcagcggtaacaaaaccatgtaatgtacttcctctaaggacatataagtttgtagaattcatatcaccaatcatataaacgagagaacctttcgatacctttacaactccacctgaaccagagtatttgtatccttctgcatcaagtgtgctgagagagatgagatttctcgccatccctggtatgtgtctcacatcttttagcgtgcgtgtcatgccatcatgtatcttgatctgtacggagccaatgcccacaatctcacgtgggttatcatctcccatgcgcacaacatctctattctgcacagacttgtaagaactaaaccaatctctgttaatgcagatatgaaacgaacatgcagtatcaagaatccattcatcataactagcaacacaaccagcaaaaacgacaagacaatctcctgaatcagagttttcagcactggtaacaacagaggccttaccatcagatttccttttctccttattctgtagcttccaacattcttcaatgaagtgatttttctttttgcaatacttacagaactttttacctctggacttggaacggcctctactttggctcttgtcacgatcattgttgtcgttgtaggttctctgctcagatctgcctctgacctgcaatgcttcgcccttagaggacgacgcattagactgaaccatacctttcatcttttccctattttggagcgcctcataaacttccgctagggttagttcatcacggcttaaaagtatggtgtcacgaaaatttgcatatgaactaggcagtgagcataacagtaaaagacctaaatcttcatcatcaaactgtacctccatcgacactaggtcggcaacgatctccttgaagaccgatatatggttcaacacagaaccactctcctacaacttgtgcgagaacaacttcatcttgatatgcatcttactggttagatctttagacatgcaaatcgattccagtttgagccaaagttctgtagcagtcttttcctacaacacttcttgcaaaatatcattagatagatgaagttggatcagcgacagagccttacgatctttccgcttctccatagcggtccattcagtcgatttcttcttcccgaagctttccagcgcctcatcaagatccgaagtttgtgctagaacaacccgcatcttgacttgccacaacgagaatctcgtcttatagtctagcagcggtagatcatacttcatcgacgccatcgcgaaaccctaatgtgggaacaagctctaataccacttgttaggaaacgataagcgaacaaacgataaagaacaatagatcaatcacagaagacacgagatttaacgtggaaaaccctcccaaaacaggagagaaaaaaccacgggcgccagccagcaaaatatctccactatatatggggtgaggttacaacgccgcacggcggcttacaagatgtgtatatatatatatggtggaaccctaaaaaggatgacgatccgtttcgccccaacctcccggcgacgggcctccgctccactacggtagaagctggtctttattaagtgcaattgaatttggatcacaactcaacaggtagccgccgccgccgctgttgaagaggaagtcggcgagggagccgttgctcatgtagtcgtagacgaggaggcggttggcgcccacgtggcgcgcacctccctctggaactcacgctcgccgtcctccaccagcttctccagccgcttcacggcgacggtcctctctccgccgcgccgcagcgtccccttgaacaccgtgccgaacgcgccgcggccgagggggtgtcggaagctgtacgtcgcgtgctccagctcctcgtagctgtacgagcggagcggcgcctcctcgtccagggcctcggcgtcggcgagcgcgacgcgccgtcgcaccatcctctggttcagccagagcagccgcgccgacgcgaggagggcgcacagcgcgacgaacgtcaggagcccgacgcagaccagcgcgacggtgctcgctcgcctgaagcggtggtggtggtggttgccgccgccgccgccgccgagcgccgggctcgccgctccaccggtcttgacgaacatcgtgtagccgccgcccgcgcggccgtatcgaagtgggagctgttgcttcgtgcacgtgccgtcgttggtgtcgagcagcgcggcgacgcagaagcagtctgacatgcacgccgcctggcagtcggcggcgctcgtgcccgcggccagcaccccgcacggcgtgtccgcccacgacacgttctgcatggtcgccatggacgaaccagggtcggctctctgccccccgtgcactcgccggcgccggagctcgccgtgcacccgcccgcggcgtcgccggcgtcgatcaaatcgaaccccggcgggcacaagcagctgggctgcgcgtcgcgatcaagcacgcagtagctgttgaacccgcaggcgcccttgacatggcaccgatcgctcggcccgatccactcgacgtcggtcttccacccgccgctcgacagcaatccatggcgatacgaacgcaagacgccgtcgggatcaagcgtgacgcggtggtagtgagcttgctctacggcttgagctgcactggccttcgtcaagttcttggtgtagctgccattgttgccgacgaggtagagcacgccgctggcatcgaggcgcaaggtgagggggaagcctatctggaacgtgccggtgtcccagtacgcggcggcggcgacgttcatggtgcccgccgggtacatgacgaggttgccgtcgttgagctggttggtcagccggtacttgccggtggccctgctcgtggcggagacgctcgagaagagctgtgcgccgggggcgaggtcctggccggcgagcagggtgtcggtcggcgccgcgaacgtcgaccacgccaccgtcgcgttcgcggcgtacagcacgaagttgccgtcgtcgcgcatggccgccgcgacggccggctggggcggcgcggcgacggtcctgtcctggccgttcgcgccggtccagagcaggcggccgtcgtaggtgagccgcagcgcgccgccggtggccggcgtgtcgttgcggctcgccgtccacgtcaccgttatgctgggcgcggtggcgagccagacgcccacggcgaggccgccgtcggtggcgtagaagccgaagacaaagtggcccgacggcgaggaccagccggcgccggcgacggcctgcacggaggcgcccgaagtgacatttgtttgggcaaatgacacgctgatgaggataacaaccatgaccggtatcagcaacaacggcaaatctaatggtttggccatggccaagagcaagctaatcaatcaactgattaatcaagccaatctttgctcaattacaagcttcgatcatattcgattacaagtatcatgtagcagtgaatgctgaggtggttgcatacttttcttctgcgatgtgatgtgtataagattgttctattcttagtccaagatttgtgtgttgttttgacctgccaatgttgatttttgtaggtccaaggtgatctatgaaatacactactttagttgagctttccaagctcttaaattattcagttgttctgctaaatggctcgactggtcaatttcatattgacacgcgaggtagatggcgacctgcccgccttgacttgtgtagtactctctgttttcctggttataacaccttttgattttggttaaagtcaaactactttaagtttgactaagtttatagataaatatagtaatgtttataataccaaattagtttcattaaatcaatagttgaatatattttcataatatttttttgttgaaaaagttattatttttttctacaaacataatcaaacttaaagcagtttgactttgacaaaagtcaaaacgtcttataatctgaaacagaggtaacttcaacagcaggtgccatttctttgagtaatggaattcaacttgtataagacggtgcaaaattctattaatagagcaggagaaaaattacaagattacaaccctaggtcatgtcgtaaccagaaaaaaaatagcggcaaacctaacatgcaaatatagtatcagaaaatggcatcattggttagagtgttagacacgagctgattaagctgtaacgatttttttaattgagaagtcgtaacacttattagcgataaaaaataacttttaacgatttttctatatatatccgtagcgatttaaaaggtaatgctgaaaataataggctgaaaaaaatgaaaaatactctaaatgaattcgaaaattaagttttaaaatttaaattttgcctactacttattctttataggttaaacgatgaggccctgattttctaacgctagcagcagtgcatgcatgcaactcacaattatcagccaaatgtctttgctcctctttttttattttcctagatattactccctccgtttctaaatatttaacactgttgactttttagcatatgtttgatcgttcgtcttattaaaaacttttgtgaaatatgtaaaactatatgtatatatataaaaaagtatatataacaatgaatcaaatgataggaaaagaactaataattacttaaagtttttaaataagatgaactgtcagacatattttaaaaagtcaaccgtgtcaaatatttaaaaacggaaacggagggagtattcaaagtcaaatgaaagtttctcatgcataaacaattttgctacctaacgtatatggatctttatcgtcaactccttcataagccctccaatctttagtcaatctaatattaaattgtctcacctgcgtagctcggatatttatgattttttctccacttttatcaaggacaataacgacaatttgattgaacaatggcaatgacaattcactcaaaaactggtttagccaatgtccatatgttgctttcgtagcaactaatggctgatgttgattattgaaattaaagcaagagatgattggtcttcttttgttaaagcaaagcaaattctataaacatatacagttgatccctacctatataattgatccctacctagtttaggtattgctattttcctgacatatggtgcttctacatcaccccatttgtttggaccgttggatcttcattgcaaggttaggatgcaggattggctaacatgtacagtatctgcacgtagcatgtatgggccaacatttagggcacatcgtttgcctagaggctcataagctaaagccaaaatttaaattttaaaacttaattttaaaattgattttgatgtttttttaacatagttttttttcaactttagcttttactccttctgcctcaaaatataagagcttttgggtggatgagacacatcctagtgctacgaatctggacatgagcctatctagattcaaattactaggatgtgtcacattcgcccaaaagcctttatattgtggaacggagggagtaagtcgctaagtacatatatacaaaagttttattcacggatcaatttttaatcattaataagccgtgagcaaccgatggggaccttatgcccaatttagatcacacctataagcccatcagttagagttctgtttgcctcgtcccttcgagtcgttttgcattaaagccgaaagatgccttatcaaaattttggtaaatgtgcaagtttagattgaagccaaaacaattgatagtgaccactgaccatgctcaatttagctacattttagaaacttctttatcatgctactaaatttaaattgttatcaaaccaaatatgagctagctaactttaccttataaaaaaaagtagtatcaaaatttacctatatatataatatcttatgtccatctcccatgtaaatcgcgacctgagctcgaaactcgcctcctgaccgaatctctaaggaggagtgctcacttccccgttagaggagtttcatactcagacatatccattttcctattttccttgattatttatgttcagctgtattcacaagatatggaaagaaaggcgaatgttatcatactattttaatattcaatttgtttgtttttttacttgacacaactatgcatcttttctctccggttagtgtcaaatagtaaaaaaaaaaaagtcgtgtaccacactagaacctaaatagtgcatacttaaatgttaaaatatggttcaatatttcattattatttattttttagcaagtcaaaacttataaattaaacattatctctcgctgcaatacggggagttttatctagtatattcagaaattcacaacagctagccctagccattcatgcaaaatcctttaattagacctggcccagttttatgcatagcctcacacagtccacattctggcccatgataggcccaactgcatttaatttttctctcccaatttggggctcaacattatcaaatatcattgactcattttgtgcttaattatgtgtccttgtgttgtacagttagctcaactaacaacacaccactagcataagccattacatctcttatcattatcattgcctctttggcatgttcatgtctgcatccatggacaagaaaataattgtcttgcatgcttggaattttgcccaacttgtagctaatagcttgatctgttagaggggcaaaaaaaaaaggggagcaatttggaaagatcttatattgatatagtcctccctccgtcccattttaagtgtagctatagttatccgtgtccaaccttgaccgtccgtcttattttaaaaaaaattaaaaaaaatttaaaaacataagtctcgggtaaaatactattcatgttttatcatctcataacaacaaaaatattaattataaaaaaatttcaaataagacggacgattaaaattgaacgcgaaaacttatggttgtacttagacagagggactactacatagcagacgacatgaaatgcttagctttttcagttggcatttcatggttacggaagcacatgggtctcatcaagctgtgcccttaattacctacagattagaggccatggcccttaagtacatggaccatctaattctaagcacatgtgaccccaaaattcggatttcgtacaagcgtgtgaagcttttggtcttgttgttcaacaaccaaataatgatactactagctcaaggttagttagagaaaaagaaagagaaaaatatacagatatatggtttaataatctgtctgaataaacactcaaagcttgctgctttgttcagactctgaccaaaatgtaaacttcaagtaccagttatttgcatgaacctgacagaaaacttagatgaagcaaatgtcatgtgtactttaccttcagaagatgcaacggcaataccaacacagccatcatcatataatgtatgcttcattaattagtttttagcaagttgacaatttgtttagcaccccaaaacacaacagtgttctttctctagatgcaataagctactaaaaacgacaagcttgtttatgcaaatcttaccagtcgtcacctatttaggcataggtcaactacctaacctacttggtctgctatgattttattatgctgctgtctaccactgctgctgctactatgatactatcccaccatgtgaagaacactgtactccatgccactgtcttatttgttaatcaatccaatttaaaactgctaattgcggtttcatctttccaacttctattgaaaccttagattttattttagataatggaaattaattcagccttagcttcatagaaactacaactgcaactcacattactgtggttgaaaatagaaaattgccaaggaaactaaataaagcgacaccatgtagatggagattatacaatcagaaattaatccttattactaaacattcatccatggtgacgaaaatcttgtatccttgtttccttcaatagggcccagaatcgaaaccaacacttttgatttttattatagtttgtgaaatgagagatagttaattacttggtacatatataatgtgccaataacaaccgtgcacggtaagaacatcccacactggaaccaaactaaagctcaaatcaagatttgtgtagggatttgttgaaatgacaacactaagcgtgcacactaatacccatataaacaagacagtagaatctaaaattttatcctcactaacgatctgctgctcgttaatgggagacaagtgtgcaacacatcacagtttgattacttcatccgaagaaaagtatcatcatctaaaagacacctttttgctctctgctcttgtcttcctccataacaggtagctagcacaaacactcgattctatcaagctgtataattaagcttagtgcctgcattatcttgatctcctcaaaagcaacaccacacgattaaatttgtttagctcatctatctgaacaaacgataaaaaagcaaaagttttgtttaggtagtagtactgaatagaactggttggttgatacaaacaacatgtggtttacgcttatgtactacaccatacaccacatggatcttgacatgttagggaaaatagcttgtagaaactagtagaaagcagtgaacataagctgtcacagtttatctagaagcaattacaataaactgaattcctgaaaaaaaaaaaaggatatttgaactgaataggtcagtgtcccatttcttccttaatgactttgtttgtgctaaacctttcaaaacacaattgacatatcctaaatatatacttcctccgtcccataaaaaactaacttagaataagatatgacttttttatataataaaactgattttttttatgcgactaagagggtatcttaaaagtttgttcggaaggatatcgattttttaagatggccctagctagcccctagttggctaggtaggtcatgtgcaagccgtgcctttttctccttggaaagacatgatccggatccttgtgaaggaggacatacatggccatgttatcatgcttcatgccccgacaagtgggccccaccggatcaaagccatgtcaccagggtccatgatccagtcaaagacagaaaaaaatgaatagtaaaactcatcctctggcctggtccaaagtccaaaccttcggtaggttgtgctaattaatcaagtcagtgtcattaggacatttattaattgcttttctagaatggtgttttcgttacgttgatgttattactgcttcctccgtttcacgatgtaagtcattctagcatttcccacattcatatttgatgctaatgaatctagacatattttatttatatttatatatatatatatatatatatatatatatatatatataatatatatatatatatatatatatatatatatatacattagcatcaatatgaatgtggaaaatgctagtcattatatatatatatatatatatatatatatatatatatattcattagtatcaatatgaatgtggaaaatgctagaatgacttacattgtgaaacgaagggagtactatacaccattaaaaagattctaaattgtgtttattgtaagaataattggggtataaatactgtctccagatggtatcaagcatgaaatgagtagacaacaagacccaccaagaaagctacatcagttgttgggaaccaaaagctttgaggtagaggaattgacacttagcagagacgctatatttttatttttatttttgtttactacctctgtcccaaaataagtgcagccatgagtttccgcgtccaactttaatcgttcgtcttatttaatttttttttataattagtatttttattgttataagatgataaagctttaatagtactttactcgtgacttgtgtttttaatttttttttaaaattttttaaataagacgaatggtcaaatttagacgcagaaaactatggctatacttattttgggacggagggagtagatcataaccgccctaatttactttagcatacgtggagtacaagataatagagttagtaaagatttaccatgccatatttgacattccaagccattagcttccgaaagtcatgttttactgttttcacatggaatgcattataaatagcattcacatttgataaaatttaggacacatattcttgaaagataacaattaattaaacacacaatatttttatatgtatcgcaatagcttccggtgatttcaaagtatatatagtagctatcaacaattcatatgtaagatacttttagaaaaaatgcagtaagatgcaagtcaatcgcatgacaactatattgtagacgccaatatatattgtttgaggcgtggttttaaataggtttaatggtttgcagaatttaattaaactattaatatattatgtaaattcaatatctttcaactgttagttttattgtcatcttatggcattttaagagtttttaagctcgttatattttaaaatatctgtaagggtatagcagtcaacgactgttgactaggcggcaatgacaaaagaaaaaaaagtacactagttataaaaaaagtagaaaaatatttaaagagagaattagtacaaatttttacaagaggaaagaaaatacggtttatacactttacacggaatagtaagaaaggaaaaaaaaaattcccacagtttacatgtagatccaaagtttttacactaaacaccctgaaaacaagttagttatataaaatcaccccctctctctcatttccttccatttcttccatccgtcgccggggctcccgctcctctggtgtcgccgccgcgccgcgccgcgccgcttctcccccccaactcatccgccgctcgcccgacgacctcgtcggcggccggatctactcggcggcggagcgtccaggtccagcgcctggcggagcagagcttcgcgggccagcaagcgagcctctccggcggctgcgcgcttaggcaaggcgagaagctaaggccttgtgcaagaccaggctctcctctccgttctgcgtcgccgtctccgacgactccaccgcgcacgacgagctccaagagagagggggcaaagaggaatcaagagttggaatcggggagcttagcgcacagctttcccaaccccagcgtacggccgcggccgccggctttgtctggcctcttctgctcccctctccttcctgttcggttcggccggatctaggactcggagcagaggctgcgccgcgggcttagtagggatcgatccccggcgagctcgcccccccgtgactcctgcctcctctggtacggcgaaatccaatctgttctactcttcctgctatgttcggtgcggaaaatggctagaaaaggaggctcctctcagtggtttgtgccgtgtggttttagttgaggatgcgaggtttggggggcttagcttgtggcttctgttctgattgcttgattaggttagggcgaattttgtgagggctttgctgtctaagatttgctctgtggtagtggtagtggaatgagaaaaaactatggatgctttcttgttttttttgcttggacttggggttgctattactagcgagcttgtggatgaatgagcgtaggtgaattctagatgcaaggtatgtggaatggtcagggcagagggatttatgcatattgctattatgttgattccacttaggatgtgctggattctcgggataaaattgctatttatgtgtacacctggtaattttcacgatgtgttcttggttattattgctatgttaaaaatggtatgtttatggattttcctttttttcgagctttagctagcaacttttccaagcatgtaggaaggatttataagcgatagagaggatcaggattaacttgtatcatgtagtgctgtagtagtttgtggtcaatataagcgtaggaggagctgctgtgctactcagcagcctgatcctctttatgatgaaggtataatgtgaatttatgcatttcaacagaaccattctatgttgcttctgataactagtgtgtacagttttagagcgcggacctcaaactggttcatattataagatggacaaattagttcacaaacaacttttgtaattgctgtactataatgggatctaactatacctggccatagtcattttaaatcttgctctccagtaacagaagtgtgctttccccataacctccattattgctgccattcaggttcataggatgctgatactttgttcccgtaaccgcatccatgtattttattcacttgttcttatctgtaattttgtttcgttaaaactactgtatcaatttgatgatgcataatgagttttactgagttgctgttaaacatatgcagatttttcaatattaaatcagccttgttattccttcaatagcagttcttggagatcagatgtgataaatatgcacactaaaggggcttcttctgatgttatcagagtaagcacatctagtgcccctagtacatcaagtcacggttctgcacaagatgactgtgattcttcaggtgatgtgtatgtatggggtgaagttatctgtgataactctgtaagaactggttctgatactgtagttaggtcaactgttaggaccgatgtcctgcgacctaagcctttggaatctaatttagtccttgatgcgtatcatgtggattgtggagttaaacattctgctttggtcacaaaaaatggagaagtctttacatggggtgaagaatctggtggacgccttggccatggatcacgagaagattctattcatcctcgtctaattgagtcattagcagtttgcaatgtggatattgttgcttgtggggagttccatacttgtgctgtgacaacagctggggaactgtatacttggggagacggaacacataatgttggacttctaggccatggtaaagatgtaagccactggattccaaaaagaattgcaggagcattggaaggtcttgcagttgcttatgtatcttgtggaacatggcatacagctttgattacaacaatgggccagctatttacctttggtgatggcacatttggagttttaggccatggaaaccgagaaagcatttcatgcccaaaggaggtcgagtctttatcggggttgaaaacgatttctgttgcatgtggtgtatggcacactgctgccattgtagaagttatagtgactcagtcaagttcaagtatatcttctggaaagctcttcacatggggagatggtgataagcatcgacttggtcatggtgacaaagaaccacgactcaagcctacatgtgtggcttcacttattgattatgattttcacaggatagcatgtggccatagtttaactgtgggtctgacaacatctgggaaagttttgagcatgggtaatactgtttatggtcagcttggcaatcctcgttcagatggtaagattccatgtttagttgaagagattgtgggtgaaaatgttgtgcaagttgcctgtggttcctaccatgttgcagttttgacaattaagagcgaggtttttacatggggaaaaggagccaatggaagactaggtcatggagatatagaggacagaaaaatacctacactggttgaggcattgagagataggtctgttaggcacatagcctgtggagcaaacttcactgctgctatatgccagcataagtgggtctctggagccgagcagtcacagtgtgcttcatgtcgacaaccatttgggttcacccgaaagaggcataattgccataattgtggacttgtccattgtaatgcgtgcacctcgaggaaggctgtcagggcagctttggctcccaatcctgcaaaaccttaccgtgtttgtgattcctgtttcttgaaattgaacaatgctgtagactctagtgcaattagtaaaaagaaagagaatgtacttcgcgaaagcaactctgatggtagattgacaaaagcaattatacctagtaatctggatatgatcagaagtttggatagcaaggcagcaaaacaagggaaaaaaacagatgcactgtcgtttcttcgtacacctcaaatgaattcgcttcttcagcttagagatattgctctatctggtgggcttgatctgaacaggccagttccaagagcagtgcgcacaacggcagttcgatcggtaaatacttctagggctgtttcccctttctctcgcaagcctagtccgccccgttctaccacaccagttccaacaactcatggcctttctattggaaaaggtgctgctgataatcttgcgaaaacaaatgagatgttaaatcaggaagttgaaagactccgtgcacaggtatctctttatttatttatgcacaagtccaactttggtatcctctttattatgcgactaaagaatttaatgctgcacatatttaggttgataacctgaggcaccgatgtgaggttcaagaacttgagttgcagaaatcagccaagaaagtacaagaggccatgacactggttgcagaagaatcttcaaagtccaaagctgcaaaggaagtcataaaatcgctaacagcacaggtaaggcctattagcttattgtcctcctttattcataaaagccatgaaccgatacttaactaattaactgttggacacctgtagtattcctggcctgtgatatattgtggttaagaatgccaagctgtgttcatgcatgttattgtggtggacattttaaatgtataatcattctaccagaaacaaaagggatatgtttcagtttcacttcacttccattttgcaagagtagaaatttcttaatgttatgaattacatgcaatgtcaaaatcaaaatgtacaatacctaaatattcattttatcttttttaaaaaaactttaatctgaaagaaacttctgtatttggcacctaacctctcaaattattcatttgagttttcttcagttaagtatcacttactttagttttgttatggctatccttttccctgatggctattgtctgccttttgcttcggcttgtgcagctcaaggatatggctgaaagactgcctccagatcagggagcctatgatgggaatgaatcaaaacaaatgcattttccaaatggcacagagttgcatgctgctatctactcgagcacgaatggcatccaccagctacaaaatgagtctatcagtgctttaaacacgcctagcctgaacactggaagatccttgcatgcaaatggaatctcaagtcaacataaatcactgggtagtattagtgaacatagtgaagtgagcactcacagccatcgggtttcaagccctcatgacactgaactttcaaatcgaagggcacggatcagtagtgatgagttgttcagtgcaagcggtaaatcggatgatagcaataacagggatgctaggtcccttcaaaatggtgaagatggttacaaacctcgagggacagtatctctgtccagcaaccaagttcaggctgaatggattgaacagtatgaaccaggggtatacattacactgacaacattacgcgatgggactcgggatctgaagcgggtgcgcttcaggtaaatcaggatctctatcctctttcttaaatcctgtcatggtggttagtttttgtttgccccttagtaagatatggtatttcttgactaaaataaaaaaaatgctttcgcaaatcactgtgaacctgacagttggtttatgtttcgggatatgctccacagtataaaacagaatggtgtgttattccttaattcaactatttaatcaacagtcatactatagttgcaatgcaaagtaagctgcctcttggtgtcttttaacacagcaagtgcccctctaggctctaacgtgcactatgaatggtgcagtgtttgtgctgggatcatacaacatttcatacgcaatgcccaattcaactcacttctcttatccttgcagtcgcaggcggttcggggagcatcaagcagagaactggtggaacgagaaccgggagaaggtatatgagaggtacaacgtaagaagttccgaaagagtctcgtcagcagcatcaacccggtcagctcgatgacatgaggatggcatgctgctggactggctgcaggaagaacatgaagtgaggctccaaagccatagttaaagaggccttgcaactatcttttgcaaggccttgaagagaaaaattcttttttggccctgtagtgtggataattattcttatttttcatccatgatcgtccaaggggggattgtggttctctgccccaatgtcactcatgtacatagagctgtcaaacaaatttagggagggctgtgaaactattagggaggactagccctttcttttccctttttgtgtgatgatgaattaattgctgaatggcgaatgcagtgcaggtgtaaagattcagagaaattttctgcaaccattttccatcctttctatgtacatgatgccgatgatacgaagtgaagccttggtagaatttctggaaataaaactgctctaaaactgcaactgtctatgtacatgatgctgatgatatggagtgaagccttggtagaatttctgggaatgaaactgctctaaaactgcaactactagacacttcaaattattttttagaggagccagagaaaaactctcaaatcccgcgggaattgcactgccttcttcagaaaaccccacagtatcttacaaaattcacgtacttcctctatgaaatgtcacatccggtcatcacttatattaggacggaaggagtatgaattttggagaacccctatagaatttggttcaattttctatataattcaactaaatttcctccattcgaaagcagagcaaagttggaggaaagaattccaacaagaatcacgaactagccatacgggccagggcccacaacaaaagtgggccccatccataactgacatcccagaaatggagtaggcttcgtctcctccaccccaccccaacccaacccaacccaacccttctctccacgcaggcgcagcggagtaggtgaaggtgaaggtgaaggtggaggtgaccatgccgccgccgagctcgagggagtcgctctccgtcgccatggccgcccgctcccaatcgcagccgcacctcgacttcccctccctcttctccgacctcacctcgctcctcctccagcacccggcgcctccctcctcctcgtcgtcgcctggccccgtcttctcctcctcatctctctccatccccgcgcccgcgcctgcgtcggctgccgtcgccgccacggcgcctcccaccccgctcgcccgcgcggtcatcggggcgtgcgcgggcgccgcggcgggggccttcacctacgccgctctgctccccatcgacgccgtcaagacccgcatctcaggccggcgccgccgcgggggggtcgtggcaggtgttcctcgacatcctccgaaccgacgggcccctggggctctaccggggcctctccgtcgtcatcctcggttccgcgtcctcctccgccgtctacttcggcacgtgcgagctcgccaagtcgctgctccgcccccacctcccacccttcctcgtgccgccgctcgccggcgccagcggcaacgtctcctcctccgccatcatggtccccaaggagctcatcacccagcgcctccaatccggcgccgccaagggccgctcatggcaggtgctccttcagatcctccagaccgacggattcttcggcctctacgccggctacgccgccaccctcctccgcaacctccccgcgggggtcctcagctactcctccttcgagtacctcaaggcattcaccctcaagcaacgcaacaaggagagcctcacgccgggagagagtgtgctgtgcggcgctctcgcgggggccatatcggcggcgctcaccaccccgctcgacgtcgtcaagacgcgcctcatgaccagggtgggcaccgaggggagccgcaccgtggttgggacaatgcgggaggtcgtcgccgaggaggggctgatgggcttgtcccgggggattggtccgagggtgctgcacagcgcttgcttcgccgcgctgggatactgcgccttcgagacggcgaggcttgcgattctcaaatggtacattgaagactgcgagaggaaggctgcagcggagatgaaggctggagtaggcgctgcttgagtttgtgagtgctctttcaggaaagttggctgttgattttgctcccaatgatgccatgactgtctcaggagttttactgtacctacctagctatgctatgatgcagataatgcacctgcttaaattgtttgaaacttaagcatccttgaaagttcattgtagagttgaagtgcacaagcaataaaatcaggccattgttaatgtatcatcggttttgttcaatagccagctttgttgggcataggttccaggtaatgttttaaagtaacttttcatgcatcaccttttcttttgtgtttgtgcgcgtggttgcaactgaagcttgagaaaatggaagttttttttttcgcattttaagcaccacgaccacacaaacctttactcatgtacagcagtgtaactctccattgctactcattttctgttttgcaccgcattagtagaatatcatgcaacctatttgattcactagctcttagaagaatcagtggtagtttgaaaatttccatttaatggatgttttatgattctaccactactagatgtttcatcagcttcaaattcatagtgatatactgatatgctttgtctcaaaaagaaaaagaaatcatagtgatacgattcaacatgaaactctatataactgctaatgtttgagtgcgaggtctaggcgactaggcatcttattttagtggttgctgttaacttaaagggtacgtttgcctctttagagtaattcaacaatatagtatcagtcacaatgcaataaaaacattgaagtgtctaggcatttagtgtttttctgatgttcagtaatgagttcacagttactgaacatgtttgatcatactgaggtagagtagataagtttgtgggcaccaaatacaagttcacagttacagaacatgtttgatcatactgaggtagagtagataagtttgtgggcaccaaatacaagttcacagttacagaacatgtttgatcatactgaggtagagtagataagtttgtgggcaccagatacaagagtgcaacagaaatttaacgtgctatggttcatcatttgaagtactttctgcagaatgaatctgcagcatctgggtactgagctctgatgtagttctccaggcacttcttgtaggagaaatcttttctggatccatctgaggacatgacatataagcacctacttccatggaatacctgatgcctatcgacctataagcagcaaatgagtcctcatggttttccattttttggttcatctgacgcagaaagattcaagaaggcaagttgcttactgttatgtagttgccgttgccagctatcttcttcttcctctctgggtggtacatgagaacatttgtgacaataaacttctcatcatctggaggaagtttaataccgtccctgcaaaagtattgagagagatggactgtaagggatacaacagaaggaaccacctgggcggtgtttgaacatacacttaacttccatcttatcatctagctatcaacgtactagtggtcgaaaaatgaagaatcctagtacttgtgccttttcaagtttattggaccagaaaaatacctcgattcacggatgatcctctttacattctttgtgattggttcgatttgttcaaatatctgctgctccactggtgtaaaagcacaactcgctacctgcctcatactgcctccacggcgtgatgcctctgatttccacactgctctaccaccacctcgattcctattattgccactgcctcggtgtgatgcctctgatttccacactgctctaccaccaccttgattcctattactgctactgcctccacggtgtggtccctctgatttccacacttctctaccaccaccttgaccgcgattattattcttcctgttccattcacctggtcgggatgatcctgcaatggtgaagttctgtgtgcccgcgctatttgaactataccaacttggtttatcatcttgctgtgttgcatctgagttccagttactcttggtcttcagttgccttctctggaacacctgaccagtaaattctactgcagtagaatttggggaactcttggtgtttccttcatgccaatttggcttcctcggatgtttttggccagtgctgtgcatccctgccctcctaccctcagattccatcaggaattcagcttttggtttgtctgtccaggtgatctgattgttttcttctaaacatactttatcctctggaatgcagtcaacatcatataagcagtagttatgaggaacaattgccttatctttagttgctcctgttgtttctactgcttccaagaagtcatacagaccatacccaccaaggatactcttgcttgatgactgaaaagagataagaagttaaagtgatcttcaaaagtctctgtaaatatgagtggtgttaacaagtaaagttgtcaaatgtaccatgttctcgtcattccaaaggatttcaaaagctgaaccagttccaatttctgcattattgccccaagagcaggctgatacaacattgcccagctgatcggagtaggccttcgctgctgccttctcaaagcattgtattgatctctgcaacatgttttgttatatttgaattatgaccaagacttggttctggctcatttaagtgaggatttcaaaagagatgagagtgcatgacttactgatagtgtagcctccataaatggtgcctgaaccttcagagattgacatgtggccttgtagccagagttgttgaagccatgcaaatcgcctgtgcaggtcatgctacttgcaactgttgtcaggtgctcttggagaactgattttgtaatcattccaacagacttggaaaggtactgaaaggagcacaacacgagcaatgtttcagcagaagttacctgaatttcagctaaaaggagaaaggggaataactgaacctgtgtgactttttcgaatgcggaggaaatgccaaacacctgtcggacttgctgtatatcgtacggcatagacctggtggtgtcaatcagatccatcacagggatacatgcattcattgctactccccaggcattgccactctcagcagccgcagcctcttccacagtgatttccagtgccgcctcgcctttctgttctgcaccagagctctggacccaaaatgttgattctggttcaatccttactaggttggcttcctcaactcgaggatcacctgtgaagagaaggtgcagaattgattgtaagtaagcataattgcataggacattttcaccataactgtctggatgttcctcttgcattttttttaccttttataacagtgtctaaaattatagggaaaatggcattagtcatgaaatcgataactcgttcagtagattcagatatatttttagtgatgcttccagggaggaaaaactgcaagcaggaaacctgaaattttttatcatcatctgtatgttggtcgcacaaacttgtgctgcaaagaagaaacacatgatttagtttacaacaaaaatatagtcatacttccttaaaaatattcttttactcaaaatatggatggtagtcccaaatgcataaatacctaatggaagataatatatttactagagtctgaactgtgccataaagaacttagtggtctagcactgaacatatgacttaaattagtagactactggacctgaagttcagaagagcagtaaatctctattcatactgtctttattgctaaaataatagaagtttgaagcaccttgaaatgaaagtgactgtcttcaatatttcacgcatcgatcccttcttctttatgttattcctaaaagtctcctggcatttgtgaagaacactgtccataattgtttcaatctgattcaattgcttctgtaagagcaagagaaacttataatcttagtgattattatgaaatgacatggatataatttgagttactgaatgatagaccttgtcaaggtgaatatggccaacaagatgatgagctgcttgagttgcttgctgttgatacctgaaatattatcccaacaattctgagccttggacaatgtagaactactaaaagggaaatctaagaaactaatgctggactgaactgggcaagttcaacgaaatgctctttttccccaaaaagttcaataggatgccaaatcaatagttgctgtttaattgcttgcatcacatgaaataagttttgtagatttagtttaatttatagtccaggtaaagtagaatcaataggacttgtatctttacattgcagaagcataaataattggaaagcctgatagtacatacttgatggatatctctgtggtacaatcctctaatttgatcctccttaagcaggctcgaattgtgagtgctctctccatgcattcattttcacaagagcactggttcagatacaaaatgacctttcggtgattggcatcagctttagtgcttgccctagtaagcagtacttcctataacagtaacatttagtagtaaaaaaaacatatgaatttagtagtaaaacaaaatttagtagtcaaaattagtaaattacagtctacatatgaattgaactgaggcttggagtgaattgatctggtcagcttctcaccttcatcgagtcccaagaaattatattattctgattaggagccaacactgccttgtaagcagcatttgcaactgcagtggctgccaagataccaacggggtcacctggtgtcacacaatttgatgcatcccttgagccaaactgaagaactaagttaccagacgaagttcttatggatccatcatagcatgctgtgacatctcggagtcttgacatcatgttcttgaaaagactgccaggctccactagccctttagatgcacgcattatcttctccctttcacatatagaatgaagtagagcctcatatgggtttagtccatggtaaattgagctccttacagtaccatattcctctagagggttgcaacaattggtactcccgcaacatctgtgcagagacttagacaggcaatcctccactaacctgctactgtatagtcttccgttgtgttgtagttgaggccccaggaaaccaagctgctccactactttgttcatgttggaatcacttttgggatcaaccaacagtcctatggcagaagaatgggttatgaaatccataattggttccctgtacttatttagctcaagtggattattttgaatagcttccagaattggacttgggacagtgaaatctcccaaatttatgctgaagcaatcaataagcagtgactccattagtaagggctgcagaagattcagaaattctgtggcctcccttggaccctttgtagaaaggatcgatgagatggtggtaccagtagctaaggctccaacagattctctgtcaagatggtctgccagtgttattgcattagatttagtggtctctagaatctgaggaaaggtccagtaaggtccaccaatcagtggcttctgggggtacatccctgatgagaacattgcatttgtaatttggtttgcttccctctcagaatactccctaccacacatgatcttcagagctagtgagaaatcattcttgaactgaaagttcagtttcccattatgggagctcaccagctgcttatccacagtgtatagctctttagcttcagctcttgctgaaagcgaccttgggtagaagatttggacacagtcaccatcaaaatctgctccaagtgggtcacaaatgagtgggttgatctttatggtgtgatcattgtggacttggacatagaaggcctcaactgagtgcttatcagtgcttggtggcctgttgaggaagacaatatccccgtcgaaaacccttctgttgacaatttcgccgaccttcagtatggtgtgtttcttgttcggattgtccttccctgcatccaatgagtacgtgatggaattggcatctgtatatgtcaaacatagtcctttattcatcatgtcttgcaattgagcaatgttgtggtctgtgactttttcttctactgacattctctttgctacttcctcaggcaccccaacaacattgagaccaatgtatggatcaccagtaatcacaccacgggacgagaagcttgagctcttactgatgaacaatgtcttcattttttgcttccattgcattgctgttggttgacttgtgaacgtgtcatctccgtgacccttcaagagacatacgatgatgataaatttatgaagatgcaattatgatgaagaaggtaacctacactttatttactaatgaatcatgtacctttgttgttcctccgaggttgatgtagttggcaacatcgacctgaagatcatctgcaacttgatccacttggatgtttgaggaaccaatccttgaaccacgaatctgctgtatcttacgtagtgctttccttaataagtttgtcgatgtgccctgattaaagaagggacataaatcactaggtcagtggtaatgacatctagaagggaaaaaggcaaaaagaacttctaaacttcaatcaaatagtgtttgattaggatgaacttactgaacagctgaatgtatttccatccaaaacattggaaaccctcaggcagtttggtgggacgcagagatagctcagtataaaaccatcctgaggaatatatcccctaacagaaagccaccttcttgtttcttcagggatcttctttatgatgttttggacctgacaaacagaagaataaaatgcgaagggggacagatagtaagataaatgtgtgcaacaatttctatatgcaaagctactctatgtaagttctgaaacttatgcatttatctttgctttgttccaataggggtggctttcgcaacatgagcaagagtacctcttctgggagcaaaggacgacaatgagaggtacccctcgtgcaactgccaaactgatcaaggaagctccagaatccctcttccagttctttcttgataggtgctctcaactccaagccacgggcaccattggacttcttgacttctgcaacgcacagcggtgggagctcctggaataagatggattcaagaactaatgatgcctgtttgcattacttggcttttcacagttgagggaaaagcaacattgacccctaagaaacataaatggatgatcagctgcaaattacctgacagtgtgaacatgaagtgaatttgcttcccttaagagtgctcttctgtttgagttgttaagtgcagaaacatgtgttagcgatgacaatatagtatggcttatcgcatatgctgatgatatgcctgagcatggtttttgcagttgtacctttctgttcttgatcttgaggcatctcaggcatattaagttgagtatctggctcagctcggtgacatggctcgggtggaagatgggcatgggcagctcaatgaatctgaagtgaccttggaatcaatcatcaaaaaatgaattttatttccatcaaaggtacacaacagagtgaagagtgagcactgtctctgaaactgttctttgcaatatcttttcttttttttttccagaaacagattttcagacatcatgccatgcaaaataaacagtgaataacttcacaaaacttgctttcatttgcacccgtttggaaatctgaaagttattgtccaatgcaggatcgcacaaaagagattgcgactgactagcataccctcgcattcttcgatggcgttgctgccacacgactgacagctgccgacttgcagaggcaggcccaagtatggattgttcagcagctggctttgatgcgtgatggggatcggcttctcgagctcgttcaccggctgcgccttcagctgccgaatacacaggagtcacagcaatgggtaaaagaatatgataccaaataccattggcaggtgaaggtgatgatggtttgacagcttacaatttcctcgttgctggtgatactcaggttgatgcgtctgatcgaggcctcggggatcatggcagtagcagcagatgttggatcaggatgaccttccatttctgtacgactgtacctgtggaggcagaggttagtatgcaatcactgaaaccaaatggttcgtatgatcagtgtcatgtccaaccaaaaggagaatcaaacaactagatatcaaccgaagaaccctagaacatacctttgtttctttttttttaatatggttatggatggacaagatcaagagcttgctagtcgatcaatggcgacctcagatgccaaacaaacacaggaatgaagttttttgggaactgtattatctactggtttttactgtgttatacaaacctcttctgtaactgtaaccaaccggtagccacccaaagtgtaagtgtcaagtattgagaaagctcagaactcagaaggcaggaggcctctcttttactcactcaatactcaacagtcaacacgcatcttttactctctctctctctccatccaactttggtatcttgcctactccatatgttctatctactttgtgaataagggtgaggcctacatcactgtgtattttagttgttgttgtaattacaatggtgaaagaagaaaacagtaaaaaaatgtaaatactccatgtggggcttcttttttttaccgacgtttaatttccatcctttcaattctgaaagttttacctaccaaagcagtataaaaatctgtaaatactccacgtgggaccaatattatattttaaataatctaaatatttaacatcaaagttgtataattgtatttgttatcaagagcactttactaatatttcatttcctctatcctaaaatataaccatctggcattttaattttattttagaatatatcaattaatcatctcttatttcattccacctctctttaaattctgcgaaaatcagtactcatttaatttcaccattccttaatccccatgaaaaccatcacttatttaatatcacttctctccttaatcccagtaaaaatcatgtcttatttaatttcacctccatccccgtaaaaaaaaaggaagtacagaaatgctcatatttttttaacctagcgagtacatttaaataagaaatagatcaataccccgctgcgttgctgcgggaaattaagttatataatatatacaaatatgatgcaatatgattattaaaactaaaacaaattgatacttatgaattttgagtctataaattattgagattgtatggtgttatgagagaagaaaaaaaagacaatttgaaccataaatccatcatccaatggctaaaaataattcggatgatgtggcttaataagagaaaagagaaatagcaataactatatttagtggggataaacttacaagtatacagaggattactttctttccgtgctagttcgatcaccccttaagcaaaggccgtaccaaaacctccatcattctaaattaatcattactatcgattaatatgcttcgtcgcttcttatctaataaaaatcacttcgcattgggttgaatcaatagaaattaattttaaatgttgtatgggttgaatcaatagaaattaatctttggttggttgcatgtataaagttacatatatgcagtacatatttactcttgtataaataaacaaagaaccattgtgtcatatgatgattatttttttaaaaaaacacaaataataggtgatgatcaaactgatggggggagtaactgtcaaagctcatcaatgtccctcgcaaaaaaaaaaaaaaaaaaaaaaagctcatcgatgtcaccatttagggagaagtatacccaaggtccctcaacttgtcataaaaaacatcctcagaccgcaaaatcatatatgcgaggtatcttaactatacaaaaccggtcacctgagattctttggtggttttgaccccggttttgatacgtggcagctgagtcagcatgagacccacgtgtcagcgtgccacgtcaactttcccctttcttttttctcttctttttttttttttacttctctttgccgtgggggagtagcaacgcgcggcggcgagcggggctgagcggcggccggcggaggcggggtgcgagcgtgcggcggccggcgaagcggaggcgtgaagcggcggtggcggcaggcggccgcgcacgcggcggccggcggatggggagcgacggccagtaggcggaggcggtggaggtggcggccctcctagcggcgggcatggtggtcgtcggcgtcggcgtgccccgcgcccgctcctcccaatgggatcctctcctcctcgtcggcgtcgtcatccccctcgtccccgccggatcccgccgcggcgcggtggccggcgtcctccttctcctccgccgccgcatcgagggcgtgcccctcttctccctcccagccacctctgcccgggtcggcacgcacgcctccagcactttcaactccttctggccatcgtcgtcggtgcgtgaaatttcgacaatttgtacctgtttttctttcttttgttcagtattacttgggggatccactaggtctagaaaaaacaccccgcg

SEQ ID NO: 7989 - DNA, 79344 bp, Oryza sativa
caacctctctctatacgtagcctcggtgggtgagcgggcgagcggcgacctcgctgtcgccagccacgccgcctccacagcgccgcgcagatgctgtcattcggcgccctcggaatcaccaccactacgtcctgcagcgcctgcctttgcacgttcggcgacggctggtacagccggagcacctcgttcagcacgcaccccatcttcgtcagcttccccagcgccgccgcgtcgaggaggcccgaccgcccggccgcctccaccacctcctcccgcaccgccgcctgccactccgggtgcgccgccagcatcagcagcgtccacgacagccgctcccgctcaccgcagtgctcgacacgggtagcgacctcatctggacgcagtacgacgcgccgtgccggaggtgcttcccacagccggcgccgctgtacgcgtcggccaggtccgtgacgtgcgccaacgtgtcgtgctgctcgccgatgtgccaggcgctccagagcccgtggtcccgctgctcgccgcccgacacgggctgcgcgtactacttctcctacggcgacggcacctccaccgacggcatcctcgccaccgagacgttcacgctcggcacggacgccgccgtgcgtggcgtcgcctccgggtgcgggacggagaacctcggcagcatagacaactccttcggcctggtcggcatggggagaggcccaccgtcgctggtgtcgctgaagaagaacgtcttgcactcgtccaccagctcccgcgtcgtcagcttcctctcgcgcccccgcgctcgccttgttccctcccagcagcagctacagcaggtcgttcgtcttcttcctcccgctgcagccgctggtgacgccgcgactcgatgatgtcgagcaggagcgcgtcgatctcccgccccagcttccacgcctcatagttggcgcggcacgccgacgaggcgggtggagcggaacagcatcgcctgcatggcctgcagcttgtggaagaccccagcgccggtggcgtcatcgtcggtgccgatgccgaagctggccttggcgatgatctcggcggcgttccagaccacgcccttctcgatgtcgatgcagctctaccccgacaccaccatgtcgctccactcgcccagcatcttcgacgtcgtctccggatggggagaggcgggcgctagccgccgctcccgccgtcgcgggcgttcgcgccggccgcctcctctccccctctcccgcttcttccccgcgcgccgcagcgcccgctgcgccggcagccgcgcctgctcagccgtcggccgcacacccacatctgcccgcctgcgcgtgagaactaacaagatgagaagataaaaagggaagaaaaaaagatgtgggcccacatcattttctctcgctgacatgtgggccccatatatttattttattattttttactgactagtatgccacgtcagcaaaaccagtcatctatactgccttggatccaaattagacggttttgtatagtttaggggtgaagatttctggttttgtggttaaggaaccttgaaatcttgatgttaagttgagggaacttattcctatttacttccgtttgaattttaaatacacatgtactaatatttacagagttaacagtttcttaaagaaagtcttgttttatagaagtaattttataaatgtatttaataaaactaatttcagattatgacttttctgggggatgtcattggactatctttattaataagaaaatatagttacatcatccacgctcataataaagctaggggctggttcattgatccatatacatgattttcttgaaaaaaaaaagacctagccaattcatgagttacctggtttgcctctctattacaatactcaatagaaaccctatcaaaaccattatgtaaattgttgcaatcttcgtatatggctatcgatgccattgtcaagaaacctccatctaacataatgtcaacaacctacttacaatctatctgaataataaacttattccaaaccatgacttggtgctgatggaaaactaatttcacaagtaatattaaatgggttcttgccatgtacaatatttataagctaaagtatataagttgaaatccgtttctatttcgactttagaatctcaataagaagacctaagtaaccatactctatatcccttagctctagctttaaatactatgctttacatatcagatgttttaaaaaaattcttgctactaaaaaataccaaaaagtatgtccattgaagaatgcagcggcggtgccctgaaccatatctcccgcacattaaggacacacgttattctcctcctgctctaaacaaatcacagacaataaaaaaaagcaatggttgagctagtaggagctccgcttgatccggtaaatgagctaatatcaatctatcatgtgtctatgctcctaccctacctcgatcattgttctccttccgagaggctaagcggtggacttattaaacctgattggagccatgtttgaaaacacaacatagatttttctttttaaaaaaaaaaaagattttgatgccaatgagaaagggagatattagctttgaatctccctagccatctatacatagaatattctatgttatatggttttgaatagaatattctatgttatatggttttgaagtactaagttgaataaggatcaatatttaccaattcaagtactatgtacacttacgaaacaattcaaagcaacttactatcatagaggttctattttatagatatcgtgaagtatatttaataggaacacactgtctggcaccgtttgtaaaaaaaaaaatcctctatatctatccttgtgaatactggcacactgaaatttcagtttaagaatttatacactgataatccaaattacaaccacaagttgtggcgatttggacagaattttgttaatcccaagctaggtgttgaccatgggtcaacaatctcccatggtgcccgtggccgtggtgtacgcaacttgtccgcagccgcgaccccgacccgacccgaccagactcggcacccgctttctcattttttttttctttttgccgacttcccccctcagccgccacacgccccctcgccgccggcgacctcgagttctagggttagggtttttgccccggctcgccaatccactatcgcccaaggcttcggccccaattcgacgcccgcgggttcaattccgagcgctcccaagtcgaattgtccgcctccaccggtggaattcccatgcctctgagataaggattttgggggagacgcggggtgagccgggcggccatggcggggagctcgaggcccgacctcggcggtggcgggagcttccgcgagggcccgcagctctccggggcgggaaccccgagggcgctggcggagccgcccccgctggcgcagtacctccccctggagtcgttccccgtcggcgaccacaagcagtcgcgcgccacggagcttcggcgggtgctcggcgtcaccgtggaggcggagcagtcgttcgggctggtgcagaccaagccactcccttccatagcgtccgaggaactcaagcggatccgtgggggcgtcgtggagtcgtcggccaaagccaagtacatgctgcttactagttactgcacactactgcttcaatctgcattgctcattaacccgcaaccggtgaaatgttgtgcagggagaaaaccaagtcgctgcaggattctattcagaagctggataagtacaggaacgttgtcacgcggaggcggcagaggagcgaaggaggtgcgactgagaggtcatcagggagtgggtcgggttccctgaggatgggggctcagaacagtatggataatcctggccagcggctggaggagagggctaagagtgcgaccacaagcaagcgtgtccgctcatcgctagcagcagatgcacgggtttgtacttgtgctactctaaagattcatccagggatttcattttgctcgtttgccactgtctccatcaatgtaaatagttacgtcgatactacaggattacagaattacaatcataagctgctctgttactgtaatataacaaattagtttgaactttcaactggtaattgggcatatgccgcatatcagtgtgcgttggcagttaacatggagtagcaatttaaattttattgcatgctaaaaaatggattccaaatgcaattggacccaattacgtggtcatggttaccaatttgagtgaaggaatacatcctgtgagtagacgtagctgatcaggttaatatggaatgtacttaagcatcctttttgcttattttgtaaagagcagctgaagcttatttttgggtcacttttatgtctttgtatctctttgttgctgtggtatccatgtgagcaatattatattattatatatgagagcacattttcgtcattctaaattcaacttagagctacctatgaggcatggtatttctttttgggcgttatcgtacttgttatgtatttactgtgcttccaattttccttttctttgactcttgtgatatatatttcagttagaagggcgtggtaatgttcctacaaggcaaggtcctctggcggacagtgagaaaagttcctctttggagaaggaaaaaaactctttgaggaatgtcaatgctgcatcagggttttctgaagacaaattacggggcctagctcctggaggtgaaggttgggagaaaaagttgaaacgtaagcgctctgttggaactatgctgaacagaggcaatgacgtagaccgagatgttaaaccgttggttcaacatagaccaaacaatgaagctcgcatgcgatctagtgatggtcttccaattaggtaactttcatacattgttgttacttgttaaccttgttatatgagttagtttctgtacagactttagcttcaaatgaaaacatcattgaaacgagacaatgaggtttactatgccacacactataatgacatcataggtggtactcctatgagcattgaggtctgtcatcatccctttaatgctgtgttgacaggcatggagcttctgctggagcattaggaggaagcaagatggatggaggttctcaacagagtaatgcaggttcccgttatctactgaaggcagacatggactccacttctcttccaaatgaaagaagagagcgccatttagggatagacaaagaacgggttttggtgaaaggaaacaagtaagcatagtaattggtggcattattttagcaatatatgctatgatacaagcacactgatttgcattttggaatgcctttaactctttgtgtgattggttacactgatactttgtatacgcagtttcttgtattttatgagtactccttttttgcggggagatgagtcctgttgaagtgttgattatttctactctataccatgaatgagaaatgatgtactgaatcattcttctcttatttagggcaaatacctctgaggatatgcaacctggaactttaaatcctctgactaagggcaaggcatgcagagcaccaagaactagttcccttgttgttatgaattcatcatccactcttcagcgctcatctggaggaatcgatgaatgggaagaaacaccatccaccaataaatcctctcctttgggaggcactgcaaatcgcaagcgtcccatgactgcaagtgggtcttcacctcctgttgcttgggtgggtcaacgtccacagaaaatgtcacggacaagaagagcaaatgttgtttccccagtctcaaattttgatgaaggcctatctgaaggatcaccacttgatgctgctgttagaccagcggtagagtcacctggccttttgcttccaaggggtgtagctagtaataattcacaagttacaccaagaatggataatatttcatctccagctggtctgtcagaaagcgaagactctgctgctacggaaaataagaacaaggataaaatcagtaatagtggtgattttgagaacgagggcgcaaattcagcccataattcagcagacttaattatctcatcgaagaaaagcaggatactgttaaaagaagagcttgaagatggaagtattcgacggcaagggaggagcggaagaaacactatgcatgttaaagggtgtgcatccatgccaagagagaagttggacagcccagaaacaagaaagctgctgaagagcggaagacctgtatctgaaaagaatgaaaggtgcttgatgattggaacttattgaggttgttagttatatgtatcctaatggaactaattaatttctaaattgattcagtaagttgggccgccctccaacgaagaagggttcagaccgcaaagcatcatctcgacactcggagatcctaaattgtgggttaacagatatatcaggtttcctgaaaggcacctttattatccacctaatgccttcgaattctataaggagttaaggatgttaagagtcttgacattaaactgtgtgtcataggtgaatcagaagatgaccgggaagagcttctagctgctgcaaatgctgcgcgcagtgccattggtgtgcaattctgcaaatcaaagtttcctatatgatttgcagagagctgtaattttattggctcatgcttaataggttccttatcctttctgcagttaatgcatatgctggtccattttggaagaaaatagaaccgatgcttactttcatcagctctgaagatttatctttcttaaagcaccaggttggattctgtttgcccttttgactttgcataagttgctttacatttttgcctgtttgggatgaacttccacttaccagaatctctggtcagattacatttttggaagagcttgagatgggcatgtctaagtcatccgatgaacataatttgaacacatcaactaactacagtgggccattatcaatggtattttgcctgaattactccactacagaatttcaacaaaattcttcaacctgtgtattctgttatatctccactctaaacttcatgcatatggactgatatcctctttccatatgttcttttcataaacagggtcaaaattcatctctgcctcagtcaaattcatgtgtgtcattggagcaaagcgaagcaaatggacccaggacaagagaatctattgatattttgtctcccaatgatgaaaacactgcatctcaaaagacacatgcagaagaattgtttggtggaatggcttccttgacacacaaactcttctctgcttttattgtagaagatggtgataattcttctgaatgcaatggaggagatatacttcttgagttctcaaatgacttccttccttatgctgccaacatgaacttagaaaatgattttgaagctagtgcagtaaaatccaactttggatcaagtcctgatttcaagcactcaaaccatagctcagtgcataacagcatgtccaatggttttacagcttccagcaatttgagggcctcatatagtccaaattcaatttgcagtgagaatgcatcggatgcgataaaatttgcagtatatccagaaaatggtggttttcatgaatttgtgccacatatctcacaacagtatcaaaactgtgcaaaaagtacgcctttaccaccatatgaatatcagtatgaccagttgcctgtgcatgacagagctttaatcgagctgcacagtattgacctttgtccagagatggtatggttcctaaaaaccttccattattttgtaaatttgaagaatatatactgctttcctggttataatgttatatgccaaggtgtttctcaaacatctcaattagcatgaatagaagttgagaccatacattttcttctgttgccagtttgttgctctggttctggtgtttaggagactttgatttcttatgttatgctatgaatgtagatgtagctttctatttatttgcattcctggtggggcatatgtaaattcctgttggcacaaggcacctagtgcatcaatggtgaggaaaaatatcgataaaatgtagatcaccttaagaactgcaaaagtagtgtgctgtaatttgcatttttatcttaaccattgttcttaggagctgcgaagatattagcaaaaactttttatgataataaaatatacaccaatacttcgattggaacagaaaaatactgaaattataactttgatctgagtggaaacagctgaggggtttagaggtcttgaggataggaaaggttagtgcaaggggttggacgccaatcagttgctagagtgactgttgcccctgttcaatcatgagttctactagggtgaaccagtggtgcttattccttgagagagagctgaaacaattttggtgcaaatctttgattcttgtacgaatgctccctactcaatattcttgcttgaaaaagaagtcctgacaattttcttcttccggtagccaaagctggatgatggagaggatgaggacattgataaagttattacggagctgcagaaaagactgtttgagcaggttctctctctctctctctctctctctctctgtgtatgtgtgtgtgtgtgtgtaaccttgtaaagtgtataacgtttctagattagcgaagtataaagaactatagaactagggattctaacttgacttcttattatagtgagagctatgattattcagaagtagtaccccatacaatcatcatcatcccacctcaatttggcctatttgaatgataagggcatggccaaaactactgacacaactggtcgtgtggtcttgccaacttctctagcaagttaactgtgttcagtaaaaatctagcatgatttggggtggattctcttgataggagaatatgtcatagctttctcagtgccaagttttcaagcaagcaattagtagaatagctgagtcggtcttgaaattacttatacattgtgcatcatctgggtatgttatcaccacaaatgagattttcgatcacagttcagggcttcaagcgatcctgatttttctgtatttctcatacttggatgatattctttaggcttcaatatcacataaaatttgtatgagaacacctacatttcattgtgatgtttcctggacagtatttcttttgttacttccagatgtattctgggaaattgatgtgctttttctaagagttaacacctatttaacacttgtgctcctcgacttatttcaggtgaatcaaaagaagtgccaattacataagttggacaaagcaatccgtgatactaaaaatatggaggagaggtattaaatattccacccctatacaactttccattataaacacatatatggaagttataacagcaactaaacttggatttcaggagtctggagcaacatgcaatgaacaagctagtggagatggcatacaaaaaactgatggtacttgaatattcttttggttacattaccacttacttaccttttataagtgtttatactttacacagcattataggttatagaaacagtctaatttataccagacgaataagattaacatcttttttgataatcagattttgggaaaatatgctatagagattcagaatggccatcttatacgatctattttcaaacacctaatagattcctagtagctcggttttgaaaggcattaattgttgcttgttagctttacctgtacaactgagtaaatactgttggtctataatgttactttgtactaatgaatacacatacactttcttaatgttgacctgtgcccctgattgcatgccatatttgttctattttcacagggtggccgtggtagttctagtcataagggtggtctcaataaagctgctaataaggctgcaaaacaagttgcattggcttttgccaagagaacacttgcccggtgccagaaatttgaggaaacagagaaaagctgcttcagagagcctttcctttggaatgtgctgtctgcacctttgccaaagaatgatgcaatagatggtaatacacaaactattgaacagccaaacaagttgcataaaacccagttgttatgttacattaccatcaatataattttctctatgcttcaggtggtctcccaggatctgcagataggccaaagcttttaaagcttgacagaagtccattgagccaaggtatttcactgtttctagcattcttcaacaaatcctagtggaatatggcgtgcagaccttaagtagggatcattaatgtactacttgatgtttgttagaactctttcttcaagagagatgttaagcttctgctgatccttttccaggtactacaaaatggaaaaagagtgaccgagaaagggatcaaaacagagacgcgtctttgaagaattctaattcgaaatcaggacgcaattcgtccggcaatgcaaggagtgagcgtaaaactaagataaaaccgaagcaaaagctagcacagttgtcgacatctggaaatgttcttggaagagttacggagccatcaaatttcgcagcacccggccagagagaatcccatgattggacgagtacgtcgagcacaagacctactcaaccagtcagaaacagcgcagctactgttgcccaggataccttagatgctccattggcaaatttgcctgcaatagatccaatggacatcttggacgtgcctgaaggtaacgacatcagttcgtggtttactgatggtcttgatgattccttacaagattttgacttctccggaggcctagaaatcccagatgacgatcttacccaactgggattcatgtaaactgaaccggtaaatatgtacatgttcatattaattttaagtgttgatcctatgttagcactggcattgcttggttaccgtggtaacggtgactgattagtctcttgtgcccctaagggcagagcttgcaagttgcaactaggaattgattcatttatatatagcgtaaaacttgtagtcgccttgtcgcatatctgcgaccagattattggtcgtatgatgttttatctttctttggccaccaggaaagaaagccagcgtttattcacaaggctctctggagcatttgtggcacacgtcttgatatgatacgagtattaaaactaattagtaataaatcctctgatttggcggagcggacaaagctgtccgagtgcatttctcaagcagttaacagctaaacataagatgagagacgatgggttgtccctccctaggcagaacatcaaatttttgaggtttttttttagagttgaggggggaatgtctgagtagaggagaagatacgcaaggcatgcaaaaagggaattgagaagacaggagaggtggagtagtggtgcaacccacgtctgtcccctctctcgctgcagcttaactgtatctccgatccattcgatcgacgaccaaccacctctccataatatatccactcgtcttaattagtctccaccaattctctctttctctctcaattagtctacgacatttcgttctgtcctcgatcgaattaggaggttcgttgaagaagagaggagagagatcgaggtaggatatttgatatttctttcagatcagtaggtggcttgtcgcttgagcttgacaatggacgtggccggcggcggcgaggaagtcgaggaggtggaggcggttgacggcggcgagcagcagccgccgatggagatcggttggcccaccgacgtccgccacgtcgcccacgtcaccttcgaccggttccatggcttccagggcctccccgtcgagctccagcccgaggtcgccggcaacgcccccagcgcaaggtaagcgtcttcttcttctccatctccggcggccggcgcggcggctgacaactgtattattattatggatatggaatattgcagcaagacggtgttcggcgtgtcgacggagtcgatgcagtgctcgtacgacgcgcgggggaacagcgtcccgagcatcctcctcctgatgcagcggcggctctacgagcagggcgggctgaaggcggagggcatcttccgcatcgccgccgacgacgcccaggagcaggcggtccgggagcagctcaactccggcgtgctcccggagggcggcgtggacgtgcactgcctggcggggctcatcaaggcctggttccgcgagctccccggcgggatgctggactcgctgccggcggcggaggtgacgcggtgccagtccgccgacgactgcgcgaggctgtgcgcgcggctgccggcggcgaaggcggcgctgctggactgggcggtgcagctgatggcggacgtggcgagggaggagcggagcaacaagatgggcagccgcaacgtcgccatggtcttcgcccccaacatgacgcacgccatggatccattcaccgcgctcaagcacgccgtccacgtcatgaacttcctcaccatgctcatcgaccgagctctcaacgacgtccaaacctgcaacaactgatccatcaatataattaagcccaccatgcatctcgattatatatgatcactttaattatagcacgtaattacattgtcattcattcgtagcagggttaattaattaagcttaatcaaaattgtttgttttagtttcattttactttcgtccattactcagtttaattactactacatgtgtcgagagctgacttcttgggtctgactgtacgtagcatcgagcaaatcagctctgtcatgaactacatgcatgttaatcattttattccattctaagagcgtacctgtatggttggttggtctgttaatttgacgtttgagatatttgtgacttgtgagtgcatcaattctcagcattactgttcttttacttgtacagtaatataatcgattttttctacgcctgtttcaacaagaacttaaatttttctccaatgtgatgagatctcgctggtttattatatagtttttgaagtaatttggtgcattgatggcaaagtgcgtgtcttggtaagggaattgggccttgcactcttgcagccgcatatgggcctgatcatcaaagaagacttggtataggcccattaaactcaactgaggcctatcccgggagagtgaaaaagagcgggaaaattagtgatgacgccggattagagggtggtcttcacactaatgataaaaaagaagtgctggtcaatcgtagttttaacaggcacagtgcacaaacagaaataattgccacaagccagctgcgtgtgtcaggactcaggagaggcaggagagggagagagaaaggggaaatcaacctgtccaggagagggctggtaataggaataaaaaaaaaaaaaccctccagtgttcgtcttcgagagagagagagagagagagagagagagaggggggagaaagcgtcttcttcgcctcttctgcgtcctgctctcctcgccgcatcctctcgcgttggtcgttcgtcgcgctcccgttccggaggtaatcctacccacctctattttttttttatttcggtcgatctgccgtgcggcggccgaggcggttgcgatagggatagggcgattctccgatcatgggggtggcaggccggagatgaggtcgccggtcacgcgcgcacccaccagtagcacggcaggctgagcgctaggcgccgagctcgagcaagactgcgcctatctaggctcgagttgggtatgttggggtcggtcggattcggctcgtccgagcttttctcgagctgtttttttttttttgggatttgctattaatcactagtgtgaaaaattttgggtttacactcaaatttctgtccacttgatctgtctcaagatctttgctgcatttgcgggttcagtccgtgtttgggccgcgcccgcttcgtagttttcgtctcaatcggcgcgtctattccttttttttttccttcttgatacgcggattctccaaacgatagctccgccggagaatctcgtcggcgatcggcaatgtctcgtggcggcgggctgtggcgacgccttggcgcttggtgagttggccgcccgtgtgtgtgtcacaagtcacaaccttgaatgaagttatcttccttggctgccggtgaggtcaagtggcaatggcatagacgccggcagccggcgagaaagccacggcgttctaggggtagttgacgaggtggtcggtttgctgctgtggctggcggcaaggcacccacgccatttgcagcggcaaccagtgaggcaaccatggaaacttccatggtaagtcacgttctttgccccccctgttgttttgctcttgttgacgaccatgagagcctggtagatctaatgattgtgtttttctccccctctaatctgttgctggggatggagttagaaggtttgtgatagctagctggataaaatgatttgtgtattctcctcagatctgcttctcagaagaatggatttgtggaggttgagagagtgtcagcagactagcatttcattttgcaattaccagaccactagatttctgatgtgaggaagtatcattatgtgaacggcaaagcattttgttgctgccccttttttatctttatgtcaaaaaaatctagtggaattgggcagcatacatgatcctaaacattagaacgttttgcatgttgaaataaatttactatcttgatttagatagggtgataatttttgggatcagttttctatacatacctttgtgtccctatattttttttcttaaaaaatatttgtttctataaggtttattttcttggaatgtcttgcctcactacaagaaacagaatgtttccaagatcaagcctttcatgcagcacttgcctgcaactaggactgtagtaacaagttactccctccattcttatttagttgttgatttgagctaaaatacactgaccaaagtagcacttaatttttagtattgtgacatgattacctctaattactctccctgctaaaatacacgttttgcatttgtgatactataagcacttgagcatggtttatttgacaaattaattctttgaactgcattctcccgatggttgtcatgttcatcgaaatttgttcagttcccaaacaaaagctttgttacatctaaactttctgttttgcttttgctgtttgccttctagcatttgtttgttctatatacgagcacttgaaacaactagctctgttagaatgttttgcagctaaaactagttaaaactagttctcgttttgttcggggaaagggcgaggggttgaggtttgacaatttctcccccttcgtagcttccttaatatagttagtattgttttctacgcatctaccaagaacaagaatacctagttttgtaagcaaatttgaattaaagttagataaggttatgttctgtttttgttattcattctccctttttatcttcctttgttaagagtcgagtgcacctgcatttacagaggttttgattgttgacattgtagtagttttgtggattgatttgttttgtttgaacaaaattagattgttttcactgaaacatgattagcaaaaacttgtttattattagagatgtgtacttcttctaatagtactttgtagcagcagaagtaggggatcaagttagtttaaacctaaaatttgttctgttaaatatttcattaacagtagaaatgtagaaatttgtgttctgtgatccaaacatggaattgttttgttatttggttctagttttacctaatgcagtggatgaagaaacatattgttttttttaaaaaaagttgcttagttttgtcagccactaaaattgcttagttctgtcagctcttaatctgaatttgatgagatcaatgattctatataatccatatacctaatttagcactgagcatgactacatgattactcttgttagcaaatttcagtcacgtggcataattttggggctgtttgatagccctatggaatcggcatctatgaaatgacacacatccaaaatttctgccaacagttcattttgtgaacaaattagaagaaaaactatagtgaaagggaacttgcagtgggggatgaagcacaaaacaaaccattttggtatcccagatcacagcacaatagcagtcctactcaatcaaaagcatcttccaatcttgtaatgtgcattttgtgttctctcttatgtttcctgtgaatcagtcaccaatgatgcatatgcaagcgcctcaagcatgctcaaaacatcattagtatcatccattagtattgaccagatagtccttgctttgcttctagctagttgacagtgcatgcatatcattgagagaacaaaatctgcttgtcttctattatctatcagcgttgatcagcaacaaatcctttgttgttacagtacctagtatatacctgttggtactgtcttttgctagtttatcttactactagttcaaatcattttgcaatccattcagtccatccaagtctattgcatccttcaatttgtcgaagttatgtcaatccatctcttcatcgtcttttctacatcaccaattccctgtcagagttggctttcatcatcaccagctcccagtcggagctagccttcattgtcacttcatcatctccacgtcggagcttctcgtcatcatcatcatcatcatcaatcagtgaaggtccgaagaacaatttgtgaagggccttcatcaacatcaatatctcatcatcagtcaaaggaccgaagaatagtttgtgaaggttcattgtcttcatcatcaacaacatctctgaatcaatgaagagccgaagaacggttcgtgaaggcttcaaggtaccgagggccgaagaacagtttgtgaaggttccgaggtccacttcattgaggaggggatacatcttttcttcttcatcatccaagaattggctcacttcgacgacatcatcaagactttggagataggctaatatttagtttgtgttctcttgtttagttttcactccaaatgcaatgttattgtatacacattacatttgagtgggggtgttaagaatatatgtattagtgtgtttgtgttaaggggtatttctatctttttgcgttgtactcttctcaacatattagcccttagggccaactcaatggatgaatagttcaatccccaaatttctctcctctctcaagaattcacaagacaatcccttttctttagaaaataaagtcggaaattttaagctacgcgggaagcctctggcagtttaggcccctctcattgtcgataaactaatattaatggacacttatatttattttgtaggatgatgaatagtgatatccaaacccgcaaagaattcttccgtaaggctacatcatatggagaatgcatagttttggatcataagcggaagttaaaggattttgatggaagtctcttggatctcagtgaagctgaatatgctatcggaccactacattcgaaatgtctcgtaaaatattttgataaagtggatcgtaaaaaggcaaatgcatattctttgctgaaaaacattcggcatcataacatcgtgtttctaaaaaacttttttgatggaagtggccaacccagatttgtatttaactgggtagatggaagcatgagtgcatgggttaaaaccgaaggtgccaaagtacttctgaagagaacagggacgggtacctgtcgaaactccacaatccgtcagcttgtaaggtagtaagttaaaaaaacaatttatggaataacacgttgaatagaatgaacaaaagatgtgttttctttcttagggatttgtgcagtggactggaatgtctatttgagcatggtatctatccaattcaaatcactgccaaggacatctatgtgaaaaaagttgggaaaaatgccttggcgcaacttcttatcgaagaaggtacctacccatatataatgcattttctgctgctctgttcccttgaagaaatttcctactgtaacacgtttttgactgaactagtttaccttcaatctagcttccatgccatgattgagttcctctctaaaatatgtttgtgcagctgaagctttgccaaaaagtgatgctaggaaaaggcaaatccaggcaaatctttggcatgaaatgagagatgcggtgaagaaaatctttgctgatcatgtggattcccccaaagacatgcccctcgtgagattccttgattacattgcagagggcaatgtgaagacgctacagaggtatccgttggattgggatgaaactgagaaggggaaatacttgttgaaggtcttgtgtatgaacccacataaggtagagcaggaggttaacaacctcatacagtggccacctgtgacctacttggggaatttaccatcccctcttcaggagatgataagttatgaccaaacaagaagccacccatctggttacgatgataagaaaccatatcactacctaaagctgtgcaaaaatataatcaagcattggtggctattgccagaaagtgttaaggtagtgaaaattgaaaatattcttttctataatttttttattctgatccttttatgtgtcttacaccttaactttaataggtggaatgcaaaacatggcaaaggctcatccaaaaaatggaaacatgggatcctaagatatggtgtaagctttacgagacattcggttgatcaagcaggtacttatgctccaatatctatataatataaccttttccaaaacttgttgcagtagctaaggtaatggaaaaaaagatggaatttgttcagatttagagagcaacaagtggatagagggctgtgaaatggaataaaatccaacatggttgtgaaaagatacaactgaatggggaaaaggacaaactcatttggactttaacaaaaaaatggaatgttcacagtaaaatcattctattctgctatggaacttcaagaaagtggctatcgttttaaaataaactgtggtaatttaagatgccattataatcaaagtgttgttgatgaggagttttgctctatctcttggattgaatttgacaatgtgtcgtagcttgctgcttgtttaagtcatctaggcagtcaggctatcagtaggggtagatttgagggtcagcctcttttctgctttgttcaaactttgtagtctcatttctgatatatggaaatgggaggggctgagctcctcttgattaaaaaaaaaagtagtaagtacttatgcacccctgttccatattttatcaaaatgttctgccacacgattccatgtaaatattatagttcattctttgttttacaggaaggcaaacgaagctgacgatgggataggcatatagcatgtttttactccagtgcagcatctgagtcgccctcttctttctttctttgtggtcccatctgtcttgaacagccagttatgtaatgttactccagaccaggatgttcgaccttctgaatctgtgttcttcttgttagtaacaccttgctttagtgttaaactaaaatgcttgacacatagtttgatgattgatggatgacttttttttcattgcctgaatattttgtgttcgagagctggaagtctggaactattcagatttcagggcttcgggggtacttatagtacttcttacttacatcagcgttatactattgctgtgctccagcatttccacgatgttattttgtggcgtgcttcttctggcgacattgctccctgttggccatgacacatgcaaattaaccggaaacaaaatacggctaggaagtatccgcggggaacagtaaatgggctaggcgatttgggcttatcgagcgggtatactagaggatggggcgcgccgcctgtaaatttggaggaacagctgaaaattattaaggtacttaggtaactaaacataccagctgacaatgagtatctggttacaaacatggaataaacctgttgatcatccagtttcttacagtgagtatgaacgtgatattttcatgcataacttactcgtacaaatcatttcatgtatacaacaaggtagaaataatagaaaaaatattaatcttacagattgctttaatgtctgtatagtatgagcattggttacaccatgaagagcgatgtcataataaaaagtcatattgaattagtgaattggtcgattcttagaaagccagacccatgcggtcagattcgtgtggatacactcagcgtcacttcatctcttgaaatctcttcagtaaaagatgaaatgagacattagtttcatgagcatcacatgcaatcaccttagtaacactttggccaagttagcacaaaaatgaaaccatgcacgaaagaaccttgtttccaagtcaatcgatgtgagtgctattatagacgatccatgtttcttccacaataacatacacaacctagtgattgtgcaaatgctacaacgaagatctatatcaaccaggacgtaccagaggagatataagaccggtgcggcgggtagacctaggagggcagacctaggagatgcgcagaaccaagctggcgagcagtgggagctccttgtccagccagccgggctctgggaatagtcgcacggatatcaactggctcttctccaacaacatggacctgcattttttttcttcttttagccatcgaacaattgacatgagccaagattcaatcaaactaacaacaaatcacacataattggatcaaataggtgccagatttgataggatcagggcataggatatgttagcatatttcaattccaaaatcgtccatatagagggcaaataattcaacataaatgatgagcttaacaacaatagggaggcaagtaagcaatgaaaggaaacactaacctgcatagtacatggaagatatttcccatcaaatgtgaccacacgatcttttccatcagcaccatgtaccttgtttttccatcagcacctacctagtcaaccgaacagtagaagtcgatagctgacatgctgcagtaggaagcaattaccctaatgcattattttttttgcaaaggatataagcatgtcgaccaaaattacacagtcagtagcctttaaatacatactattagtccgcatcctaatactcacatttccacctgttaccaattaccactattgaaagaatatagtgattgatctagacaacgaaatactgaaaccccaggggtgggtggctttatataattttttgagtgaaaggtgcttactttacatcagttctcactatatacaaacctaagcttatcagttcattaaccgtatcgcgtgactctgtattacatggacaaatagaaaatagaatgcaataggcagaaatcttacatttcattgccaaacttctcatcgataatttctttgatgctctccacaaaatgtacaacagatttattcaacctgtgtccaatatataataaaaaaacctattaatatgaattgccatcttgtgtatctaagcaagaaagcagactgatcaacataatctattagaaaacaaatagaccaaattagaatccacctagcttatgaatatgatagcaccactctttaatctatcttaagaaccgaaggaaatcaagcctagaatatagatgacaatcaaattttagacacagagaaagatccttttgttgcgtacagtgtactacgctgccaccatcacccataactttatgtgaggcaccgttgcttctagggatgaaaatggccgaaaacaatatcattactttattgtttttgacggaaacggtcgggaaatttccattttcttgaattcaactatttagtgtcaacttcaatgccactctgacaaaaattggaaaagctaaattttagacagcaacagtcagtaaaattattattatcatattagttttgcggaaacggtatcgatgtggtcggaaaatttccatactattttcaccctagccgcttcactacttctactgcttacctagtcctgactgcaagaaagcacaactacattcaagataaccaatcacacatgtcattgaattcatgatttgactaaagatcattttttttatgaattaaaatcttagacacaaagacatgaactctacctaaatgatactatagaattgcttggaacaaattatatttacgcatacttagttattagtaaaagctacagaaatgtacagcaattcaacatcaacataggtgggtttcatgacatcagtttgaataaaaaaaattgacgtagcaaatgcctatattcaaaatagtaataggtagtaatatggtggaagaacaacattaccagtgcacaaccctctccgcagcttccaattcatacatgtaacaaagcaattgtagcttgcatgctcctcttctcatcaggccttcctcgcattgcctgtcatcttgacagtgacaagaacctactctgccactagcacgcaagcctcaaattcatcggttgaccaacataggaatcagctactggattgataatctagttcaatataattatatcttatcagctagcatacaaaagcacgtagatagaaaaagacaaaagagcagataacttacaaaaaatctataaatctcttgctgcaggttgcaccacctatgatgaatggctgaggatacctataatttttttttaagataatagatgcctgtaggtagcatcctccaatccaaacatagcttttaaaaatacataaaactggaaggtatcacaaaactcaacagtaactacttcctgaaacatacctgaatcacttagtaagaaatccatccccaccacactatccaacactgaagatttaccaggattctgttgaccataccagtaaagttcaaatgtcaaattacaacattacttttccaaccatgcatataggaatgcaaacgtgcttaaaatattaatgaaagcagtaatctagttgagaaaatagcactgaactctgacaagcttgacttggagtggcttgaagctgatttccatgtctgcccggtcgtccggcaaactcaccagcttgctgtcaggctgtgacaaaatagagaacaccacaaatttgcacagtttgcatagaaaaaactgaccatttggagaaaatttgcattgcaaggtggtaaaaataggtactttggggacctggccaaggtcctgcaagaacttcttgataggatggccatgatctctttccaatttgggctcggtgttgtgatgcagttaacaggctaggaaaatgcatcaatgaatgaccctgcatttattaatatgaaagtcagttgtaatgccactttaatctttaatatctgcaattgcttgcctctgcagctcactgaatcaagttatggaaaagttcttcgcaacaaaactaaaatgttctagccatttaatgaactctacgaagcatggattctatcattaaaaagaagtaaagatgtaaactgtgtataaaaagaattgcaatacagccaacacattcatagcgcatgacccaattcactcaaagcaaacaaaggaagcgaaaagaagatggaaacatatgcaaatgcagacacatgcagcaactgaaaccaaaaaaaaaaagtccataaattggaccacgagaattccccgtcagctaacaatcaagcaaaccactgccggaatcaagcaaacattgaactggccagctctttcttacaggaattcagcaagagaaaaaaaagaaacacaaaaaaatttaaggaacacacaatgacagttttacacaaaattagggagggtaaaaggaagttatcttaattaagtaaatataaggcataaaataaacaatgtaaaattatccttgtcctgaaaaggaaaattagcattctatcgtaaatgcaacatgtagaaacttaaaattagccgcaccaaaccatgcctcctagaaaaatgactctttgacagttattggtataatacccatcacgatacttcagatgagacagggatgcaaagtataaacaatatatctacatataatagctaagctcacctacatagaatggaaaggcagaaaacaatatcataagcaagtccagatagcagtcatcacgtcaacaacattagtcatcctgcttgatctgaaaaagaaagcaacaactgtttagcatccaagaattagactgatgttcagtctcaaatgcaaggaaaaacactaaatgggttactaatataacagagcattattctagactatttccatctaagaatatattgcatcaaaacagaaacaaggtcgacacatgaataatttcttagcactgtagtgatgtaaatggaatctagtatatgacacaatgctactggtgtaataggacatcctagctaggaaatattactgctgccttctaatcatcaccgaataaatagacaaattatgtaaccttgttttttccccagctgataaaaaaccctctatacttcaaccaaaaaaactattccctgcagatgtgtagaaaaaaaactaagtagatgatacatcatgatagtaacccttttctcttgtgagaaggcgcctctgttccaatgatatgtatggacctgacattgacaatgatgcaacgcatatcatcttgcaaagattggttcaaacacaagtagcagttcttttttttagatggtacatagataacaaacaataatgatagctctaagatgccaacaagaaagggatggaccaaggttggcacaaccctttatgtgctgctgatcccttctgcccacctacgtatctctcccttattcgtatgctttttatgatctagtttttgtttggggacacagatcctctgccattgtgtgtagtagacagtggtagtagtattatcatgcacaacacatggctctgacaaaatgaatagttggtcatgttcctctcagacaaaaaagaaagaaaatccaactcttttcggttctggaccctttttgctgcctacccatgcccaacaacagaggatccttaattgcttcctagggtttgttttttttttctgttcaggattcatctagttatgcagctattgatccaattagtttgcttattgcgttgtcatcaagctgaaaaaaatttatgtaagaggtttcaggtatacaggcttacttccagttggtgaagggcgagagggcactcgctgaggaacttgatggtgagcatgatgagaaccgggacggagtccttgcgggtatcatgaggtcgatcatggtgtcagagatgagtttgtcggtgagctcattgctgccgtctccgatgaggacatcgatggcgtcccgcggcggccctccttgccctcttgtcctggatgatcctttgtatcagcctcgccatcttcttcttggcctgaccaccaccaccacacacacacatcccaggttcagatttcaaaggttaacatgtaacatctccaattcagtgtcaataaggttactgctgtaagcaaacatgtatttttccacacactgtggttgaaacaataatacaagcatttatgttttttcaaataaagtcctgaaagtaaaatgagcaatgcaaaaagaaatccagatgttttctatattgaaatgttctttttgctacaacatgacaggccttacatcaagaaagttaacacaaagaaggtaaatatgccccaaaaaattatatttccactatggtaaaatttcaattaaataatgtcaaaggttaatcagtgaaacatacaaaatcataaagattcaacctgtgaaggtgaacttgcccttttaccaacaggatgcctttgtctactttgtattaaaatacaaccattgtttaataaaattttaaaaaatgtgctactgaaagtataacaattcccatatgttgataaacaaaattgaagcagggactgccaatataataatccattcaattaatggtccaaaaatggcagcaagccagcaacgcatgccgctgaataaaaacattaaactgaaggcccagacaaaatgagcacctaagaaaaaaagaccatatgcggataatgaagaaccataagactgaattacttgggatgcttgtgcccacaagaaatctcggagccacccattaatcgtagtggaactctgtgcaaagtttccccctgtgatatgagttaccaccccttgatcacttatagtaccccaaacatccgattgcattttccaactgaaatggaaaatgactaccgaaatggaattgtacatccagaatagacataagaaaacatgatcccaggcggatacttgatatgttccccctcgcccaagccaatcgcaagggaagcgaaaaccaagatttgctttatcgggtatcaaacggaaactgcgagcaaataaaacaactttcaaaagtattaaactcaccgcaagttatcttgctccaattgttagcatacactgtgaccaattcaccctacaatgaagaagagcgactcatcaaattaacatgcatagttcctaggtgtaattactgccatagtaaaataaccatgtgtctgtggtgtggataattctgtttagaagttcaagcccatgaattaacaacagatttcaagcacactcatattatcagtgcacaagcacatagtacaattatttctctgcagaaaaataagaataggcagacattttattcccatgaacatacactgacatatgcataacaattaatcattagcagatcaatttttctatctatgttgtccttgagacatgtgtgtaggtgaacatacactgacatatgcataacaattaatcacagcatgatgtttactgtagtgagatttcaattctatgtagaaagatctacattttcatcatattggagtcaggaagggtacaataacagcagcatatgcttagataaatggataaattctggtacctagaccaacattcaaatatactagatactgggacgcgccacctatacacaattcttgttattaattgtttatacagttaaataacatataacaattagaaatgtacaaggcgagagacgaagaaaggaacactcacaattttgtgctgaacttattgaagaaaaaacatatagatacaaaacaaaattcacgagtccagcctgacgttaaaccatgtaagcagatgcattggcttgaaccctccattttcaaccaatttgtagtgatatccttttgggtggggttgggtgtgggggggggggtgcatgctgggccagccagtgtcactgacaaaacacaagtaaaatggcttgcaacaaaaaatatatttccacattttccttcttaagtagcttgcaaaaatatactctagtcagtttatctggtttactgcttcaactataagttaagtcccttaatttgtcaacgaatccgatttcatccttcaaactgaaaatcagatataacaggtatgtggcatatgaagcaaaattaacaatttaaaaataaaaacaaaatatttagacccacatgtcagtcaaattataagattaaaaataatggaccccacttcctccacttcatcatctccctttctcttctctatctcctccccttcttccccagatgcgtggcattggtgagagcggaggcgcagcggaggccggcgagtgggggcgtgacggggagggaggagcttcaatacggcggaactataaaaaggccctaatcccaaccaacacctgcatgtaaccaacaagtgcgatgaccaaatttttcgcacgaactccacagcgcttcacgatctgaaccaacatcccgatcaccgatactaaccaaaacgaaaacgacctaactgcatctccaacaaatcggcgagatctatatttccacctaaatcttccatagcctctcacgaataatcaagatacatttgtgtaaaccaagcagctgcaggttgtgatgataagttttttctatgatccttgtccttgtttgttttggcggtatttgtgattatcagtgatatagatgattggggggggggggggtattatctttatatgatcatcagcatgtccttgttatgttgttaggaatagtatgcgtaccttcaaggtcaacttttggaggagactgtctcagatgaaggctgatcacgagccgtcagcgagcaacaagagactccctgttattaaccataattacaaaaggtaattatttcaatcagcatgagttattgttggctgtgtacatccaatcggatgtagaggccaggttaatcccattttctaaaaaagcatgagttattgttgcatgaaactaattatcagaagcatatcataagagaatatatatgtaaacaattatgtatgtcgcctgagtttgataaattccttctcctccctattagatttatcttttattccactgatgggaagtcttcatatatgtaacattctgaagatttgttcttcatatatgtaacgttctaagaacaattacctctaatcaagagacagcataagcatatgttgttcaatttgcagtaaacggtatgctaccttgacgccccagatgatgaggcagaagatggtgaacaggaggacgaagcactgaagcagaggaatccgaggaggatctggcagcggcgggagatgccgctgtcgccagcgcggtccttgtccggtccctcgtgcgctcgccggacttgcgggccccgtcgcggagggtgccggagaagcggctgacggaggaggaccggagtggcgacaggatgcggccggcgaggacggcggagtggcggcgtgcggatggggaaggcgaggacggcggcggggcggcgcgatgtggaccgggaggggcggcctgcagcggggcgacgcggcggatgggaaggcgaggacggcggcggggcgaggaaggagaaggtagttgcattttttttacttacgcggacgcggaggagacagtcagagcaatgtcgtccgttggtaaaataaaaataaatcagtactctcttcgtcccacagggattttgtgataaaaaaataaaaataaattagtaatcccttcgtaccacaatacaagggattttgagtttttgattgcaacgtttgatcactcgtcttattcaatttttttttacaaatataaaaaagggtgaatagctaaaatggtccaccaagttttatctgaggctcagtttagtccttaatattccaatctatccatattagtccttcaagttttcattttaattcaaacttatctttgaaccaacaactctctttataaatgacacttatacccctcatcattcacatatataagagaaaaattgcatgcttaatttttttatagataatacacagtatattatgtaaaacgaaaaaaaattatgtactaacaagtatatacgatagcaattgcttaagttttatgtgcacatgttgaaataatgggaagtacatctgtaatgttgtttatttatgtttgctttctcttttctagtatatagatgtatacaaattaagggcaaaaaggacattttctaatagaaatattgactagaaaaagccatatgacatattaagtggacccaaggatgatttcaagccaaaacaaatatttgaaggacctatgtggacaaaatgaaacgtgaaggaccaaattgagccttcactgaaacttgagggactaaattagctattcaccctataaaaaacgaaaagttgtgcttaaagtactataaataataaagtaagtcacaaataaaataaatactaattttaaaaaaatttgaataagacgagtggttaaacgttgcaaataaaaacttaaaatcccttatattatgggatattatgggatggaaggagtaatccatatacgtagagattttttgagctggtagtgaaaagtggcaaaataaaaataaatcagtgaacccgaatggcaaatcatccaagtcctgactttgggaagatggcaattggcaaatggagtagtccaaaatcccacactcgtcaggcccgctagggtttcaggcttccgaatccgagcagctccattccccaaatcgcctcttgtctcgcgccctcccgccccgttgccggcgacgagcgctgcagggcacagggtgctcaggctgcagcttcgcctgtccccgccatctgccggacaccaagccccgccccaagtcctagcctgccatccgcccgccgcccgccagttgctgcctgactgtctcaactgttcaccgtgcgtaccctgcaggtatttgtttgtttcgtgtgtatacctttagtttttggcgcagattgtagtctgcagaatcgaccctacttgtcaatttcagggctaaaatttcattgttgagtcagtatgtgctatatttcacattgtttttttgcaccatagaataccgttgatgtgtcaggaaccaaatgattttggttcagacaaattcgaaagagattcaaatatggcaattagctaactagtaggaatcctaacacagcaaataattaaaattgtaatgctgaaattaactagaatggaaggaaatatatgtgtgcgccgcaagaacaagaggggaaattatattagggttcagattcgataaagagttacagccaaaacacggggcttatattgagtacgccctctgctagacgacaacgacgatgacgtccacagtacggcaattcttcccctctgtagcacatcgcggcgaatcagggccacccgatcttcataacccttccaatgaatcggtatctcacaatctcagccgtcgattctactacagctatcccccttaactctgaacttccaagtctgattcttcttcaggcctcacatgatgcgtgtttcttttgctgtaacagcgtagttaagatgaatcaactaccatggagtctttcactaaaatcaagacttctcttggtttgcgatgaaaatgaagtttcaaacatgtattcaattacttttgctgttctggcctgttcatggtgtgaatatcgcattgtaaatcaattgaatgacgatcattccatgtctaatatggcagacatttacccatgaatggctattttgttggtgctcgcaacgacttcctgggttatatgctccagtaatgtggaaacaagtataaaaccttgtctgccgtatgcttttatcatgttaacttgttagtagattctttttcttttttaaaaaaaacatggcagatatcaacagttgcggtagtaatttcgcttcatattattcactttcttcgattggtcatcttgagtggtttcctctttcttggttacattctgctactgtgttgttccttcatgcaagtgtactggtcatctttttttcccataatgatgtttgctgaattaactaggagcttagcctgttgtgttttgtgaatgtatgcggaaaatgaataagattttgtataaaaataatgaactgggtatttttttttcaaccttctgagtcctttcatgcaaacaacaataattgttttctcttgataacaaagcatgaactcctggttatcggtctgtaccttgttcagtgcctttcataattagtttaagaatttctaatacactggatgttttagaaccttccattactgggagttgcaaaagttaattggagataatctaaatgaatccctttattagtgttgttctgaaaatagaaatgataggccattttcttttctgcagtttcctaccaaagaaaggtgcttaacaatttgttgtcacaaaccagaatggccccaggcacatcaggtagtatgcccacctcttaaatatactgcatattttttaatgtcttagtattagtatgtacctttgcatttttgtgcagcacaaatggtgataatttaagcttccattagtgaaaatttcttgttttagagaattagctcgtatagaaaattataatgacttggttgtcattgaaactgaagttcttttaaaatttactttaggtcagccggagagcaaggggcagaaaaaaacggtacaagtctaattctacctcttttttcatataaaactttcactgaatatttttatctagcaagaaagtatgaatttgcagattaacattggttatgaactggcgcatcaagcatgggacttcaaaatacaacaaggaagttgcagggcaaaaattccttcaaatataccgcggcagtatgatcctatacagaaccttgattctgtgttaatttttgatttgatggataattcaaatgggcttcactgcttggagattatgacaaactgcctgcataagaacatattgcatgctccaattgttcagaagaaggaggatgttgactgcatttctgtatggcatgagccttacacaggcaatcttcttgcatatttggaatctactttgttaggggccaaacatatggttggggaaaaggttgtgctcccaacacctgtgctacagaatcttataaggtgtgtctttgttgccagctttacgtaatgcattaagatatataaagtcatgtaatagtattgttgttttagtcaagtttttgatggattgaagatgctgaggctctgtgggaaataccatggaaactttacacttgagaagacatactattacaagaagaatggaaatgaaatcattgtgaaacttgctaattttgaagttaaaggtaatgcaacctatcgaccgttgagatacaagatcaccatttagggtagaaacaagtagagatatgtaagcacattatttagatgacgttttcaatataattaatgtttcaatttcagatcaggtgaagtctactccagtattgcaagctaaggactgccaggctgttggtgatgcactcagaaagatctcaaagatggctaaagatcgaaaagatcttgattttgattgcagtcaaattgatagccttgctgaagaacttagggagttttccttgtaagtataccgtgattttctagagagttaatatcagtatatgttccttgtaagtatatgttctgatgtgtggttaacttgttctataatcgcaaatctttaaatttcaaagttagctatgcctattgtgaactgatgcttgagtacctgtctatagtttatctactaaacttttgctttgatttgaatcatggctgcttttggttagtcaatgctcttttatctgaggaatcaattgatgattgtgtaatttggatggtcttgagtgttcctaattttggctaagcagttcatattcagcaatagcatcttgctgtaaaaccaagaacaatgtaaatgatcattgtttcgtactttaggtagctaactgcatgccaaggaaagcaggttcctcacaaggatatctccgaacttaattcctaagtttgtgaatagtagattttagtcgtttattttaaaggaggttggtcaatctagtttagagcgtggaatgtttcaatgtcaatggtttttgtttatttccttcaataccgctcatggatcaagaaggcttatcttaccgactttagtgacttaacaatgttttctgcagtggttgtttacctgctgtaaatattgctgatagcttaagtataggatagagacctagatttcatgattgaattgtaagaaatctgtgcttgaattaagtgatgccaatgtgttggaatggccctggcttgaattaatatgggccatgagaaggaacttgcagctcttcagtgtagctttcatacgcttcaagtttgtttccaagtatattgtgagtttgattgtgacaaaacaattggtattctaaaaccaatagcctctaggtgaaagcgaaatacttgatagttgaagtgaaacactgatgacataaatagcttaacaatatatttttttatgcgtgcattcgtaatgagagcactctctagcaattaagagtttaatgactatctaaaaagctatattcatgaatggtggtgctagactaatgatatattgtttattttatagcggggatttatgcaatattgagaagaagattggaggccatcctttcttttgggtttttgatgataggaagttccttttgacttgctcgattcctttggccatgaacaaacgcgcatttcgacaaaagattgagggcaatgaagatttgattgctcttccttgggacaaagaggactatgatggattaattaatttgatgatgaagtacagggcagatcatatgattaaaaagtttgatattaacagcagagttgactatgtgctgtgtgtaagtggaatgtatgctcatgaaaaggagctgaaggtattacatgttttaagcaaataaattaacttactttaattaccttctggttacatgcttgcagtaaataaaatgaacttactgttgtaaattatagaccaacattcaggtcgatagagtcatcatggagagaaaccccggcctttgctgtcgactataatatatgttaacatgactgggaggacttcagcagacatgataatccacactgaaggtaatgttttcaggtttctttcccaaacttgtaaaactgtagtggtagatgttcttaaaaaattcattatcagagcattgctcgattagtttgtttagcgggcatgggaactttgtttcacctatactttgtttctttcaaaagataaatatgatgggatcatttgcagctttgttgtttgcttgatatttgttgtgtaaaataacgtctgttgttgaagaaacgtcttgtttgtcttattctcaatggctcgagtgtcctgaggttatgggcatgcacattattttattttagtaacatatctcttcaacacagatataaccctgggagctgtgcgagaggtaggcatgaagtctggaacaatgggaaacagtggcttttggttcctacttgtctttgatagagctagcaggaggcgaagagaaacatagttaagttattgataatttagtatttgcaaaagagggagatgcaccactaaagatcttataaagattggtactgttatatttggtgctttcaatattttcttggtaatctatagtacaatgtccgtgcgttgcaacgaatgaattggcaattgcaattgtatttaagcagaaaaatgttaagagtaaaggtaatgtgcgacagagtgacattaagatgcgttcattcacatggttttacacaacactattagcatttcatctgaatatctctgtattattagaaaccgatccatcccaaacgaaaccaattgtataaacacacacacaaagttgctaatatatgaccatccaataacttggcaatgccaaaaaatgttagcaaatttgacttaatttgttttttttttcaacctgtagaaattgaattttaatttgcatgtttgtgaagtgatatgtcatatattaatttatcttgtttatttttttcaattttttataacaatttgcaaacaacgatgaaatgttagtttttttttttgagagcgatgaaatgttagtttatattataatccactcctaggaagaaaagatgcatgttcactgactgtagggctatcataatttttatttatttattggttgaagtgtcacgttttaattaaaaaaaatcaggtatagtactgctgtgggatctcgtcgtacgctggcaataaatacttttacttattcatcatgtgacatatctaagagcaggtacaatagcagactataagccagttataaacatattttaaagagataaaggaagagagagaagagcagcgggctacagatttgtagccagctgcagcacggactccaagacgtaatgtaagtatgacagatgggaccagatattaatagtatagtaagcaaatattgtatgaattggctattacgttggctatagatgatttggagctagtagtgggctatactattaaacttgctgtaatgatgcaaaatatagtttaacaaatgcttttattaatcattcatcatgtgacatatctaaggattcattcataatcaacggaatgaggtcgatccgacggctccgatcgatatcaaatcgcacacctccctcctccccaccagtatcgtgcaaaacacgtccccatccaactcgcggcgcagatcgcgcactctctccctctcgatcagatcgcgcgaagcattatccgagggctatctgccttgaaggccgggaggatttggagggttggcaatgggagcagtatagatatatgggaggatccttggatccctgctggagtcacccgaagaccgataactcctcgaagaggcactgtgctgaacaaggtagctgatcttattgacccagctacgggctggtgggataaaccactagtggaggagattttttgggagtctgatgccaggaacattctggccatcccggtgagattagacacaaatgattttgtagcctggcattttgatacaagaggaatgtactcggtcaaatctgcgtaccatgtcctggaagatcaaagggagagatcggcgaagaagcaagagggcggttcatcctctggagcggtgaaccagcggaatttcgagtgggataaaatctggagtttgcaatgcattcctaaagtcaaacagtttatctggcggcttgcccataacagcctccccctgaaactcaacatcaaaaggagagtaccagacgctgaaactctatgcccggtctgcaaaaggtttgatgagaatggtggacactgcttcctgcaatgcaagcccatgaaactctgctggagaattttatgccttgaagatatccgtttaagcttgactcagcttgtttctgctagagatgtggttcagaccattttgaagctggagaatgatcgaagaatggaggtcttctttcttttgtgggtttggtggtatgcacgcaacaaggtgaactcgggggaggacgtaatcagagtggaagaagtggtccacaaggtgaaacagctgatctgtgatcatgcctctctgcgcaaaggaaaacatcccaaggtgaatgtgcaaagaaataagtgggttccccctgtagatggtaatctgaagctcaactttgatggagccttccgagctgtaaacaagtctggtggttatgatttcctggttcgtgaccaccgtggatgtgctgttcttgcgggtgccggctgcctggaacatgtacatgatgcttttgcagctgaagctgaagctggtttagcaggcctaaaatctgctatttcgcatggtattaactctgtccaggtggaaactgattcaccatcctagtgagagcctttcactctcatgagtacgctctctctccttgcagttctatcgtaagggagatcaaggatctcgtccatttaaatttttctagtgttgtgtttaattatgccccgtgatcatgtaatgtggctgcgcataagttagctcaaatgggtgtgtgctgggaattgggtcaagcaagtgtgtgggctgacctgtccctgacattgtacaaactattgtggatcgtggtatcactgatcctagtatttaataaagcgcgccggtttaactcaaaaaaaaaaagatcgcgctcgctcctcctctctcagatcgcgcctcgcgctccgccgctgcatctccgacgattgtcgcctcaaccggcatcacccgccgccgccgatccggtttcccgccctcctccaggtcgcgcacctcgcgctcgacctccgccgcgccacctctccgacgaggcgacgactgcctagtgcctaccgccgccgcgtcaaccggcatcgccgatccggtctccctccgctgtccctccgccgctgaagtctcctcagactccgcctcgccgatcccctcctccgctgcatgcctgcatgtcgcttgaccatcccgcggggcctactcgcccgcgagctcctccccgctgccatcggacctgcgcggactcccacgaccaccacggtgtgagatgacgccgctggcggcgattgtgttggccggtttctaggagctctttgattcagtccgccgctctccatcttttcccgtcccaggggcagcactgcagtattcctcgacgagcaggttctgcttcgagcgtagagcttccggtgggggttcaggggtggattagcatgtgccttcatgagtcgggatgtcagacggtaggaatggagcaggaggagaggagaacctgctgatccagtggagagatagcaatctcatcgggaacagcgtgctgagcaggtatacctagcatggacctcgattcctacaaggggcttcaagtttcgagcaataggcaattctgattggatcggtcttctgctttccttttggtgcaggctttgatcagaaccagcaatgccacagaggagaagacccaagtgagtacgtttggtcagtttcttgtttgtctttattttcctcaccaactgcgcaactgtaaatcttaatgctcttaattatttgatcccactcttaagtgtttttcatcggaaacttttgattagtgacacataagggagcttaaggatgaagtgaagctactcaagaacctctcacattccaaaatgctgtgagtacatactagataactacatatggtttgtttttcaattcgatgatggtgtttgatttatctggtatgctttgaacaatgatatattggaacagtatgggaggagaactcactaaatattctggtggagtttatgctaggaagatcaatacaatcattccttgggagggttgggccattccatgaggctgtaagtgctaactgttatatatgagcgtcctcttttgatgtgtttacaactaaagaggttttttaactgaatgtatttgtttatcaggtcatcaggaaatacgctaaacatattttgcatggtcaggagtatgtacaccgcaatggaatcgtacacatggataaaaaggcaagcagagtatttgaattttgttgaccctgaacgattttgttgcatgggctagaaagtttatatgtgagattactgtttttttaacttttcagggagcattctactgataaaaaggaaatgcaagacaagtgactgcagtgcttgcaagatgaatcatcatcataattgggtagttgctattcgggttgttgaactgctagacgaaatcaattgtagttgtagtgccatggtagtaatcagcaatcaaactccttgccatgattaatcaggtatgtcattttttgctagagaataatgctaaacaacattaccttatttactaattatctgctagatgtctacggttgaaattttctcttgagcatgattctaaaaagttagttgagttgttcagttacaattgatgatttagcactgtctggaactattttttggtaccaacttatgtgctttacgtgaatagtattggtctttcaaggttgatatggtagtgcattactgttgtgaaacgagaagcttatatatcctgtgcatcttcagtgatttctgagtatttaatcctagaagattgcatatttgcattacattagtttccaaatttctaaagtattaaattatcctgttgatgctggttgcctgagtaaggagattgatgcagattgttaagttcataatatattagagatcgtatatggctgcatatgaaattatgtatttgtgttcaaatgccaatgtcaggtaaaatctgaatgcatatatttttttctatataccttagtttagtagctcagatggtaagatttaaaaaaacctaacaactgtcagcaccgctacttgtaatagatttctttcatgctgtatggtggatttgattttgtaattttaaccattaaaggaacctccttttactgtgggtgggacggacctgtcagcggggtgctgttggtgatgacggggtgctctgaattgatggagctatgcggattaatttagctttaccactgttaagttgcttgcagttctggttctgaacagctttgtgtctactctctcctacagaccacagtttgatagcaccaccattactatatatgttgagactgtgagcatgcacagctctgaagccttttgtagttttgtatgacaaggatcaggagttcaggatgcaagtccaccatatggattgaatttggtggccatgtattttctgtgtcctgcaaaggacgttgctgttttttttacggctgctatgttgctaccttttcagagaaggtattgcaatctatattcgcaagtctttatcagttcacaggtatgttcttatcctatcgtccgacaaatattgttctttcatctttcatattcatgatgaaacatcttttaattgagccacagtgagattgatgtaaactatcagcatacaattaaatgtagtgcatggagtttcagaccaacatattctaacaaggaatactttaattgaaggttcatgttagacctcatagctctctctcatctgtgctattctaaaatgaaaggaaacgatgtggtttatgttctttcttgttagacttcatagctctttctcatttgggctatgatggaattgcaaaattgtggatgcaaagttgattaattgggttattcaaacttcaatctttttttttttgccattggtaaatggcatgcatcatgcccaccaattaattattagttgagctattgatttttactgtaagtacagaaaaggatggccaatttacatacatttttctcaaataataattaagaattgttcggtgttgtgcaaatagactcaaaataataattggaattgtgttcatttgtgccatgtggtgctattgcatctcttatttctctaccatgagtgaatagatgatatggctcttgttgattggaaatagaggatgaattttgctttgaagatctgttctttatgaacacctaaaattctgtaaacagtgcttgtggtgcatcattctaaaatgaaaggaaacgatcgtttcgaagatggtgactgtagtgctaatattactcctagatctatggaatttatgttcattatgtgttccattagcggatttattggtagtcctaattgctcgtttatttcaccaacttgatgtggtaatatgttctattatcatcgagagatggatttaatattgcacttgagtctccagtagagaaaacgaatggtgagtatgagcagaaatattatttctgcacatgactttgaagtccatgccacttccatttacatgactgtatcagtttctgtaacttgcaagaatcaaactggagaaggaaaaacaggagaaagatggagcaactgcaaatttgtgcagtactacgactatatatggatttgctgtgtttttttttttgtgatgtatgttgtaattgatattgtgaaatatttgttgactgtttgtataagaaatcaataatacatgtgcatgtattaattgtgttttagcgtttcagatcgcagcgtgatgagttgttaacaaccatcttgtttattctgaaattgaaaggaaaaatatgaagtagtagagaaaaaaaatgtacgtctcattttcttcttaatcagtttttgctatcgttaattaattatataataaggaaaaatatgtagaaactaagaataaaatatcgtcgtagcgttagcactcgtatctcatatttataagttaaagagaccagctatacgcgatattacaattcaaggacataattttaatggggaaattggttccataccatctaaagttaataaaacgagggacctacaatgggatccgatccgatataaggagtcaaattgaacttttttttttatcctttttccgccgaggcgaaccatcccgatttgcgatccgatttctcctttcaatcgagggttgcccgccacgtagcagtgcggtctctctcccttatcgcttcgcccttccttttccgctctctttcaccgtccccgccgcgtccatcgtgagaagacctaaccctagtcatccaccaactcgatcggagaggagatcggagaggagaggaggtgcggtgatcccgacttcactcggtccaggccttaaatccaaggcaatcgagagaagagatccgcggatgaaggaataaggaaaccgatctcgatttggttcgtcatggacttggagtgggttgcggaaaggggaggggaggggggcctcctcgtttaagaggaagaggaagaggaggacgaggacgaggagtaagttacttgctgccgccgagtcaaggccgagccgaagacggcgaggaggttttgtttggagcttttccgtggcgggaggggagggattcccgacgcaaccgtcaaaaatcttccacccaacactctccaaaggatccaacgggctcgagtggagagattctgcaggacgagcaccgcatagaggagaaggcggagatggcttctagtggagagaagctgcagaagcaccggccagaggagatagctcttagaacgggctcgagtggtcagacaacgcagaagctccgagagaaggcagccactgagaatcaccgtccaaaggagattggcccaagtggagagaagccgccgcataagctcctccgggcaaaggggaaggcgggcacgagctcaattggagtaacgctacagaagcaccgggcagagaaggcggactcaagtcgagggataccgcacaagctccaggcaccggccggcacaagctctattggagtaatgccacagaagtaccaggcaaagcagcagatgggtacctctcggcttggacgccatccaccatgtatccaagtccaaggaggagtaagcaacagagaggcacaagcggccactaccaaccggcagaagcacaccaaaagtaacaattcattatcgacgagggccactacaaagctcagatcagcaacaaacaccccatgtcaaaagcccaccactgccccttcctccaatggcaacactgctcctcccaaggatcgtaaagaacctgctacaaacgctgagaataatgctgttcctgtcgcagagaacaatgatttgcaagaagcggatgaggcaatcaaaaggctgaatgaattgggcttgggagagaatatcagctctgaggagttccttacatacattgaccagctgaatgaacaacctaaaatcgatacttccattgaactggacgatgcacaggtcactaccctctattttcagcatgcgcgctatcgcgtcagatactataaggtcggttcaatttccatcactgctgctaaataaatactaattaatcatcacccaacacatgcatgttttgtactatgtttcctatgtgaatattagatcaacaatcattgctttaatgtttatgtctgtctaatttcagcacttgtcacaacaacctaatactgagttggtagaggattcttaccacatgaaacttgttggggaagatgaactctccgatgagtttattcgcgagatggaattttttatgcgtttcgaggaagatggcacatttgattggtatttctaccctgattactgctggcttgctgctctgaacgactaccaacgtctagtaccgataaactgtgtacgtattacattatattaatgcatgaatagtccttcaattcttcagttgtgtcttggtgttctattttgtcagttgtttttgcaccatcacacataacaagtgtacagatcgtaaatctgatgaccacttagttagaatttgaaatcatcatatatacaaaatgaagatgtctggttggaaaatctacatggcattcaaaaggttaaaaagatgtgtttatttgtttaataatccagcttttatactgctttactattagttttgtggatgctttcatgctatatctactgaattatcgctgcgtaagacaagcatttgctttgttgttttatcagcctctacaagaaactggtcatttttttctaattcaaaaccagagccaacccaattcatgttatttctgtttcttgatactctaggtgctcggtaccttttttctttcttcttccctttatggaacagtttctggcatttctgtaaagagtgctactctgtaattctcctttaaaagaacaaagtgaacaaatctgcatccctttctgtatgaatactagctagtaacttttttgctgcttatttacttgtatattttttagcttgaagctcttagttattgaagtcatcgaattgtttcttcaaaactctaaatcgcgagtttcctcttaccctccttttcaacataggttggtgaggagtacgcttattgggacgactaccgcggctattttaatagctatcatactgaattgcaatatctcgacttctgcaaggcattgtcgaaggaacttaaggtgtgtatcataaaattgaacaaaccaataacattttgtacagcgctttgcattcttctgggattaaaaacgctttttatcttgagacagtggatggaagactatgtcctgaataaactgccatcttctaaggtaaacaagctcaccatacaaaaatgattgaatgagcagtgttatatgttgtagtactataataactctgctgtacagtggggaagaatatgcagcagaggagcctaccaagcaattaagattgccacccgcttttccaagatcactgctgctttggcctataatgcctactatgtacgatccctcacacacactaattatttttaatagaaaaaaggtggtttgtatttagtaacaattccattcctttcaggattgtttacagcacatgcgcttttatgttgcttattgcaaggacatggatagcttgtactttgagatttggcagcgggtcaacatgcaaaaagttagtacttaacattgttatccaggttcctgcctatgtttatgttgtgtatgtttgtttagtaatgcatgcctttttctcaacaatgttcagaagagtttcagagattctttggaggaagtctacaacctcaacaagttcccttcacggcaagataaaatgaaggatgcattggagaataactgttcccacatggaaactgtggtaggttatttttcatggatgatctgagaatttaatgtggtttccaaatttttaattgtgctttaattttattatctattgtcatatcttttcagtttcatgtttgcacggcaagtgttaccagtgaagtaagtactgtatttgtctaatattagttgaatacgtggaatgtgatcttaatgttgatcatgtctgtgtgccttagattgcggaggataaagctctggagctgattgcaaaggcagttgaaagtcgggtactgtacttgtatggaattccattttgttagatggcacctatttctatggaacttcatcatacatgttttggcttatagcatactgaattgaaaaattcctctgcattcaaaaaagaaaaattgtacggaacttcatcatacatgctttggcttatagcatactgaattgaaattcctctacattcaaaaaggaaaatttgtgtggaagttcattgtacatgctttggcttatagaatactgaattgaaattcctctacatttagaaaagaaaaagaataatgaagtgaaatttattttcttctttttttttcagatgaacaaagcaaaattctacgagcagtatatcgaaaagaagatagatattgcccaagctattggattgatttccacggtattgtcttattgctgttgacaattgcacatgagccatgttttctcactgtgaataaccaaattagcttccttcaactaactgtcatttaaaatttacatttgcaggatgggactgaagcaacatgatgtgcttaacttatagtgtttttttttgggagggcttagcttacctttctttttatatcagtatcagtagatgtcgatgccccgccagcgcctgcagaaataaagatcccgaaccaatgtttttttagctgttatgattaattcggtttccaggctccggcccgatcgaaagcattgtaattgataatgttatgtgcgatacatttagcgtacgttgcaatcgtgcctcggagtgattcgacttgctgattcggaagatgaagtttttttttttgcatgaaattgggctatccaattagcttgttgtttgctttgtggtcgacatggatgaatgtgattgtatatagaggctcacaaccgtgtctttgtgctaactgccctagctagattatgcaagttgatatcagcaatttgctgctttataggacactgagaacaaaatacatctacaggagagttttttttttctttgaagtttggtcaagttttttcagttcttttttttctattaatcctgataagttgagacttcctttgaaattgaggaattgcatataagatctctgtaagaactgaactagctctgtgagaagtgttataaaattcttcgttccaaatgagtgctgggctccatatatatatcataaaatttgatgatttgacactttatatgttgccaatttgattgtatttacactcgtgaggatgacatgtgggattatgcgagtctatcacaatggctcaaatagtcagatttttcaatttttatgtttggctcctgataagtcagttgaggcttccttctaaatgaaaggaatttataattctttgtaagaattgaactaattttgaggaagatgttgtaaaaggaggccatagtttcgcttattaatggaataagcgaaacggtatatttataaacgaaaaataatttataaacaaaacttttatatacatgttcttagcaatctaaaagcaaaggctcgaaaataaattacgatgaaaaacccttacaatcaactctttttcaaaattcaaaattagcttataagcataagccaaattgttttgtttcaaatgagcgctgggctctaaaatctgcggtgtggtcagttgagctcatcatctcctccatcctgaggcggcggcgcaacgacgacgacgacgacgatggcgctgctccgcgcgcaccacctcctcctgatgaggccgcgcgccgccttctcctctcgccctccccctctctcatcctccccgtgccgccgcgcccttcccaccaccgccatcgcctcgcgcctcctctgctcccaccacgcctcgtcgccgcccgaagatgcctccgcctccgcctcgccctctatcgtcgccgacctgctcgactacctcaacgagtcatggacgcagttccacgccaccggtgagcgcccccaccacgctttgccgcttcgcatgcatggatgccctcaacctgttcggtcctattcctcaccgggaaggacgcgagtggctgctttgtctctggcatttctgcatgtcctggactgctcgagtgcattgacctttgtgtttaggcatcggtacagccccccccccccccccccccccacatgtgctgtgtttgcttatgctttcagcggaggcgaagaggcagctgcttgatgcgggcttcacgctgctcagtgagaacgacgactgggacctgcagcctggtggccgctacttcttcacgcgcaacatgtcctgcttgattgcctttgcagtaggggaaaagtaagtcagcgacattggcttctgattatttaacttatcactaagaatctgcaacgaatgtggtgttcaaataccatttgaaagtcaatgcctttgatttaggtacttaaacttgctcaaaaggaacctctagtgtaaaacatggccaaagtatttaactgattgagatatttaagctagtggaagaggcaatcaatactatgaaaaattcctatgtatgtacggcagtcagcagggtacacactccagtaccttctcaaaaatgtttttgcctcttcacttcgttgcattcctttcaatttttgaagatatttaaaatctctccttgatatccatggcatcacactgataaatgatatatgcgtaagtgccaaaagtttcaaagaaaaaaaattatgataccgctctttctactccctagttgtaaatggatatttgaagtaaaattattttttggacgcaggtacaaattgggaaatgggttcaatataattgcggctcacaccgatagcccatgtctcaagctgaaaccaaggtctgcctcctttaaatctgggcatcaaatggtaaatgtacagacatacggaggtgggctgtggcatacatggtttgacagggacctgactttggctgggagagttatcctcaaggatgctgatggctcatttaagcatgagcttgtcaaagtgagcagaccattgatacgtgtaccaacgctggctatacatcttgaccggttatttctcattccttcttttactgatctattttctgagaactaggtggaatctatctggtagtatgttctgtattgctaagcaaatattgctagatgttctctctttcagtactgcatcatcatgtaaccctgtcaagttatagcagcttagtcttctttgaactactatttatatctatctcagtgtttggaagttatctctgaacactattgtcatgttcgtttagtgcatatctgaggatcacacaggctactgctgctatcatatttgactgcctgttttaagtttgactttctctatttagctgactgaattccttttgccttttagcacagtgaattctgatgggttcaagcctaatctggagaatcatctagttccacttcttgcaacaaaacatgaagagactactgcaaattccagtgaaaaaaatagttcaagttccactaaagttgtccatcatccactgctcttgcaagtaattgattttatattctgagcacttgctctatcatttaatcagaggtgtactttcaaagtactacagatggcttcaagttgaacttatagcatttgattttctcgctctgctccacaggttctttcagatgaaattggttgcaaatcaggtgaaataattggcatagagttgaatgtgtgtgatacccaacctagctgccttggagggggaaataatgagttcatttattctggtagactcgataatctcgcttcgtgttattgtgctcttagatctctcatggactcctccaagatgccagaagaattgtcaaatgagaaggctataagaatgattgctttatttgataatgaagaggtatgctatatctaatgaagtctcacctgattgctaaaagtatcatgattgataaaagcacatcaatgcgtgctcaagatttccattcccgtttggagtctgttttgatttgtaggcttagagtggctttagatgagaagtagtgctgctaacttatttactgcttgtcttcacttaaattatctctggtcactagtatttgataaaactgatttttttggtagaactatctacacggtattgtttcggtttatttcttgtacttggtcccttcttgttcatattataacctcgactctattcaggtgggttcgaattcgatgcaaggggcgggtgcaccaaccatgttccatgctatgagacggattgtcgattccctgatgcatcaatctatgggagagggtgctttggaacgtgcaataaattcctctttccttggtaatatttatgtatctgggagatcatcaccggcctatagtcctagactaaatagtgcacaaatttaattcttgtttcactttcagtttcggcagacatggctcatgccctgcacccaaattatccagacaagcatgaagagcaccacagaccagagctacagaaaggactagttatcaagcacaatgctaaccaacgttatgctactagtgctgtgacagcttttctgttcaaagaaatagcaagacttcataatcttcctgttcaggtattcaatattttacattttaaccctcaataccatctttttttattgcaaattcccattatgtttgaacaaataagtgtgcttcaagatggataagaatcaaatcatcgtctatctctatcattatcatctattgctagttatattatttctgataggaaatgttaaattcaagaaaaacaaaatcagcatgtgtcatctagaagtctttacttttgtaaagctgatttgtctttagaatacatgaatgagtttgaggaattgcactgatgtatatagcttataggaatttgttgtaaggaatgatatgggctgtggttcaactattggccccatacttgcttctggtgttggcatacggactgttgactgtggtattcctcagctctcaatgcacaggtatgcacagttggctttatccctttttttgacaaattgacccttttcaaaaacttatttcgaaactaacccctgacaaaaacttcaaccaaaaataggtcgtttgctcagcgccaagcgcattggcgctgaggttgggcgtgtcagcgccaacggtcgtggcgctgacatcgtgtcaccgtggcggccgggccgatcccccagctgacgtggcagctatctcagcgccgaccgctttggcgctgagatggccaatctcagcgccatccgcttcggcgctgaggtgggacttagccttttcggccgagtcccgacctagcaggccgtctgtctggctggcggggggggggggggtacctcagcgccagaagaaatggcgccgagactaggcacatcagcaccacgtaccctggcgctgagatgggacttagcaagcttggccatggcttagcccagcaagccttctggatggcttgcgggctgggacgtcagcgccagccataatggcgctggccctgggcacatcagcgccagggcacctggcgctgaggttggacttagccggctcggccatggcccagcccagcaagccttctggatggcttgcgggctgggacgtcagcgccagccataatggcgctggccctgggcacatcagcgccagggcgctgaggttggacttagccggctcagccatggcccagcccagcaagccttctggatggcttgcgggctgggatgtcagcactagccataatggcgctggccctgggcacctggacttagccggctcggccatggcccagcccagcaaaccttctggatggcttgtgggctgggatgtcagcgccagccataatggcgctagccctgggcacctcagcaccaaggcacctggcgctgaggttggacttagacggctcggccatggcccagcccagcaagccttctggatggttgggctgggagctcagcgccaaggcatttggcgcgggcctggagtatgtcagcgccattttgcttggcgctgaggttccagacctgctgtaataagcagcacagctctctgcccagtcctgcttaacacaaccacacatccaggcaataatttattcacatcacaggcagtattcaatcccgacgaaatccccttcgatttgagtggatttgggggagatttggtgaggggagaagagagggcgacgaaccctagcgcgcggggtggggaagaatggaggagaggctggctgggggcggcctcggccggcctctaagtaccaaaactcagcgccaggcccattggcgctgagattggccatcttagcactgtcggcgctgaggtagctgccacgtcagctaggggatcggcccggccgccacggtggcacgaggtcagcgccacgcccgttggcgttgacacgcccaacctcagcgccaatgcgcttggcgctgagcgaacggcctatttttggttgaagcttttggcaggggttaatttcgaaataagtttttgaaaagggtcaatttgtcaaaaaaacggtggctttatgaccatcctttttcgtatttctgaattagcagtaactgcatgtagacagtacttccaatcgttttgcaattcatattgagcaagttgactcctagctatatagggaataagaggtcagtttttttcttacatgtatcatccttgtcaaaataggtatttaattaaattgataacataggtaagaaaaatgtatgcttagatttcacttataccttccccatcgttgttctggccgtgggtgacgcattactgaacgtttaactgctattgtattggtttgcagcgtgcgagaaatgtgtggcaaagaagacgtagatacaacatacaagcacttcaaagctttcttcgagatgttctctgatattgaccggaaactcaacgtagactaacttttagatcttatcagttcctcatgttcagtatttgaatttttttttcctggatcagaataatgaccgtatatcagagtatcagttttttcttgtcccaacatcccaatctaattctacgcatgaccaagaggggtgaaatcattttacatgtaaatatggtgacacatcgccaagctcacttttgagaagatggccttacacatatcatactcagttactcaggcctgaatggcaagttgagattgtaatgcttatattgaaattccatccaaccacagccggatcaacaaatgaaataaatggccatccaaaattgtttcgccaagatcacatcggtaaattccaacattctacaggtgttccagaatctcgccacaaaataacgtgcatacgttctcctacatacagagtgcaactgacctttcattatatatgaagaaattgacggtgcaaccagattggatatttgagtgttgcattacaaagttgatgccaacacaattttcatcacccagtgacccttcgccaaaaatgtcgcaacaaaatctaacccaccggagctcagcttagctcaccttagtgtagtttatggcgtttcttgccccatgtatatgggaatcttgggatgcaccgccgctgcatccctagttgagaaatacatcagcagaatgcaaaatacaatatgcctcctctgctcaggaacgacacctcaagctacatggcgatcaatttctatcctttcttttaccggttaaggagccaccattatgttctgctcgcctctgctcacatccatgagatgcctcggtgggagatacatcctggacaaccccgtttgctgcaggagcttcatggggatgtttgcagtgccctgtcctatcaatacaaagccaaatcctagctctgtcatcaccagatttctcctccataggcacatgccaagatcccatctccgattcctacgatgaagattacatcagaaacaacagatagcaagctctaaagatgcctgtagcccagttacttacctgaatctccgaagaatatggaggtggcatcataagcaccgcctttcctttactaaaggtgtacttgacctaaacaattggaatgagaaacaaaatcaacaattaagcaggaatggtaatatccaatacgtgaagcagtatcactatgttacaacaggataaaggacccagcatctgtttacatggttttaagtttaacctggcactcaaccttttctaaatcagggttctgtggtaataaattatgcagaaagaatggccagtatgttaaataaaaagaagtgcagagcacacctgatgccgttgcttccacttggggaaaaaagatgaccccaagagctcaaatatgtgatctctcatttcatcattagtcacaagcaaacaattcaacctaatcgccgcatacagccaatacctgaaaaagtgcatatcgtactgttagtaacatcgatgaaatgaaacacaagtgcatcaaaccggagactgatgggtgaaatatccaacctattacctaattgcacatattaatcaatgaatgcacaaatacaatataaggtaccccaaaaaaaaatgcaagtgcacccaagactagagactgaagagcattaccagtcatcatttgacccaattggtgaagtgtacaatgccccgttcgctctccaggtttcaatcaggtgtctattagatgcattttccataagcttggcaatgcgtttattatgtaatacgacaagtggccatttaccattatatctatcccgtagctctgttacaacagcgtccagctgctctatattaaggatgacagataggaaaagcattagtaccacattacttcactgataacattgataggtcaaagtacattgaaagatggagttcagacctgagtcaaactaaagccaccctctgcaaaattttgttgataaagtgcaatatttgcaccatcaactatagcttcatatgctccatgttcttccaaccactcctataaagtcatagcactcaaacttgtaaggaagaaaaaacatgtgttccaaatttataaatggattatcacctagaggcagtgttctaaaagtcggctctaggcgccgcctaggcactgggtagcagccacaattaggcattagatgctgcattaggcggctgaactaacttgggtggtgctttattgctattttagggttacatagtataatttgtatgcaatatgccagctaatttcttggatttcttgtatgcgaactgcctaggcgctagaggcacgcgaagaaaaaataagtatctgaatcatattctgacttgcatcgagaaacacatgcatgaggtatcttacgttcttaggaaggtaaattcaatgcttaactcataagggaagttccaaataatgatttatctaaacatagaacaagttacctgggcaaggaactactgagcagacattgctcaaatacacagcagcatttaaatctctaaaaggggtgaaacccaatatagataaatcagctgagcactattaggttaggccacaatgaagcatcaaatggttttttgaacaaagcagggagacagaccgatgggcttacatctctgactacaatttttctatgttgttatgatcactgagcccacaaggccatgttagattgaatagaccaagcaaaacgagtgatcttcctatcacacttaatagtaaatcaattgcagtcagtaaaatcaactggttacatataccaagttagatatggatacaggttaacactacagaagggcagaggatatgcacctgaaactggctgaaatttattttggtctccctctgaagggccagactggcaacagaatcggcaaacctctgcgtctcctcgacgtcaatgtcaacacatgctagacggcaaccacacccctcacactggccatctcctccaactcttactcgctgcacagtccaagggccggtcccaagccatccaagccgatggcacccgccaccattggccacaatggcgtccttcaccttacaagcatcccactcggccttgcccgccattgccgccttaccgctccgaaaccaaccctccagcacctccgcagtctcctcgccgacacaatccacggtgcggctcagcttgtgcatatactcatacaccttgtctgcgtcccctgccttggcgctgacatcaaggagcgcggcgatctcgggctcctcgggggcaacagcagaggcctccatgtgggcatcgacggcgtaggccttcccggcctcccccgcgcggcggaacgcggcgagcacggggctgtacgagcggaggcgcggggcgacgccgtacttgtccctcatggtggccacgaggtcgaaggcctcgtcagcggccgcggggttggaggcatcggaggcggtgacgcgggcgagcgaggtgatggtggcctcggagggggaggccccggagccgagcatgtgggagaagacgcggcgggcggcggcggcggcgttggggagcgagtcggcgtcggcggtggcgaggaggtggaagagctggttgtactggtgggcgaggaggcgcggggcgtcggggccggagagggcggagtcgaaggcggccatggcggcggcggcgtcgccacggcgggtgcagtcggtgagggtgcgggagaggtcggagttggggcccttggagccacggcgcgggcggcggcgcgccggggaggaggcgccggcggcggtggccatgggtggggccgtgtgggtggtggtggggtggagtagtggaggaggaagaagaaccctaattagcgaggtgggtttggaggtggttagcggccataggcccataggccgcgttagcccatgcctcatcgtcacctcacctctagctccttcgccgcgcgacagcgggagaagggaaagcttcgcgaagacgcggaagccgtcgattcgagagatgggagccgtggatgtaaggatcgacggtccgtaccaagatgaacgaaaatcggagtcctttccatctataagcaaaatatggaaatacaaaaactctatatcacaatcttcttttactagatttttggaatttatattgtcgatgttttcttttagttgatttgtatggactccaaccatggggaggcaacactatgagtcgactagctcgttatcactttggttaaagttcgttatttgtaaggagtagaatgatggattagtgttttccaagctttcaaatggtgcggttttttttaaaaaaacttgtatgcacataaatttcttgaaatatagtttcaaatacattttcaacttgcgagagttaatttgttcgtttgtacatctcaataattatcacaaaccatttactctccattcatttcatatcataagtcgctttcacttttttttttcaaatttttccaagtttgatcaaatttgtagaaaaatataacgatatttctaactcaaaacaaacatattatcaaaatatattcaatgttatatttaatgaaactaatttggttttacatatgttactaatttttatataaatttagctaagtctaagtagtttgactagaaaaaaataaaagtaacttataatatgaaactaggagagtacctatttaggctttagccattcaatacaaaaggacaaagaacggatggattacatttgacacaatttcttttgttttcattgtttggcgctagagaatcgaacacaacagaaaatagtgaacatatgctccagtataattgtgtgttatttcatctttaacataaaattgcataaaatttgtgtgctctcagatatcaaataacatatcacgttggtgatctgtatatgtgtagcccctgaacttaaaaacaaattaacttattccggtgtttagctctattgctgtttaagaaattaatagatcagagctcccagcgatgaaggtcgttgaagcaagcttagttggccctgccagtgaccatggagatgccggcgcggcggccgaacctggcgacggcgcagtcggtggagaagatgtcagagacgacgtagctgggagcgccgcccatcaccggcatgctggcgctgacgctgagattgttgacgtagtcggagcggtaggtctggccgaggacgccatggacatcgtcggagaggtcgtagaacttgaagccgaggtcgaggtgggcgaggctgtcctcctcggtgacgccgtagttgtggatgcgggagtcctgctcggtgatgggcaccacgttggccatgatgtcgagcacgccggcgagctgcaccctgacggcgttggtggcggcggtcctggtgacggtgaggcctggaacggcggcggactcccagcgcgcgccgagctcggcggggacgtcgacgggcgcgccgtcgaaggcgagctcgaggcggtcgtcgtcgctgttccacttggcggtcttaagggcgcccatgtagaggcggtggtcggcgaagcggatgccgagggcctggatccaggtgaagtcgcggctcatggtggggttgcgcttgccgatgaagtgggcgttgatgtggaggtcggcgtcggagacgatgcagaagtcgtggtccttcttgccgtgaaagtagaagttgttgccgtcgccgccggtgaaccgcgggtcgccgcacgacacgccggggtagaagtcgcacactttgaaaaaatcaaataatttcacacagagaatcacacacgatgtcacgatcgatcagtagttcaaatgaattgcaactagctagtgatgcttactgcagaaggtcttgcagccgggacacatgacgatgcactggttggggcagcgcttgtcgcacttggccatgcagacggccttgttgccattggagtcggtgcaggagagctgctggtccctcttgccgaacctgccggggttgatgacgtggtagttgcttggcagcctcggcgacgacggcgcctgcgcggcggcgcacaccaccaccaacagggcagccgccgcagcaaccaccgcggcgccccgtgccatcgatcgctacctcgttggctagctaagcttcagaaatcgatcgatcaaacgaggaggtagctaggatgagatgaggaggacatggggaggcgccaatttataggcagcggagcggagcgcgggcgcgatggattggggttggatctgaagccggtgcggcgcgcgcgtggtggtgaagcgatgcatatgcatgcgttgggtaagggttgcctagcttggcgacgcacgcattatgcacatgtccatgcatggggagtggattttcataactcgaggggaaggataaccctcaactaactaaatagttatgaaaaaaaattaaaaagatatattaacatgtaatatatcactccacaaacatgcaagtttaaattcaatttctacacctcgcaacgaaaaaaacaaattaaactacaactagttaacgcatattcacagtcaaatttgtttttttcattgcgaggtgtagaagtagaatttgaatttgcatatttgtaaagtgatatatcacatattaatacatattctcaaattcttttattttttttcataaccatttgagtgacatgcaaataacgagggaatattccctcaagggatgaaaatgatgaaaatagttttcctacatgcatgcaccaatgcaaaaaaaaaaaaagattatttcttttgttttgctgtacacacgtacaagggcacagtacggtgcatggtgtgcgttgagtggcatctatctcgatcggttagaggctgcgatgcacgtaaagcggctagctactagcagcatcgcttcaaatgcttgcatctgcatgcgtggtaacctatattattgttctgcacatcacaacacgttacaagcatgcagctgccacctgatgatcgatcgatcgaggacctccctgcgatgctactcgatcgatcatacacccttctctgctgttgtgcaccacacgctacaccgaatcaaacgtacgtactccctcctttcttaaatatttaacgccgttgatttttttaaatatatttaaccgttcgtcttattcaaaaacttttgtgaaatatgtaaaactatatgtatacataaaagtatatttaataatgaatcgaaaagaaataataattacttaaattttttgaacgaacggtcaaatatttttaaaaaagtcaacggtgtcaaatatttttgagatggagggagtatcacattaaaaaaatcaattattgattcactgtagcagcaccgcgaacgcatggggtatccggccatccaacggcagagcatgctcgttgaccgtcggatcgatcggcactcggcaaatacatggatcagatcgatttataccatgtcctgcaacaaggagactttgcacaaacttcgatctaatattggtcgacgacgtacgactaaatcctctcatcagcatcagaccccttctctctaataatcttcacatagcccaatttgttttatctactctcgtcaatccatactttgcaaatgagcactactacaaaactcttacaaacaaagctatcaaccaattgaatttattttcgagaatcaaccattcaaattaattagatactccatccttttcacttataagtcattttgatattttaagtcaaacttcatgaaagtttaaccaagtttgtatgaaaacatatataataacacaaattagtttcattacatataacattgaacatattttgataattttttttttgaaaatattgctatattttttctataaatctagtcagatataaaataagtttgacttagaaaaaaatcaaacaacttataatatgaaatggagatggtagtagttaataggaatctagattcaatcacaacataccacattagtgttactaaaagttttatatgcatagactttcctttgtgcatcctatattatcattggaattctcaaaattaaaaataatacttatatacttaattcactggttaatattactttttcgagttataatggaatagattaaaatagaccaagtgtatcacagtttgttggttggtctagttaactaaacataattcatgctatatatcgaatatatcatacataactacgtgggtcggtcaattggggaaatgagttaagccaggcttaaacaaggtcaaacttactagcataacgtctacttcggcacctatttttttagatataggatttaaaactcggtatttacatcaataaggatatacacaacaggtaaaaaaaatcactgaataggcaattagtttgaaaaaaaaggagaagcagtagcaagagcaacgccttcccttggcggtttggtggtttgtaggagtagcatgttaggagatatgaagagtaggcttaacggtaatgtgagcatgcttagtgctttcggcaaaacagctctatggcctgtccacgtcagcaaaatcagggaagcagaaccaattactgtgtgattttatctggtattgcattggtagatgagggtgttcaataaccattttttaagtttttttataatggattaaaccggcctctacatccaaatggatgtacacagccaagccttttttaagttaagggattttttaagttaaggcatggttgatcatccttagtgagtctcgctcctcatggtgaaccctacgacatagatcggtgtgcatgggttgatggctaagttatatgtagggtgcaaatataattttctatttcatacataagtaaatagaacaatatatgtatggcaaaaatataatgatccatgataattaacatattcaatcatcgtcactatattcattcaatatttagtttgacgaaataattattgaacaataacaatgatggttgtacacccatcatttgtgggaggggtgaagagattatatcatccttgtgtcaatttgatcatctcttggtgatcgatcttcctgttaaaattattcccggctctcatgatagcttggccaaacatcagaatgcagacggcacacgcaccctttgtcgaaggcaacactctttaactggccctggcggtgaccatggagatgctggcgcggcggccgaacctggcgacggcgcagtcggtggagaagatgtcggaggcgacgtagctcggcgcgccgtccatgaccggcatgctggcgctgacgctgagcttgttgacgtagtcggagcggtaggtctggccgagcacgccgtggacgtcgtcggagaggtcgtagaacttgaagccgatgtcgaggtgagcgaggctgtcctcctcggtgacgccatagttgtggatgcgggagtcctgctcggtgatgggcaccacgttggccatgatgtcgaacacgccggcgagctgcaccctcacgccgttggtggcggcggtcctggtgacggtgaggcctggaacggcggcggactcccagcgcgcgccgagctcggctgggacgtcgacgggcgcgccgtcgaaggcgagctcgaggcggtcgacgtcgctgttccacttggcggtcttaagggcaccgatgtagaggcggtggtcggcgaagcggatgccgagggcctggatccaggtgaagtcacggctcatggtggggttgcgcttgccgatgaagtgggcgttgatgtgcaggtcggcgtcggagacgatgcagaagtcgtggtccttcttgccgtggaagtagaagttgttgccgtcgccgccggtgaagcgagggtcgccgcacgacacgcccgggtagaagtcgcacacttgaacattgaacattgtcagagaatgagagaattacattgctgatcaaccgattcatcagtagaccatgaaatggattatgtacatagctagtgaagtggtgatgcttactgcagaaggtcttgcagctggggcacatgacgatgcatgcactggttggggcagcgcttgtcgcacttggccatgcatcctttcttcttcccctgggtgtcgtcgcacgacagctgctggtctctcttcccccccatgtgacccgggttgatcatgtggtagttgggcggcagtttcggcgacggcggctgcgcctggaccgccgcgacggcgcacacggccaccaagacggcgagcgcaccgacgagctgccgatccatggcgattcaatggatggagatgtgcttcaacctctgtgactctgtgttgctagctgttgttgttgttgtgacttgtgaggattcaggacaagagaagatgttcatttatagggatcgcgagtgcagtggggtagtggatcgatgagtggccgccggtgatgtgtcgtcggcttcggctctctccggctggccggcggcgcggccgtggcggtgaagccaccagcatgacatctgagaatccaacactttgcgttcaccctgaactatgcatgatcttgctagcgtacgaatcgaaaacgtcgtcctaggatcgaggtcaacagtaataatataaagaaattaagctagctggttcttgtatggcttcatgcttaatttgcttcctttcttccaacaatggacatggttttaccgttttttttccttctagctagttccttaaaatctactgcaattagttgattcagctagtagcaaacataataaaggaagtaagcttggcttatggacctgaaagctgtttacctttttttccatcctaatcaagcccctggtcaactccattttgatctacacttaattcttatcttcagatattatgttcctaaatattactggctcaatgcacggacctctgttcttcagtaaagccaaattacccaacatgcatgctcgatcacacacacacacacgttgttgttatcgtttcatatagaacagtatagtggttaactaattgtaaattgtgatgagatttctcatcagtaaaccagccaagcaagaacggatggtacacaagtttttgtaacagagtttgctgattgtaaatttggtggcgtggcatgctagaaaagctggacaaagtactccacatgcaagctgaagttagctagcaaatattcagacgcacgcaatgcgtcatgcgttctcctgaagacctgaagctagatacggcagctgctgggagctttctgatttgccacgacgacgtatcgaacggccagccgccttcgccgcgacgccgcctggccggtcgccatggcactgcaccacgaggcgctctcgctcgcttcaccaccacgcgcgccggctcgccggcagtcttccctgccgagcaccatgcttgcatgctacctcatggatggatcatctccattgccagtccagtgaaatgccggcctagctataaatacgcgcctagctctcatagccatcttcctcaccaccgatcgatccagagtagccaacttaaccaaatttactgtacgttgaccaccagctagctagcttagctagcgacgatggcccgggcatacatggctgtcgccgtggccctcttcttggtggtcgtgtgcgccgccgtctccgaggccgcgaagccgccggcgtcgcatcccaggctgccgcccaactaccacatgatcaacccggggagctcgggcttgggcaagagggaccaggagctgtcgtgcgccgacaccaagggcaagaagaaaggatgcatggccaagtgcgacaagcgctgccccaaccaatgcatcgtcatgtgccccagctgcaagaccttctgcagtaagcatcactagctatgtacataatccatttgcatgttgtactgatcaatcggttgatcaagtaatgtaatgtaattctctctgacaatgttcaatgttccagtgtgcgacttctaccccggcgtgtcgtgcggcgacccgcggttcaccggcggcgacggcaacaacttctacttccacggcaagaaggaccacgacttctgcatcgtctccgacgccgacctccacatcaacgcccacttcatcggcaagcgcaaccccaccatgagccgcgacttcacctggatccaggccctcggcatccgcttcgccgaccaccgcctctacatgggcgccctcaagaccgccaagtggagcagcgacgtcgaccgcctcgagctcgccttcgacggcgcgcccgtcgacgttccagctcagctcgacgcgcgatgggagtccgccgccgttccaggcctcaccgtcaccaggaccgccgccaccaacgccgtcagggtgcagctcgccggcgtgttcgacatcatggccaacgtggtgcccatcaccgagcatgactcgcgcatccacaactatggcgtcaccgaggaggacagcctcgctcacctcgacctcggcttcaagttctacgacctctccgacgacgtccatggcgtgctcggccagacctaccgctccgactacgtcaacaagctcagcgtcagcgccagcatgccggtcatgggcggcgcaccaagctacgtcgcctccgacatcttctccgccgactgcgccgtcgccaggttcggccaccgcgccggcatcaccatggtcactgccagggccagttaaatttgcttgtatgcttcaagcttgatcgttgacagctcttatcgtgtacccaatcaagcattaatagagctagacactggaataagtttattttcaggttgagggaaacataccagtcatcaatcaatataggactcaaatcatttgatattcgcaccgtctcgtgccggtttgttaatgttaaaaaataatttgatatttgtgatcacataaaaatcctgcaatttaaatttcatatgtataaaaataaccgatacatggaatatactcctttacctttcttttttttcttttctctagaaaaaagttgaaatcgaataaaaaagtgacacaagaaaaaaatgcttaggcttaattcttttaagataatgtataatattgttaaaacagattatttgctccatgcttcggaaaatacattttcttaaaagaacacatggaaaaagaaaaaaaagaaaaggtttagccaccgtggctgatgagttcgtgaccgatcccaaatccagtctccaccgcgcgttccaactaccggaatcgaatccatctctctggtctctagttagagtttttaagggtgcccgcgaacccccgatgtgaatcgattgaggaggggatctccatgcatccatcgaaacacttgcctccttagtcctcacctagcactgccgcctcccctgaccagcgtgttgtccccagaaaaccatcctcaccaccccttgcccctccattacctcccaacccagaaaatcgtaatccccgtgtctttgtcatagttgcgacactgtcaccaaccgctgggaagtcatcgttgctgatgagttaccacctcctccctttctccctgtcctcctcatttggagcttgaggacgactcggccatagagctggtgactggacactagcaattcccaatcaaatattatataatccatattttaatttgaacacgagacatccatatgaaaacatatgattcgatttcgctagaaatctgtcgtgtgattttttccccggtgatttcacggatttgctgaccgcacgatggtggaggctgcatgcgtggtcagccggtcgggatgatcttgttcgcactgtgctcgtccctttgggcatgatgagtggagacgatcgccggacgggacgaccttctctgcacttgaatcttgtgcgtaaatctgaaccaagccaaagctaggatcccacactagattacaccaccatgcggccatgcctaacaaatctaccatcgctagaaacctgttctattcatttttttttatatatttgccgataaatttttttctagaaatttgacagatgtaattacaatacaatcatagtgtaattacactgcaacttgtatataattacactaactaaaattatatttgtaaattcagttgatatgatatgtaagtgcactgtaattttgataaaactaaagtgtaagtaaatatgtatttgttattttctttaaaatataaaattacagtcctatagaattaaaattacatttgtaaattcagttgatatgatatgtaagtgcactgtaatttttataaaaataaagtgtaagtaaatatgtatttgttattttctttaaaatataaaattacagtcctatatatagaactaaaattacatttgtaaattcagttgatatgacatgtaattatttaaaatataaaattatagtcctatataactaaaattacacatgtaaatttagttgatatgatatgtaagtgcactataattttgataaaaatattgaataagcaaatttgtattagttattttattttgtagtccgttggatataaatctaagtgtaaaaaaaatctgggtgatttcttgttaaaaatcacccgacaaatgtgtaggcaatccccatatgatttatttgaatagtgggaatggtggatcacggcccgtccacatttcaaaaaatgtagttagtattttttttatagaaaaagttcaatatggctcccttaagataagtcagatttgattcatttccctcaacttcataagccataataccggatatatcgacccctccaactattaataccaacacaaacgacttagatccagtttaaatattttggctcttagagtcattttgtatccgttttaacaattggagtcattttgtatccgttttaacaattggagtcattttggctcttagagtcattttgtatccgttttaacggttgagaggtatgaatcaaatcatacttatatttgaaggagccagattagaccttttcttagttttctcacacatagaaatgtcggaatggacgtgcagcccagtccagtaggccgcaaacaaaacagggagtgcatgcttaaacccaacttggattctcacgtatattgtcatttagtatgtactccttccctctcaaagtattaagggttttcttttgttagacttagttgagacacatttttatagtataatacgtatagcacccttgtcaccgccactgtacgtaggtcaacgatgaaatctagctatctaaggacgtctcccctgcccaggatagatgcatattgcgtagagctgaatccatgcaggcattgcatgggccggtaacatgcactttaattaatctggggacttcgttgctagcgagtatatatgtagcatacgcggtcttcaaaaaaggcaaagtatgtagcacgtagcttgtaaactcgaccaccacgacgaccatagctctacctagcttcaactctactaccaattagtagtagcaaacgtaccatagatgcatatgtactgtcactttgtcttcccctacgccacttcccactgaagccacttcaccctcaattaagcccaggccggcgtcttctttccatcttcccataagaaccctaccccccatgtacatttgatcctcaactccgatccatcgatcgatcagcaactaagtagctagcagccaaacaatcatcctagctaggctgattgatccaagctagcttcgtcgtacgtgcagcgcatcagcctagctagctagcaatggcggctctggtgcaggtggtggcggtggcgcttgcgctgtggtgctgcggcgccgccgtcgtggcgtccgccgcggcgtcgagcccgccgctggtgtcgccgaaggcgaagcccggcgtgcggccgaagctcccgcccaagacgaagctgaccaccatcaccttcagcccccaccacaagcgcgactaccaggtcacctgcaccaacaccggccgccgtccctgcgtcgtctcctgcccttccaactgccccaacaagtgcctcgtcgcctgcgcctactgcctcaccttctgcagtacgcacgcacatatatatatttcgattattcatccttcgtttccaattggattaatattgatatatgtatgaactctgtcatgtcagtgtgcgatctgttccccggcacgtcgtgcggcgacccacggttcaccggcgccgacggcaacaccttctacttccacggcaagaaggagcaggacttctgcatcgtctccgacgccgacctgcacatcaacgcccacttcatcggcaaccacaacccggccatgaagcgtgacttcacctggatccagtccctcggcatcagcttcggcgaccaccgcctctacatcggcgcgcgccgggccgccgagtgggacgacgacgaggaccacgtccagatcaccttcgacggcgagcccgtcaacgtcgacgccgccaagggcgcccactgggtctccgccgccctgccgtccctctccgtctcccgcaccgacaccgtcaacgccgtcgccgtcgagctcgacggcgtcttcgccatcaccgccaacgccgtccccatcaccgacgacgactcccggatccaccactacggcaagaccgccaaggacaccctcgtccacctcgacctcggctacaagttccacgccctctccggcgacgtcgacggcgtgctcggccagacttaccgccccacctacgccaacaggctcaacatcaccgccaagatgcccatcatgggcggcgccgacaagtaccgctcctcgggcctcttctcgccggactgcgccgtctccaggttccaccgccgccgcaccgccggagaccatgtcgccctcggttttgcctcgtaaatcgccgatcactcgtctactccaaccaagtgagatacgatcgatcgactatgaaataaatcgacactgatcagtacgtacgtatatacatactcgtgcaccacgtcaaagcaagaaataatattctcattatgtggatggtgcattgattaattccaaaattttattgactattattatggagctctttcgattgaacatggagtaataaggattcttgatttgttttgatgaaaatgtgtcacattcataactttgttccattattttttaattagtctatcgatcagattaatatattacctaattaacctgtgttaaacttcaaatcgcggggtgtactatatgtaccatttctgcgtcaacgctattacgaccaaattaagttaagtaaactaggaaaaatattgcgtgaatgcttagtactacgaaaaaacaccggccttgacttgtttttgaagggggaaaaagtacaccgaaggtccctcaacttgtcatcagaatacaaaaacgtcctcgaaccgcaaaaccagatatcgcgagtcttttaactatataaaaccggtcacaataggtccctcggtggttttattcccggttttgtcctacgttgctactgagtcagcgtgggaccccacgtgggccccgtatgtcaggatgccacgtcatctcccccttctctcccttcctctctcagtcatctctgccgcaggagaggagaggcgcggcgccgctacagcggctgcagcggggaagcacggcggctccgaggcctacggtggaggccaacgagcgagcgagcgagcaagacacggcggaggcgcggggaggccggcgagctccaccgcgtggaaagggaggagtcggggtggccgcggtcgtcggcgaggagctcgcaggtagggggcccagaggaggccgtggctcggcggctgccgccctcgcccatctcctccccccggcggaagacgccgcagttccgctccgccggccgctgcgccctcgcctgccgccctgcgcctccgctttgctccgccctccaccacgcactcgccaaccgccgcgcgctcgcacgccgcctccgccctccgccacacactcgcccaccgccactctgctccgctggccgccgcgcgcttgcacgccgcctccgccgaccgccgctcagccccacttgccgccgccagtcgatttcgagcgtgcacggcgtgctcgtcgctcagcgcgccgtaggccttgttcgccagcgttcacggcgagcttggaccgcccggcctcgccgccccacgcgccggccacgtcgcgcaggtaccacttgaggttgtgccacaccagctcgttcccgtggtacagcggcgccgtcgggtacctcagtacctggggacgacgtcgcgtgtgttgtgaacgcggaggaggcgggggccaaggccacgtgcgccgtcgaagcgactcttgaagtcgtgcccgccgacgcgcgggttggcgaacacgaacgcggtgaccgggcagcccgtcgccgccagcgccgccaccgcggcgcggggtgccctgttgtatccattcgcgacgatgtcaaacgcgttcagcgtcgcgagtgcggcgccaaggctgtgtcccgtcaccctgatgctcagctcctcgccctggtacatgctcaccaccctcgccacctcgctcaacacctgcatggcgacatccatgtcaatcagtaacaatgtggcaggtgaccgtgccgcgctactccggccattacctgatctcgagcattgtccttgttgtggctggactcagagtcactggaggtgtacatggacagccatcctcggtgcaccatggcgtcggaggctttgtcccggaggaggtccttgggtggcgccattgacgaactccatgtccttgatccattgtagcgactgcaccgtgccgcgccacgcgacgaagatgttacggcgcccgagcgcggccttcccttcgtcggtggccaccgcgacgtacccgatccagttgctctccctgcacctgcggaagcgcgagacggactgcaggatgaacggctccggcacggcgacgcacgacctcgcatacaggaggatcccgtctcggcgtcgaagccgaacggcccgccctcgagctccccgaaccccgcgaagaaggcgcgcagccgctccgctctcgcgcccggtgcgacgttggtcacgtacacccgcctccccgctgccgatgccgccgatgccgcgacgccagaggatgggttcgcgccagcggtggcgaactgggcggagacggcgcgcggccggcgacgacgacgatgccgccgcggcccacctcgcggagcgcgcggcgggcagcggtgcgggaccgcgccccaccgacctcctcccctcccgtcggctagcctgcccagagaagtgggagagaaaagggaaagaggaaggtgagaagtgagagagagaagggagagaagagggaaagagaaatgtgttgacgtggcatcctaatatgtggggcccacgtgggtcctatgctgactcagcaaccacgtaggataaaaccgggatcaaaaccgctgagggacctattgtgatcggttttgtatagttaaaggacccgcgatatctggtttagcggtttgatgacgttttttatcccgatgacaagttgagggacctttggcgaaaacgcttacaatcggtcgttcgataccaccgaaaaaatcggacgctccacgtgtttctctgtttctcacacaacgagtccacgacttttcctcctccccctcgctataacttttcctcctccccctcgctgtaaccgcccctgctttccccattctcgctccatccctctctctcgccacgcgctgccgtcgtcggccgtcgagacgccgccgccgcaagccttttgtgcctccttgttcttctcctctttaactcctcatgtactcttcctcctctcccattaacatctcccccaacgtgggtgttcctcgagctagatctagccatccttgacctcaagtatcagatccggggcaaggccaccatggggatagggagagaggcacggatatggcttcagctcaggagcttcttgtagccaccaactccgtcgtcgtgccctacctatgtgatagaggaggtgaaaaagtagttgccggcgctgacaaaggtaaagctggtgtgcctaactagttgggcaagaatgttgcacaccctattcttttgatgttgcacacaatgtttacttgatgttgcaattagtcttttttggatgttgcacaaattggtataatgatttcttgatgttacaatattctgttttgtgtgttgcaacaagtgttcttggatgttgcaatattctggttttgtgcgttgcaacaagtgttcttggatgttgcatgtgattgaaacatcttttgataaatcaatgaaacattcttgatcgagttatggaacacgctggaacaattcttgttgaaacatttttttcatcggattatgaaacatctgaaacatttttttatgtgtgatggaacacgtccgatgtttcatcatccatcggacgtccgatttgtagcgctccccggacctttggtgtactttttccttttgaaggggtggacttttcgtactcgtggatgggcctaccaaaatgaggcccaagatggagtttgagatgggcccgtttctgtctccaattccagcccgtctcttatctctctcgtgtcttcttcacaaaagaaaacgacaaaaaaaaagtcattccaacacaagcccacctaagcgagcacgatgcacggcggcgcgtccttcgccgccgccggcgaagacgccggcgacgcggttctcctggagatcaccgacgcgtccttcatcgccggggaagctgacccctcgcctccacctcccgtctccgtcgacgacctcgccggcctagaccccctgccgtacccgaccatctgggttcgcgccgaccgcaccaggcaagccctcgccgcgccctcttctccggattcaccggccaatgagctgcttgtattctaatcccgcgtcgcgtgattctggccaggctaatcgagagctcctcctacttccgcgccctcctcggcggcagcttcaggtcagtaatctagtcgccccgacgcgatcgagctctcaatctctcaaacctatcaacagcaaatcctaagtaattgtctgacattttcccgcggctcctgtgggcagtgaatctgggagagcgcatgtgcagatcagctgcaacctcgaggcggccgtgcaagtcctcatctatctgtttgagccttctgggagtttgacgattacgcaccacacctttctaccgctaatggaggtattcagtcttgggttagctttttaatggctttggtgcagaagttgttgaccggcatttgtgtacatatgaaatcacagctgctaatcaacacaattactagtaattggtcagttagctcaatttgagtaaacataccatgttttggaaattttgtgttatgtgaaatgtgagcaaaaatgccatgtatttgtgtctccatgaactgttgcttaactgggttcgagctcgaaggttcagattgtggtcattatgcacctttataatttgaggctagtgctattaagttttggtgtatggtcagtgatgctcactggtggtattatgaacttaatatttgcagggtggcttgtttctggctgctgagaatcttctaacagaatgtgaaaggtggttccgcaccatgagctctcaaagttcctcgctattggccccattagatttcttaattgacacctggtactttgctcaagagcatggtgagccatattttgttgccgctttgttctaatggttcttatacttttgcataacgaaatctattcaaagatctaattcttgttgacatttgtatgattgcagggattaattatgttcaagatatatgcccaggatatttagctcagaattttgtaggtacaatatactaagttgcaatgctgccatacctttctgcatactatcaatttgtttcctaacaatatcttccttcagtttgaaaagtttatgtgtgactgattctacaagcagttagttttgttccactcatggtcctttcggagattctagaacattaaggacccgcagtcaccatatttgactcacataaaccatgtttgtagcctacaattgacattaatatttcacattttcagataggaaaattctagaaactgtagaggctggatgaattttcatgtgctctatttatggttgatgaaccggtgcatgttggcatttatgaatgatgattactgcttgaattgaagaaaagggtttgtctagattcagaggaaaagctcactgattttttactttttatggagaaaataaagatattctctttgttagcagcgtcatgtcgtttatagccttatagtgttttagaccatattttttccccttcttgtaataattaaatagactatgcctttcttattcagacactgctttaaccaagaaagcttatgatattctataaaaaagaaaaaaaaagttatgatgttaaaatgatgataggccaacttaccagttgaatatatatgcagtggggctacctttatttggcatgaaatgtattcatgtataattaccactgggtgaatcccatacaggtgcaggttatctccaggaggtcgtttgttaaacttccctatgatttgttatattctacaatcgagtgcccctttctgaccgtggataggtttgttttaatttttcagcgcttttccataatcaaatcgctgtgctttcatctcgatgctaaaatttgatctactgaccttgtccagtgaaaaacaattatgcgaagcaatcctatgctggattactgaaaatatgctatgctgtgaagaactacctcccaactcagtagatcaccagctgtaccttcttaataaagtacacctctctgtgacccatctatacaatgttacatgacttataccatcatatatgtgttgcctccttggtttgttcattgactacatttatgtatgttttctaccacttcactgaatattttggccacacagatttaagtctatctttctgtttaaacctgttctgcaggtgaggatatgcctcttacctttagaatttgcagcaggtatgattccttgatcatgagtttttaattgataataacattatgttatgcggttctcttgtttgatcttttgctatgtcaagacataatccatgctttttgattcatttttgtaggaacaaagagaaactgggctgagttcggaagcaaagtagagagtaggattcttaatctgctcaaggatagtttgcgaacagtattggatgcaattgctgatgacaacttggagagttaccgtgttcgaattacagaatattctaaggtttttatttttgccacctctgttgtaataatgttgttttgatatatttgaattgtctagaattcttttctttttggtgtttcttaaaaatataatacttttttagtgactacataaattggtcgcaaccacttcatgtataccttgtttgaatgactacatattgcttttattttatcaattgttgtaaaaataggtaaattatgctttactttgtatataaaaaatcttcttataaaacctacaaaatattataggctcaataactctttttacatgcttcgtgtgaagatatccttctgttatgacaaagtgctatcctgcattatcaaaagagattctggtcctttcattgtctattgcagatcatgcacttcgttgcacttctcactgatgaagattttgttttgcagaaaatagtgctttctggttgtccacaaataactactgaaatcttgtacatatcagtgctcccccctactaatgtgggtgcctcattgaataaaaggttagaaagttcatgggcccaagttgattaccgaaatatcatcctttacaatgagctggaggaggctgttaaaagctcatcatttggaaatgtgcacatggtggatctctcaaaatgtccaaatgcacattttagcactgcaattgactggttgaagttggcatttccagaattgaggatattcagagcttccttttgtttgacatttcagttcgaagacttgttatatctgctactgacttgtccatggattaatgaaattgatttgtctattgatacgagcattatagcacaaatgcattcagttatctcttccagatttgaaggacggggcgcagtgaagccaaagctcacaagatattatgcacaggatccgctatgtgataccacaatgaactcatatatctcaaatatatcaaaattgatattggaaggcagaaatgatattactggttggaaatatgttctgttcctactattgatttctttatagttatggatttggttataagaaatcttgtaaccatgtatgtgccttttctttttgcgtgtgtgtatgcagatgtggacctgttgaagatatccattctgaagaactctctttgttatataaacattaaaaattgcaccctattgacagatgatggtatttctaaattattactcaagtgtacgaagattcattcaatggttctttcttatacttcttttggaaatcagtcgattcaaactctatgcaattccaatcctctggacagcatggatgagtgtaggcatgtaatggcatttagaatgcaagaattgcacctggatgggtgcaaaggtaaacatggcttttgtttcatgtcaaaactttctccacaactaagcagatcataacttcctaggacagcagaagtggcattcttatttctatgttctattaactttacgctccattagcctagcatgggggaatctgggtaatataaatttatctacgtgcactgtgcaggtattggttatgccgctatgtctcagctaatgagtaatgtgaatataacaaacttcctatgtttaagggagacaacacttaccgatggcgctctctgcaactttgttggctcttcacttgagtttcttgatatttccgagaccgtggtatggttttctgtttcaaattatatgcatatggtcacctttttatatatcagaatatcagatgattttcctattctttgaaccaaagtacttgtgatgctaagcaaatattcttcagttttgaactttataagaatcaaacactgcaattgactagttgaagaaatgcttagactgagacttgcagtgaatttgctcagttggagactatagataaacaatatttttacaattaacttaggtaagggtaacatgtactggactatagattgtgatttatctttctgtagctttcagcgatatgcaatattgaattatggaacaaagtctgcaatgttttgatgatcacacaaaccaagctctactcgtccaacattgaatagaagtatatgattgaaatgatctttcttattgtacatctgaaaagggggcccatcacattttctacttttgtgtctgcaaaggacagagacagactacagcagtgcagtcatggttcatgattactgtcttttatcgttatgctgccataaaagaaccattactatggtctgttttgatatatatagtcttaaaagttttgtcgcctcaaaattacaggtttccatggtatcattagcaccagttataagaagaaattctaacttgagatgtctgaaagcagctggatgccgtaacttgctatttgaacatggtgaagtagaagcgatgagtggtggtaatatatacggagattttctacaagaaataaccagtacttgctgcttagaggatgttgaaatgggatgggcattttgccctattcgagttacaacccttattccttcttttagtaaagtaagaaagatgactattggacttggcacaacattaccagagaatatattgtgtgctcttcctgatatttgtccattcctagagtctttggttcttaggtttcaggtgtgtctctggctcttctccctactatttgttcaataataaaactaattgtgcctttaattcttttaataaccggatgatgtacataccagatgatctctgacaaagttgtaagaaatctgttgaaatcctcaacgaagcttcgggtgctttgcctgtactcttgtcttggcaatttaacttcatttagcttccaaatcaaggcaccattgctaagaatcttaaggcttgagtggattactccatggatgacaaatgatgacttggcagttcttatacagaactataacttagttgaactttcactgtctggttgcaaactccttgactccagtaagttctactttcggattcagtatgtggaccactcgtgatgctgttgggttgagtttttttttgtgatcaacagactctcaagagttaatctcgtctgggtggccaaacttgacttgtttacaccttgaggtatattataactacaattttttacatggggcatttgattaaaaattatctttatctttgcagtttttatttaagccaaaatttcaaggtttcagtgctgttatatctgtagccaccctcttaaataagtaacttctaacagaactaaaggatataatgtattcatgtccatactttatgcatcagcatgtatgtactgtataatcgtagttatttcactagtagatgtttatatttcttgatatcatcacgaatatacctttttgtacattgattaggcattcaatgtattgaaaactccaatctacagctgaaattgttaacatcctccaaaccccatctcttatgtataggcttgttgatttacaggaatgtggtcagataacacttgacggggtttcttcaattttaaactgtaaagctttggaagatctgttacttcggcacacggtgagcatagaaatgccgtagccatgtagttgagataattgatagtatgatctaaaaactcataaacctaaatattttgtatgctattgtgtttgtgtaactgtaaatcctacaaataaagcatttttagaactataaattaaattaaaggatgtgtagcaacttgttgctctttacacaaaggttgttaggtttatgacttgtgctgctataggaataatcctttcaccatgatgtttcaccattattaatatgcatgctattgcaatttaaacttgcagcaaatcctgcttcatgcttcatagtcatcatgctttttttttctttattagaatgatgtgcagtgacaacggcatttcctgccatagtgttggcaagtcaccttcataggttatccaacacaaatcgttattcacctcgagtttattttgacaggaccatcaattgattgct

SEQ ID NO: 7990 - DNA, 58679 bp, Oryza sativa
agtagtggtgcccctcgacccgacccgggactctctgacgtgacctgcacgcatgcgcatggagggggatgaaaatgtgcgatggaaatttcggatcgacataacactgttaccctttttgttatataaattttattttttttctaatttctttttcagcaattaatgttgacattgaataatttaaatgataaatatggttaattacggtcgatcgagcgtcgtttccgaagagatgttaccgattccgaccattttcaccccttaattccttgtagatctcccctcatctactattttttaaattaaattcaatacaaatgatcgtgaaaagttctttaaaaaaaatgacaatgtagatttcagtaacatttaccactccaacaacacttatcttcgactccaaactttaatttcctccattttcgttagcacgttttttaaaccgttaaatgttttttacgaacttttctatgtagaagttgttttaaaaattaaataaattattttttaagtttataataattaatgcttaattaattattgagcatgtgctcaatcaaccttctcgtttcgcgtgcgctggaaatctccgcgatgtaagaaaacggacgccggcctaggttcagactcgctcagtatatcaaacagacaaatccacgcacgtatatattgcagcaatgctattcataactcataagttggattttatctttttctattatttgtggatgttattttgcgaagttgtatatttatgttttatatatgaattttcaactttttttaagattttctcatgataatttgaataatgtttgaacaaagagattaaatttgtctccaacatgcgcacctatgcaactccatcaactggtgcaagctggctagcatacgagattagatcttaatcaccatcctgctcgtgcattaagtagtaacaactacactaagcactagtactaactgcactgtacctgtgcaccatgcaacctggctaaaaaaatgtcgttttgacatgagcaaaaaactaaaaatcaaagaagacaacaaaaatccaagcctgctactagccaacaagaaaacaagaaaacggtcgggtaatcatgtcgcggtggaccgtggacgaacaccagctgctagcttcaccttcacacggtggcttccggcgagtggccgccgccgccgagccggggcggggaggccggcggcgtgtagaacggcgtctcgggctccggctcctcctcgccctcgctgccggcgccggactcctcgtcgatggtgtagagcgcgcgcgaggcggcggcggtggctggcccgaaccaccgatccctccacgtgttcacctcctcctcgtcgggccccgccgcctgctccccttcctccccctgcgtggcggcggcggcggagtcggccggctccacgcgggtgaggcggcggcgggagcagaacaggaggcggagcagcgctcgccggagcgcgctgccgccgccgcggcgccgggccggcgccggcttcttcgggctctggaccgtgagctcggcgtcggaggcgacgacgacggctggttgctgcctgtttgctgccgctgatcggcggcggcagcgccagagcaggaggagcgacgccgcgaggatgccggcggcgagggcggcgagcgccgccgcgacgacgacgagctcgacgacagcctggcgtctcattgtcagcggctaactaatcactctcgctaaatcactctgctcgaagctcgatcgatcgagacgatgaagtgaaatgtgtttttggatatatggccaacgagatgactccctgtgagcaaagagaatttatgtctcttcttttttgattttttgatgtctttaacgttggcttctttaactttaagtcgaatatttcccggcgatggttagtgggagagaaaggaggaggggtacttttgggatttcgactttgcgttatcagagtggggcccagttgccagcgactcatatccagaatccggctgaaaaagatcagaggatatgtgttgtgtttgtttagcttgattgatgtggtgttttgccaactcatcgcctgcatggcatgaaattgaagggcacgacgaactggtcgctaaataacgtgcatttcggtgtccatatgaaaaacatctctattcatggcagttgattgctgctgctgcagactcggtcagtacgtacagtatgcagtagccaggaggtcagggaactagtagtatttcctaaaaaaatataaagctaatgctaaacagtactacatcatttttaaattggatgacaccgttaactttttttttaacgtttgatcattcgtcttaattaaagatttagtataaatgtgtataaatataagtcaaggttatattttatttgatgataaaaacaagtcacaataaaataaataatatttatatttttttctaaatgaaacaaatggttaaatattatgaaaaaattaacagcgttatacatcttgaaatagagggagtattttttcccccaaaataacttcgtttttagtcttatacgtgcaaaacaagaaagattaaagtgttgttaaaaaaacaggagtagtattaacggtaaatagattagggctgattaggcatattgaaggaatcaagctgattgatttgtgaactgaggttagacaggaagatagaaatgaaattaatctgtgtatcgatcattgcagaaggaacgacaccacactgcacacaacactttagctctttagtttgtgatcttttactactacgactacgacctctttaggctttagcgaaaattaatttacagcgcaagcaaagtaaaagcaagtgcctttaactcggatctcgtggacgcagtcgtcggtgccgacgcattcacctacacggcaaattctattcaggtgcagcattgcagcctacggcttctctgaaagaaacaatgcagagacttcacttgcagggtgtagcacagtggtagcacagtgttcccctgccacaatttttcttgcactaatttgcgctacatacaacgtagtactacattcattattgtaaagcaaacattgtactgtagtagatacaaatgatattacataatagtgatatgaggcaaaaaaacgtcatactcatctggagtacaatctttaatttacagtccacctaaaatgtactccctccgtgttatttgtatgacgttgattcgtttaaaattaaacaaaccaactttatatatttaggaaaggaggtagtactagtgaatagagaataaactatattaaacatatttttatacgggtagcgagattgtccacttgtagggctgtcggaggcgatggcctatgggtccttgccgcagcccatgagagcgtgagtgagcagcatggcgccgcggcgggtcgcctccgccagccggccgaccaccgggaagctcaccgtgtccctgttcttgagaggcttcttgtcccaccagtcttggtgcttcacaaccttgccgtcctcgacgtcgagcgtgatgagcgacgccaggtcgatggccctgcccaggaacttgtagtgctgcttgttgtcgatcagtatctgaaacagatcgattgattgttaattcctctgttagtgatcagcatgatagtcaaacactgtcgatgaagtttgggttgattagttacctcgacttttccgggcgcggtttcgttttctgtaattgtgtactccacgattttggattcaccgaataactgatgaatcatacaggcatagtatattacagagaattcagtttgaaataagttttggttgtgtggaggtggaacatgacagatatgatgttaccttggggagtgtgtagaaggccgatttgatctgcttaaccctggaatgaaagaaagaatgaaagagaagaagggatattttttttttcgggaatacgtaagaagcgcatctttgtattaagaggagtaaaagtctgtacaggttaaagggaaaacacagcaggagacgggattataggaagtcacccaagaacattaaaccctaatctcgcgatacaatgttgcgacctgagcgctctaaaggcgtggccggtatggcagtattggcgagccgccacagcgctgcctcttccgccattgcccttgccacttctgtccagcttctgtgcttctggttgaacaccctgttatttcgctccttccagatagtccatgttgcgagagtagcaatggtattgaaacctcgccgttgagagctcggtaaggtttccctcttgtcacataactaggagtggaatgaggtttcattgatgggcaagcattccgagtagggctgtcaaaaaagctcgagactcgcgagcagctcaagcttggctcgtcctaggctcgattcgagctcgactcgagctccaaacgagccgaactcgagcttgagtaaaagctcgcgagctttaccgaaccgaggttgagcttctaccgagcctaaccgagcttggctgtgtacagtctatattgcatgttcaccttattaatataataaactaatagataaatatatatatttgtatctatttacacaataaattagcatgtgttagcacaatatatttattttaatcattttctactcttttattagtgtgattaactagaaaataattagacttatcaagagattattattaaaatatatattatactacttatggccgagctcggcaccgagctcgagctcgagctcgagctcgaacgagctcgaaccgagcttgcctaaaagctcgaaggtgcaataggctcggctcgagcttgtgtcgagctcgagcttaggcagacgagctcgctcgagctaggctcgttgacagccctaattccgagcaaccgattgccgagagcagtagccaccagagctgtcttgattctgggcatgcgaccaaaatgtggttgatgctttcctcgtactgatcgcataggacacacatgctgggatggggcaagcccctgatgcttaacctgtccgccgtccagcagcggttgagtgcgaccagccagctgaagtaacggcagcgtggcggcgccagcgatttccagatcggcgtggattggaacgggattcgaccgaggaacaatgcttggtaggcggagcgggaggagtacatgcttgaactttcccatttccaaataaattggtcctggcgatccgagagctctatctcccgcaacaacgaccagagattgagatactctacgatggcctgcaatccgagggctcctcatatatcgcggatccaagctctgttgagtagcccctctgctaccgtccttcgtcgtcgggttcgcttgggtactcgatcatagagtgccggtgctagtgagcagatgcaggaaccatctagccaccggtcttcccagaagagcgtagtcgtgccatcaccaatctgtcaagtcatggatgcagccacgaaacactgttctttcggagaacaggggatggaaaggccttgccaaagaagaagagatatgatggatcgatggtgaggaaacaaacgtagacgtacccatgagctcgcataagcgggtcctcgaatgtggcatgcgccgcgtaaatctcgaagtcccgagccgtcgcgcacgatccgtatctgcaacatatgcgtgcaacttttttttttttctgtcttgtttcgtcaccgaatcaacaacacagagctaagcagagaacaggtgaacgtacatgttgaggagatgcggcatgatgtgccgggagacgggcgaggctgccttctcctcttccatggctcctcctgcagtcgtcgtggtggagaagaaggagaaccagagcccgtcgacggcggcggcagcagtcgcgcggcggagattgagcatgcaggccaggatcggatcgagcggcggtggcattcattcaaatggcgagaagagaagcgtactagtctagtctagtcgcctaccctgccgtggttgactagtccagttggcatgcgcggcggaggagggcgctacgtcggcgggacaatccggtggcgaggacgacgacaccacgacgcttttcttcttcttttttcctttttttcttcttttttttttcgtctatggaacacttacggcccagaggatttttggtagggaagtacatcaaaggtccctcaacttgtcatggagatacaaaaggaaaaggtacaccgaagagaatgcttgatggagattcttcgccgcgccgagcagacgaccaagaccaagactttcatatgacagaaacagcaccctagcttttcctgttacatctcaaattgtatttattttgttcgcctagcacctaagggagagaagaatggaaggaggaagtagaaagaaagtcagtttcatcagtacataatcacaggtgttgcttgatatattgtaggaccaggtgtgccattgtatcctgtctacagagcagtattctgaattcctgattgttcattaatgccatcatggtagattaattggttatatcatctgaaagatccaaatgagcatagtgcagttaagtatagcaccaagttcactggttgttaacaagactagtactgctacaaagcaaatactccaatggaggtaacaagagatattcaattatcaggtgcaaactcatatatcatctctaatcattaaaagaaaaccgacatgttccgtataagtttctgacattttgcatgcaaaaagctatagtaattttactttgaactctgaagatacaacgccatgaagctaaacccaagcaaatcaaactgtctgagccgatcgaattacatcagaatccacacgctttggtctcatcacagattgcacatgcgctctcagcatgtgtgcctctcagccgggctccgtgagcgcgatgtcggccttcttcagtgctagcgcgtgcgatgttggctgtgccgatgtcggccttcttcagcgccagcgcgttcatgccgttgccggtcatcccgcacaggtggccctcccgttgaatgatcctcacgatctcgtacttgtgctccgggaacatgccggcgtccaccggaaacctgaaattacacaaaggatggaacataagttgcctagctactcaataatgatggattcgatataccacatatttttattaaagttctctacctcaattaggtttttgtcaacagtgagatggttgagagtgagagttccaattttgtcacagcagagaacatccattcctgccatttcttctatggctgtcatccttttagtgatagcaccttgccaaaaattaattaattttagtaatgatatgtgatatactgtctgttaattgaagaaacatgacaacaatatcttggacacacctgttgagacaggtgatgagaacctattgcaagtgtgactgacagaacagtaggcattgcgatcggtatccctcctctcagaagaacaagaacattgttgattccatctccgtatgaccggtgctggattgggaacatgattataacctcaacaatcacaccaatggcgattgagcagatacagaacttgcctctggaggtaagaacctgaaaattcactagttagaaacagctgacagcacatccacttgcgaggttcttataatcttattacagtctgaagattgatgaatcaccttctgaaaatgcccaacaacctcagtggagtccactagatgagctgccttgccaaagaaagagtgtatccactagattcagaggtgacagaacctaaactagacattcatgcaaagcatgtattggatctcttagacggccgtctatatgctactgtgcctcaacagggtgtggtctcaccttaacattggggatgcatttgcgttggaaatccatcgtatagaactaattaatagcaaaatgcatcaaattattaggctactagctttataccaatctgtgcatcatagttttttttttcattgtattgttctcaatactcatatcaaataatttatcgtgattatattattgattgttttttgtgtagttcctgacctctgattctgtagatttgctacacctcatgtatctatatgcaaatgacattattgcttagacagaaacaacagcttgagtctccaccaagtgcagcgtaaacaccagtatggtaggagtaatttcttatgtaacagtaacatgaggagaggaaaccaaaagccatgctgtgcagagacaaccaatacagttaatcgttaaaaagataaatgattccacattactattttttttaacacaaaacattagccaaaattagtggcgtggaataaccttcttccacgaatcgctaacctagttcttactcaggatcaagataagtttcattggaatttaacccaaaatggagagttttcagtgaagtcgcattatcttgccttggtacattcagatttgcccaacataaacaaagtaatttggaaattaaaaataccgcttaaagtgaagatcttcctatggtatttacgtcgtggggtagttttgacaagggataacctagctaagcgcaattggcaaggaagtaagaattgttgcttttgtcacaaagatgagacaatattacatttgttttatgagtgcagatttgcccgttttgtgtggtgcattatacaagtggctacagggcttttcccgccacgtggtgtatccaatatgtttggtaattggctacggggaattaggaaagacttgaagtcacttatcctgttaggggcagccactatttgttggtcattatggctttgcaggaatgatatggtgtttgacaaaagaaaaatctcttctcctttacaggttatttttttaactatccacttccttcgtacctgggctatccttcagaagcctggttcacgggatttggttgcagcggcgtgttagcgcttggagcaggtggtcagggaatgttttacccagggacatgggtggcggtctagcctgaagattggtgctccctgatttttactgctttccttctcttgttacaaactcttttgtgggtttgtgtgttttggctgtgtgcatcctagttatgcagaggccgggagttttcttagtatggttctatcaacttgatgtaatcgtctgagattaataaaagcttcctttatcaaaaaaaaacattattaagttgaacaacagtgaggtaaacaagcaacatgcttccttattcagctccaatgtcccagaagcaacaatgacagtttggatctgtatcaggcaatatttgtgcaagtttctgccttctgcatgttttatttgtggataaaagtaggactaaagaagtagaaatgacaatacccagaagcgaggtagatgatcgtccacaagaatagccatcaaggagagccaaaaccaccaccaccaggagtgagaatctgaagaatctcaccagcattaaccataacagtgttcttccctccaaggtaaactctacgaccatctttcttgacgagatagtttgcaccacgggccccatttcttcctcccttcagtcccctgggagcatgcacccttctctctgaaagaatgctcacaacaacaggctggcaaaattcaatctctctcacaaggccatcaccacctctgtggaaaccagaacctccactgttctccctgatgctaaatctatgtaaaagaacagggtatcgctgctcaaagatctctgggtcagtcatccttgtgtttgtcatgtgacactgaacaccacttgtaccatcccaactcgccccagctcctgaaccgcctccaatggtctcatagtaaccgaaggtgtcgtctccaaatgtcaaattgttcatgcaaccctgggagcaggcgcatgcttggaaagccattaggactacgtccgtcactctctgagaggtcaatacattaccaccaaccactgcagctttgtcacttggagaaaggaaagagcctttaggaattaggatcttcacaggagctaggcagccttgatttagaggtatatcaacgtcgaccaagcaccgtaagcagtatatcacagcagccgctgttactgcttcaggagcattccagttaccatacacctcaggactggtgccttcaaagtcaaaggttgcttcgcctttacttgaatcaagggtgagcttcaaatggagcacagaaccatcatccatgtaatcttcatcttcgatgacacaagacccattctccttttcaactctcgatgcaactaccttaagcatttctctaacagcttcttcagcattgttttggacatgattcatataagattgaacagtgatcaaaccatactgatttatcagttctttgataagtgttattccccgctggtttgctgccacctgagcatggaggtcagaaagattatcttggatcttacgtgttcctggaatcttatggtttgtaagttcatcataggacggtgactgtagcaagtgaattattccttcctcttggaaaacacctctctcaacaagtttaaatgctttgatggcagcaccttcctcccagatgctttttgagaaaggaggcatgcttcctggggtgataccaccgatctctgcatggtgacctctactagcaacaaagaagataactttaccttcattgaaaacaggtgtgacaactgttatgtctggaagatggctacccccagaacatggatgattcgttacaagaacatcaccctcatggagattatcaccccaatatttgagttgccaacgcacggtgctagacatggctcccaaatgcacagggacatgaggggcatttgcgacaaggccaccatccggaccaaagagagcacaagaaaagtccagtctttcctttatattggtagaaatagaagttctttgaagtgttcgacccatctgttcagcaatacccatgaatcgatgattgaagatagaaagttggaccacatcagcaactgtctctgatacttctacactgcttggagcagcacttatctcaatttttatgttaccatacttggtgatgatagctttacagtctttttctactatcactgtactgttcccattcattataactgcaggacccttcaatacatgcccatagcccaaattctgaagcttgtaaagtggtgtttcctgccatccgtatgaaaaataaattcgacatgaactttctggcacaggtttggttgatactggtgtcagttcatgaggctgcaagatatttgtagcaccaactccctgaaccctcacatcacatatgagtatttttctgtttaataatttgaagccatactcttgctgaaacagtttcacaaactcatcagcataatcacttccagattccctctctggttgtttaaccatgattgctgtatcggttccctcgtacctcaagttcaagtatgaatgtgtcctgatgctgtcctctccaaaaccctgctctattaacttttctttcacctgcttaactaaaagatctactcttcgagatgcctctgcagcagaatcaacattataaatagcagagtatggctcttgcaaatcttcaataacatcagcaaggcccattccatatgcactcaatatgccacagtagcgatgaataagtaactcagacatgccaagggatcttgccatagcacatgcatgttgaggaccagcaccaccaaagcatgcgagagcatggttcttagtgtcatgccccttcatttcggtcaactgccttataggtcggcacatcgcctcatttgcaacattaacaaaaccgagggcaatctcctcaaccgtcatgtcctttgctgatggatcctgactctttcggtgagagtttatctcaacagcaagaatctcaaatgcctttttagtagcgtcataatcaaggggtaaatcttcgttaggaccaaatatggatgggaagtactcaggaataacagttcccagaatcaaattggcatcagttattgccagctcaccaccttttctatagcatacaggaccaggatgtgctccaacagaatctggcccaaccttgaaagctccaaactgaaacttaagcttcgatccaccaccagcagccaccgtgtttatgtcaagctggggagcttgtattattgccccagcaatttgggtctccagaacttgttcatagcttccatcgtagcggctaacatctgtggatgtaccacccatgtcaaatccaatcagcggttttgatgtctcaagttgaaacaaggtctgagagtagccaaccacaccacctgcaggacctgacaacactgctttgtgcccggagaatctcctctctggtgccagaccaccatctgactgcataaacagcacattcacctgctcacctcccccttcaaacctggacatgaatcctgataggtactctttgatgactggtgtgagataagcatccacactggctgtcaagccacgaggcacagcacggaccatcggcgtcaatgatgaagacaacgatacatgcttgaatcccatctcaagagataatttctcaatgagaagctcatgctgaggataagtatatgagtgcattaaaaccactgccaaacatcttattcctttgtcaagcaaacctttcaacaaaggcttcaatgcttctacatcaaccggcttcgccaccctgaccaattcccctgagatccctttaacagataaaccatcatccctctcaccatcaccaccaccaacaagttcaaccctctcatcaacctcaaccacctcctcatacaaattcgacggctttgacaccttgagatcgaatatgttcggccgagcctggttaccaatctgaagcaaatccctgaatccccgggtgacacacagcgcgatcctttcacccttcctctcaagaagcgcattcgtggccaccgtggtgcccatccgaatccaatcaatcttgcccgtgggaatcttggacgaccgcgggatcctctccccggagaactcctggaggatcctcctgatcccttcgatgggggcgtcgtcgtagttcgacgggtcgacggagagaagtttcatcacgtagccttccctcctcccgggcacctctgcgtagatgtcggtgaatgtgccgcccctgtcaatgcagaatctgaatttctccgtgctacccatcctaacttcgaggtactctcagaatctgcgtcctctgcaaaacaccaaaacagcagcgtagatgcaggcaattcagattaatctggtaatgggtgatggattactgtaataagtagaaggagttgtagcactgagctgtgctgtgaattaatcaaacaaagggggataagagcgccaggggcggatccaacttgggacatggggggttcagttgaactcccaaattttgggggaaacaaacaataaactgttacttgtattttctcgtgaaatagcttcttccagaactagaaaagaagctaggggttaacgaacgcaagcaaattccagacagacgtagccccggtggggtgggagagagagagagagatgaatcagaagctcaccaggatcccctcccctgctctgctcgccaccgtgctccaaccctgccaccgtcaccgtgctgcgtcgccccagttgccgtgcgccgtgctgccgccgtcaccgtgcgctgccgcctaaaccgtcgcaccgagagaaggagggaggaagcagcctctggctctgccgccgctgcctcgctcgtctcccctttttctcctcgcgataaggcccgagtcgacgagtgggcggcgcgacggttcggctggatccaaggtaatgcgatggcatttcctgtaatttcgatgaaaggggacgggtagcgctgtaattattttcagagtaggacgtggagccacgttttcgccactccacctcgctaagtcgctagtactctgtttctaaatgtttgacaccgttgactttttagtttgtgtttggtcattcgtcttattaaaaaaaattaactaattatttattcttttcatataatttgattcattgttaaatatactttcatgtacacatataattttatatatttcacaattttttttaataagacgaacggtcaaacatgtgttaaaaagtcaacggtgtcaaacattttgaaacgaagggagtataaatttctggagcgattcacttggctcccgctccaattgaccatttggccgtgggaatcttggacgaccgcatgatcctctccccggacaactcctcgaggatcttcctgatcccttcgatgggggtgtcgtcgtagttcaacgggtcaacggagagaagcttcatcacgtagcgctagcgccttcccctacctcaagaaccccctcccgatgctggacatcgctgacggatcgtttggctccggcgccgcggcgatgtgctaggactgcggtaaccaagcaaagaaagactgtggccaccaacattgccgcacgtgttgcaaaagccgcggcttcggttgctccatccacgtcaagagcacctaggtgcccaccgctcgccgccgtgagcaccaacagctcactggctcatccccgtcttcccccgcaaccgcctctaccacagccaccgcttccgcctctgcctccaagaagccttgccttctcacctcccaaacgacgacgtcgcacaccttcacctccgatgccaccacgcccgcagctttgacaccacctccagccatcaagtaaaacgccattgataccagcgcatgttcatcaatacatacgcgcaattcggcatgtttgtctcctacgaatctacaaacagctcaaattattaagcttgtgccattttttgcagatgtgttgtttaggagagcttgccaatgcaggtgtgcacaccggtggtgtttaggtgagaggagaggaaaatatgaaagaaaaagaggccgacggagaggtggccaggccgccgctgctccctatcgccgtccccaccatcgctccccaccgccgctcggggcaaggtgaaaaaagaggccgggggagagaaagagagataagggagagagagaggggggaaggaggaggaagaagggaaggaaagggagaatgacatgtggggcccacattgtcgatgggtcccacttgtgtgtgtttgtgagtgacatgtcagtcctacaaaattacaaaattttgccttttgttttactctagttccacataagcaacgcgtcgacgacacgtgggacgaagaccggatcgacagtaccacgtaggtgccacgtcagctaaaaccgcttgcaaacccacctaaggagtcaaattgtatctgttttaatagttcggggagttttcttatccagctttctggttaaagggcacaaattagattcggccgatatttaaggaagtcaaatgagctttttccttgtttaataataaatccctctgtcagccgcccaacaaataccagcgtaatcaaatcatatgatgtggcaattaatattagcagcacggtttttaaatttcccctcgtgatcgcgcacaagatgtagacaagatgctccgtattcatgacatgcaaaatagatgattatagtactttgaaatcgcaaaataaacatgcggacaacctttgttataccacccgtctcacggccaccggcagatcggattattaactactccttgattagctacagtactttggaaaaaaaaacgttgactgatcaaaatttatacggcgacacataaaagtatatcctaaatttatttattttgacgcacattattattgccacaacaaagccatcgcacagaataatactaacatattagcatagtacacgtattccaaatactagtttccactgtgtgcacgacacggtatgtccggacgtgcacgtatctccattgctaacgtattattaccactataaatacaaaccggtcaagtttgaagagtcagtccaccatcggttctgtacatagtaaaataaaataaactagcaatacatacaggaagcataaaagatttaattcaaatccaaatccaaactcaacccaaagcttggcaagggttatacacggcgttgatcatgtggctcacacgcggaggagtaaagacacgagactttctgatccgactagaggccacgtgccacaagcatcacacagaacaagaggcacgcacacgagaaaaacaaaaaccaaaaataaatagggagagagaggaaggggagagttttatagcgtggtgggagtggggagaccagaccaggaaaggagacggagacccgattcgttcccacctcctcgccgcccaccgctctccatctcctcttcttcctcctcctcctcctctcgtcgtcctcgtcgccgtctcgtcttctatttatttaggagtatttttttttcatctatctatctgtatctatctataccccccgcctccccgatttttcttcttcttcctcctcttacctcgcgtcgccgccgcgggcgtcagcgctcgcgtcccccgtgtctcgtttcgtccatcacaactcgctctccgtgcggcggcggcggcggcgatccccgatcgggcgactccggcgattgcgaggtaactagcgtctctcctcctcctcctcccttctcgaggttcgctcgatttgggcgcgtgtcgaattcgggaggctggtttgctctgattgggcttgtacagattgcttgcttgcttggtttacgtgcgcagccgcagcgtgcttgttttgctaaaagggcggcttggagaaatttttagctgacatcgaccgagcttgttgcgccgccgccattatcgtgcgacgacttaactgaatccgtttgcagttttctgctatgcggcgtcagttagttcagtttcctccgtgcggggggtggggcagggtgcggtacatgggtgggggcgatgaactgtgtggcacatcgaatttactgcagtaatctgacaagggaattgcaattgtaaggatataagggaactgcttctgctgtgattctcaagtgctgcaaccctaggtggcttccgcagtgcccagcccaggtggtccaatgacttgtacagtaggatagttgctactcgtgtgcacattgcacagtaggtggggtgtgtgaagggccacaaaacacctcttgttattgcttcttttgttgcatatatgctactgcaatcagctatgattttgttcagtctgtgatttgttaatagacagttgcccctgtccgaatgggtcctctgaatgtcaaaaatttctgccactgtttcatcgagcttttttatttgtgggatgggatttatatctaggtgatattaactgccacattgaattggttgctagctgttagggagtatttttcatctgtcagtcagtggaactcaggtctgcagtaagtttgttcatgattgagagcatatagcttatatctcacccaactgctaacttcaggcagataggaacaattacactttattttgttgcatgctatccccctctgtggatctaaagctttgctgcccatttttagatccatcttgcttgtcatgttttctctacttcattttttaacaacagtttgcaatgcattccgttttgggcaattatatgatatacatttttctgcttattaatcttaacaggttgaaattaatacattgatgctgtatcatcacagaggcggtctttcttaatcttcaatattttcttagagctaaacggttatattttggtgtcttcttagcaacaatgccatctcttcagttattgcaactgacagagcacggacgcaaccttttgtcttcgagaaggtgtgctgttttaacattgtctttctaaattttagtaagtcgatcatttagttcttatctcatgttccttgttctttacaaacatcaacaggagaactcttgcagttgtttctggtgcgttacttgcgggtggaactttagcatatgctcactcagctcggcgccaaaaacgtcaggaagaatattctcatagtgatgcaagtacacagaccacgggtaatcagagcatttgtcaaaatggtgttgatggtaaattggtaaaaacaaggaaaaagaaaaatgggttgaaatccttacaatttctggctgctattttgcttaaaaagattggtccaaatggaataaatcatcttctcggcttgatgataacagctgtaagttcgatggttctctttagtgtgggtgtttttgtttgacattctgataatattgttctgaatttaataacttgtatggccatctatgctctacaccttgaatgtgtattctacttcatggactaagcatattgtgcttgttatctacatttccaagtatttatctgcattttatgctagagtttaatatgttactgagctttgctgacttggttgctgattagttatgatatgttgtatcagttagttaaactctcgatcattgagctatagcataccatgataggaagtaccatttccagccttgtctgactacatgtaaaaactctatagagcttgggttttcatatttcttttatataaataaaatcttgcttctgcaggtgttacgtactgccgttggccacagattagcaaaagttcagggctatctattcagggttgcatttcttcggcgtgttccaacctttacacgcctgattatcgaaaatcttcttttatgcttccttcagtccacaatatatcagacctccaagtacttgacagggtccttaggtttgcactttaagaagattttgacagatcttgtccatgctgattactttgaggtatgttgctttatgaagttgaaatcttcattctttttgcaccttaaatttcacatgattacacttactgtttatttttttctttctccacgtatataatctactccctctgtttcatattgtaagtcgtttgactttttcactaatcaaacttctttaagtttgaccaagttaatagaaaaatatagtagtattatcaacacaaaacaaacatattatcaaaatatattaaatgctagctttaatgaaactaatgtagtattttagatgttgctattttttttctataaacttggtcaaacttaacaaagtttgactaggagaaaagtcaaacgacttataatatgaaacggaggaagtaagatacttgatactctccaattacgcagtgaacagctatagttaattcgataggctttgttgatagaataattgatgaacagtgagacaaaatgcttgctacaaacagagcaactgaaaaggttaccttattcctgattatagaaaagcaatagcacaccttaaacaaaaaggaggctatttacttaagtcagttaaaccccatagagttaagtcactcctgttgctgaaatgtacaggaaaatagaattactgtttcatcttttcggagttttcagtctatctgcacgaataccaaattttcccttcttctgtagtgaagtttttgtatattacttgggtttgcagctacttctgtagaatcgttgagtcaaatagatatgaaagttattataggtcacattggaggttctagttatttgactttgactttttgtactcaatagctttccatgatctcatgctgtagagttcatcatgtaaaatgtagatcgattagttagctcatctaatttccttggaaaggtatccaatagtttggtcaattgcttgacgattaatgtgttgaactgcatatttaacattacatgccattgattctttttctcccaccttttgtgtgcagaacatggtttactacaaactctcgcatgtagatcaccggatctcaaatccagaacaaaggattgctagtgatattcctaagttctgctcggaactaagtggactcgtacaggatgatctgactgcagttgcagatgggttaatatacatctggcgcctctgctcttatgcaagtccaaaatatgttctctggattctggtaattaactcccccaccccaccccaatggatgcatgcatgcatgcaccctacaacacacacagagtaaagggttgttacgctttgtgaaatataatatgacaacctctcctgctctttcacgtcaaaaaaggaaatgaaacatcttatgacaatggttgaaaagtagtactcctagtttgagaaaactgtgctaccttaatgtttgtttaatatatattatgactactagcttgctcattattatatagattgtcaacactggtaaattgctttcaggcatatgtacttggtgctggtggtgcaattagaaagttttctcctgcttttgggaaattaaaatccatggagcaacagctagaaggggaatatcggcaggtccattcacgtttgagaacccatgctgagagtgtggcgttttatggtggtgagaacagagaagcatcgcacatcatgcagaggtttcaggctcttgtgaagcatttgaatgttgttcttcatgaaaactggtggtttggcatgattcaggattttcttcttaagtatcttggtgccaccgttggagttatcttgattgttgaacctttctttgctggaaaccttaaacctgaatcatccactttaggacgggcagagatgttgagcaatcttcggtatcatactagcgtcataatatcattatttcagtctcttggaaccctttctatcagttcaagacgcttgaatcttctcaggtaaatgcactgtccttgtgtgaaatgcttgccctgtcatgttatttttttttgggggggggggggggtgcactgtcacatgtttaatggacattgataaagtagttgatgatacttgatggttcttatgatgtcatatgacatgtttaacctttatgtaacctcaggttcatattttgtttatttagtggaactataggttctatctatcatcatcactctagttctttgctactaagaaattagttattcactcttaaacttcgtttctggagtacaaacataaaattttgacttgtggtttctaaggaatatattggtgattcatgttttttgtgtgtatcagtactgttgcgaatatgcaatttaagattatctgttgatatatttgagtccatcatattccaagaatatcttgtgcattacaagtatctatgacttcataattccatttgataaatatctttttgctgattaactttctattctcattaacagtggctatgcagatcgtattcgcgagttactggatgtttcacgtgagctatctggggttcgtgatctatctatgaataaaaaatcttctgtagacaattatatcagcgaagcaaattatatagaattttcgggtgttaaggtaatcatgatggggactactagttcttctgtctgtttggtatgaagaattctaataaatgatttgttacaggtggtgacaccctcagggaacgtcttggttgatgatttaactcttcgggtagagtcgggttctaatcttttgataactggtaataatctataccaaaatatgtgtcctcttagtttggatttgcgattgagctattgcaaattcatcatgcttattgtaatgaaaacctgatatttgcacatcactttttaacacgcccaatacaagttcttttatgattgccatctgatgtaaacattagttgacactgggtaactactgtgctgatgggcaaattgtattatgccgagggaaagggcttaggagaagcgactggaatggacttttggaatgagaacatttattgtttatcttgctcccctcgttggcaataactgtcctttatgtagtgataacacttaacaactgtctaaacttttgatctaaagataatattagataccatgcactccatatatccatggatgtaggttgctgtcggatccctgtgatcaaccttaaatttgactcttaaatgtacgcataattatatatattctttctagacattttgtttgtatatgtgtgacactacttgtatgttttggtgctttttcatgaaagttacagccatggaaactaattttataatgcatgtttgctcattttcaggtcctaatggtagtggaaaaagctcccttttccgggttcttgggggactgtggccacttatgtcaggccacattgtgaaacctggtgttggctctaatcttaacaaagaaattttttatgttccccagcgaccatatacagccgttggaacacttcgggaccagcttatctatccacttacagcagaccaggaaactgaaccacttagctatggtggcatggtggatcttctaaagaatgtaatactcataattatccacttgatagattggcatctttagctgcctcattgcacttgtttgtgactattttgtcccaagtacctagaaagtgttactggaaaaccttagtttttttcttcccttttggtaggtggatctggaatatttgctagaacgctaccctcttgataaggaagttaactggggtgatgaattgtctcttggagagcaacaaagattgggaatggcccggctgttctaccataggccaaagtttgccatcctggatgaatgcactagtgctgtgacaactgatatggaagagcgtttctgcaaaagggttcaagcaatgggcacatcatgcataacaatctctcatcgtccagcattagttgcatttcatgacatcgttttgtctttggatggagaaggagggtggacagttcaggaaaataggttatcctcatgatgatttttatctccttatttatttatatataatatgaaatgcagttctaaaaagttcgttatttctcttgtagaaatggctcctttatctctgctgaaccagagtttgatgcattgaactcatcagaaactgatcgtaaatctgatgcacttgctgttcaaagggcttttattgccaacacaaaggtagttattattccatattgcctgttctgttgttattgattttttatgtaccattcttttaacagattttatttgctagggtaatgctttaatgggccccaaggatcattcttattctacacagctcatagccacttctcccaatatggaaatagaacacacagaacggtcaaatctagttccacaattacagtgctcaccaagacctttgccactccgagctgctgcaatgtcaaaaatactggtgagaaacatacatttttttacgcttatcagtaattcagtatctagtatccactattcagagatctcttcgactcaaatttgctgatcgtccacatgaaataattttctgggatatttgtttggcaggtccctaaattatttgataagcaaggtgggcagttgcttgcagtggcattgcttgttttctctcggacttggatttcagatcgtatagcttcactgaacggttggcttttatcttcatgtactggagatagatctgatggtataccttttacttaatatgttttcacaatcttgataggaacgagcgttaagtatgtcctggagcaggacaaagctgccttccttcggttaattgggattagtgtgctgcaaagtgctgcaaattcaattgtgtcaccatcactaaggtaatattggttccctgcaattgaaatgttcctaccaggatgctttgggggcagtgccaggcaaatactccctccgtcccccaaaaaggcaaaccctgggtttccgtgtccaactttgactgtccgtcttatatgaaaattttttataattcgtattttcattgttgttagatgataaaacatgattaatattttatgcgtgacttgtctttttatttttttcatatttttttcaaataagacgaacggtcaaacgttgggcacgaaaaccagggtttgtctttttttgggacggagggagtagataatacactttttttttaaagtaaagttcctgagcctttttaacatatacttgtcggtgggcttaagttttccttatagttctgatatctgtttatgtttgccagaagaatgtatgttctactttcctagtcaggatatttaactattgtgcattggtaactgattttgtgtattcaaattcacggcttgataaatatttctatgcagaaaccttacttcaaagattgcccttggctggcgaattcgcatgaccaaccatctacttcaatattatttgaaacgaaatgctttttacaaggtaaactctactgatagatttgattgtaaacattgttttcttgcactttctaacatttttttctcttttacttttttttccatgaaagctaagcagtttgagtttttctttttcaggtatttaacatgtcaggcatcgatattgatgcagaccaaagaatcacacatgatgtggagaagttgaccaatgatcttgctggcctagttaccggaatggtgaaaccacttgttgacattctttggtgagtttgtcatggtctaaaatattacccaggtgttctttgattaatcaggttttcttagcaagtccactattactctccaggtttacatggagaatgaagattttgtcagggcgaaggggagttgctattttgtacgcatacatgttgctaggtcttggttttctaagagctgtttcccctgactttggtgatcttgcaaatcaagaacaagaacttgaaggaacattcaggttagtgacatatgatttgcggtcattggcaaagttgactttattactaaggaacttccaagtattgaccttgttaatttcacaggttcatgcactcaagattgcggacacatgctgagtcaatagctttctttggtggtggatcaagggaaaaagctgtgagtttttcatgtctcataaatgctgcttaaaatttctagtttccacactataattcttgtgggcaatatgttttttgtgtatacaaatttcttgttgcttttgaacatctggtacagatctgttagtaaatttacatgccctaatattatgattattttatcgtaaatcagatggttgaagctaaattcacaacgatgcttaaccactcaaggactcttctgagaaaaagatggctatatggtatttttgatgatttcgtgacgaagcagctacctcacaatgtgacatgggggcttagtttgttatatgctttggaacacaagggggaccgagctttgacttcaactcaaggttgataaatttttcaaatccaaatgatattatttttgcatagaatttcccaacaagttctcaatttcggattgcaggagagttggcacatgcacttcgattcttggcatctgtggtgtcacaaagctttatagcttttggtgatattcttgagttacataaaaaattccttgaactgtccggtggtattaatagggtgtttgaactcgaagagcttctacagacatctcaaagcagtaagttctcagtacactgtaaattttactcgatttttttttttttggatgagagacagtagggagaaaccagactataaggggttggatctgtacaaaagaggctttctccactgtaaatattaagtacccactgttaaaactaactatcccagccactgagagatctcaaaattaagaagttaccaactctcagaaattctaaatcaataacgagaagttttccccatcataagttatggccttatggggcacccatcaaatcctcaatggttattctcagtaaccaagccagtgaggtatcagctcaataatctactaccagtctgttgcactctctgcaaacatatgcttgagtttgaagttatgccgttcaaatatactatgatgctaatttttaatgggtaattaacttctgacatctgcaaactaaagaacagttactgtctatattacagattcttaaatctgtaaactttgtcgaagggtgcaaagatgtaaatcttctgatacatcatgtctataaataaagaaaattctaaattgactgtctttctgctgtttccctggacactgaaaaccatttaggagtagtttttagttggagcccacattcttcagtacaatatcttgtctgatattgtccctgaattaaaaaacatcatgtctggtatacacctgttaactatctttaactttataagaagcaacatgtgctgattttaggaaccttctccttgttcaaagctacaaatcagcacatgttacttcttataaagttacatcttaaacagatttgccattgttgatgaaattgtcaaacttgatgttttgccatttgttatcttaatgctacgaattgtagcttcatatgttactgttgtttttctagatgctgccatgccctctaatcctattattgcggcatcggaagaaattatttccttccatgatgtggatatcgtaacgccatctcaaaagctattggctacccagttatcttgtgatgtatctcaaggaaaaagccttcttgtgactggtacatcatctggcagcttttcgtcctagcttttatttactttcatgtttacattatatgttctaatatctatcatgctgttttcttaaggcccaaatggcagtggcaagagctccatttttagggtgctccgaggtttgtggcccatcgcttcagggaggcttaccatgccgtctgatggcatctttcatgttccgcaacgtccgtatacttgtctaggaaccttgagggatcagatcatatatcccctctctcatgaggaggcagagttgaaggttctttcattatacaaatcaggttagtgccagctaactttgaaaaggaaaaaatatctgcctattttaactaatgaatttttaagcactcctttattttgattatggcttttaacaaacttctatgttgaccatttcctgttctgttatgagcaatgtatttgttggtaatgtaacatcacacccttatccttgatgatgtaggtgacaaggcaataacttctgggtcactggatgatcacctgaagacaattctagagaatgttcgattggtctatcttctagaaagagaagggtgggatgctactcctaactgggaagatattctatccttgggagaacagcagaggctaggcatggtcagtgattttgcttcagcttatatttgttgtctaactaatttccatttgttttttatggatatatacctttactaagtgggtaataaatgctttctttcgttttttatggatatatacctttactaagtgggtaataaatgctttctttccaggctcgtttgttcttccactgtccaaaatttggtatcctagacgagtgcaccaagtatgtagcgtatagttttttaatgttctcatttccattttttaccaataaatgcacagctcttataaagcatactcattgcagtgccacaagtgtcgatgttgaggagcatttgtacaagatagcaactagtatgggcataactgtcatcacctcgtcacaagtaagtatcatctagatacccacttatcctaactcttcaaatggtgaataaaaaaaaaacatggttttcatttctatccattttgtttctagttgatggtattttgcatcttaagcttacatctttgtcagaagtgaaatttgggttgatgatgcctttctctcatttattcatttgcagaggcctgctctgatacccttccattcgttggagctgaaactcatcgatggtgaaggaaagtgggaactatgtacaatcaaccaataattgatgtggccaacttgaatttttgacgagttttcatcaagtgcctattcaccagtggctgcctttacaagccatgaagaaaataccaattcacattaggagacttgcatactttcacgcagcatatgcgcttatacgagattcttttttccttggttagaggtttgagatatagcaaaacaacatacaggagttgtagagtggaaaggtagatattgacttgtagcccctaagaagatagatagcgtagtacataatttgtccttccagcctaattgattggcttgtagcaattgtaacacggagcacgaagtgtgcccttgcaaatgttagctcttttatatagaaaaaatatcttttattttgttatttcggtgttatgtttttttgttccatgtcagttcagctatatactagtttgaagtttgaactttaacttgtccgattccagcatctggtacatatctagggcctgtttgggggagttttagattttagattataagaagcagctgtttggtagccaacttctgagaatctggaaaagctctgaaacccagcttctggctttttagttcatttttttcagaatctgtaattacagattctctgaagctgtggactgtttagggcagcttctagcagaagcagtttttgagaaaagctgtagctgggataagctcccccaaacagggcctgagccatacacgaaatggaacaggaatataaatttgaaaattgctatccatccttcgcccgatctttctgataatcgtcggttgattttgtgagaattggacgcaacgtagtgattcgtatgcgctccggcaagcttatcttcttcagtaatgtagtgattctgattcacgatttcgcatgtactcctgcaggctgcgtttgatttatcttattggccaaggctctgtttagatctcaccttataattttttactctgtcatatcgaacgtttgaacatctacgtgaagtattaaatataggataaaaaaactaattgcacagattgcgtcacaggacgaatcttttaagcctaattgctccatgatttgataatgtggtactacagtaaacatttgttaatgatagataaattaggcttaataaattcatctcgcggtttacagacggattatgtaattagtttttttattagtgtccgaacaccctatgcgacaccctattactatataatatttgatgtgacatgccaaaactttatatccttggataaacaccccccaactattccatcgtttttatgagtactatttctctaaatactaaatggtttgtgagctctgtttctcaaactaacgttttgtacaaaagatatttataaggaggtttattaaaaaaaccacataaatttattttttttaagtttatagcaatcaatataagtcctccctccgtcccataaaaaatccaatcctggagagaccatctgttactactatctccgtcccagaatataagaagttttagagttagatacggtattaaaatatgtaaaattaaatgaggaaagattgtgatttgttaagaaatagaggtcgataagaaaagtgaatggtttagggttgtgattggttgagaagggaatgttggcgaagaagttttgtattttgggacaaattttaagtgctaaaaaaaatcgttatattttgaaacggagtgagtagcaccgaaaataagctgtttttgtcacccgtgagagcatctcgagaaaaaaaaacatgactgtctcaaattcgattttgagcgtttttcgttagaacttggtttttgtagccgacgattaatactacaagagatcgtgtaaagtccgaatcacagcgtattaatttgcttcacttttcacatggaaacgaacgaacgaaacagagtttgctaaggcttttgctgagagaggagcacgagcaatccctgtgggccgacgaggatctcgctggcgaagctgacgaggccgaaccacaccaccggcgtgacgtcgacgccgccgagcggcgggatcaccttcctcgtcacggcgaggagcggctccgtcggcgcgtacgccaccacgtaggggaactccctcacggggagcctcgggtaccacgacatcacgatccgggcgatgaacaggaacccgaacgccgacagcgccggcccggccaccccgatcgccgccttcgccgtcgctgggtccagctcccctaccaccgccaccgccctgcacacccactccgccacctcctgccactgacgctccggtgcagcagcagcagcagcagcgtggcattggccggtcatggccgccgccgtcgtcgccgcggccacggcgagctggccgtgtgaccctcgctgctgcttcacatcgttgcttcttctccttcttcctccttgtgctatctcgatgtcctgtagtttggagaaatcaatccatgtcgatgaagatgaacaaattaaacagtgcatcggcggtgatcgatccagcaaccaagaagatgattaccttggcggcgctggcgacgatgcacctcctggcggagaagagcatggacactgtcctggacatggaggcttccatggtcatggccacgaggaggagaggccttccttgctttgccttactttggataaggcgaattgaagagccaaggtgggggagggaagaagacgacactgcccgccacgttgctctttctactgggcctccaattgagacggcctaagcccactggcgatgcgaccaaaaaaaaaaacaaaaaccctacggcccaacacaagcaatcgtctcccaacatcaccgcggcggcggcggcggcggctttccacctccccgccggcttcgcgctcccaacctcgccgtcgttcgtcatgttccggctgcgctcctccgctcgcctgctgagagaggtgagccagccaccggcggcctgctacttctagttctagggtttagcgggtgcttctcgcttacgatttcagtatggcttgtggttcgcgttgcagctacgggaggcgtcgcggtcgtcggggcgccgccgggaatggctctccggcggcgcagtagcctccgccgcgcggacgacctcgctcctgcaccctctgcccgggctcgacgtcccgcagtgcctccccgaccagctcggcgtccagcccacccgcgtcaccacgctccccaacggcgtccgcgtcgcctccgaggacctcccggtattggatactctatgttcctctgctgtgctgcggcggcggcggcggcggcggcgacgaggctgacgctgtgtgagggtttctggcgcagggcccgtcggcgtgcgtaggggtgttcgtggattccggctcggtttacgagacggcggagacggccggcgtgtcacacctgctcgagaggctgtccttcaaggacacggcgcaccgcagccacctgcagattgtgcaggatgtggaggccaccggaggaaacatcggggcgtctgcatcaagggagcagacggtgtacagctacgagactctcaaggcctacttgccgcaggccatcgaggtgctcatcgactgtgtccgcaatccattgttcctccaagacgaagtcgagcgacaggtgctggactcatggatagactagcctctaagatacagcttattactagctatttgcagcgcactgattatggttgtttggtttatcaggtggcctttgccagagaagaagttcaggagctacagaagaaccctgagagatttcttcaggaatcacttaatctagttggatacacaggtgctcttgcaaatccactagtagcccctgaggagagtctcacacgaatcaatggcagtattattcaaaagttctatcacgtaattctcttgcttctgtatcacatttgacttataaattactcataaatgcgactcaattcatgctgttcgtagtttccaaacgatgctaaaatgcaagtgtagctctatctctatagctcagtgcctcagttaacaaatttatgaaaaaaaaatctattactgaacaggagaacttcactgctgatcgcttggttgtagcagcatcaggtgttgatcatcaataccttttagatgttgcagagcctttattgtctgattggcacaagggctccccagtggaaaggccagagtctaagtatatcggtggggattttagacatagagcagactcagaggtaatatacttcccatcaacactactttgcctattcttttggggtttccttttgctctaaaattgaaaccctgctcattcctctccctgcagatgacccatgttgctttggctttcgaagtgcccgggggctggcttgaagagagagatgccacaattatgactgtagtacaggtatacttaatgagtgggtatttactaaaaacaatctggcctatgttgacatctgcatcccaactgcactttctaacatatatccatgaatatgccaaaatattttgtagactttaatgggcggtggtggttcattctcttctggtggtcctggaaaagggatgcattcacggctttgtaagtaattatctctcgacaaccatttgactttagtaggattgcaaattgctacaatatggaataatgaatatagattagattgtgcttttaatagccgttgttgtgtaattgctgcttttattttgccgttttagttatttcagttcctaaagttttttttttaaaaaaaaggctataagttgaactgttatttctttgcagatctgaatcattctcttgacaaccatttgatagtaggattgcaaactgctacaatatggaataatgaatatatatttgattgtgtttttaatagccatttttgtgttagtgctgcttgtttagtaccctagtttttttggccgttttagttatttcagttttttaagtttttttttgaaaggctataagttgaactgttatttctttgcagatctgcgtgtcttaactaaataccacacggtcgaatcattttcggtatttagcaatgcatttgatagaagtggcctctttggtatttacttgaccacggtaagctcatctttatacattattctgtgcctcgaattaaatagtgaattatatgaaacatgttgcagcttctaccttgagttgttacttcgtcattttatcaaattgtgtgagtaggacttcaaaagggactagagctggcaaagtctgctttttcaaaattttgaagtgccattgcttcagttcgtttttgagtactagaagtttgaaatactttttttttgtttttttattggtccagccttcagattttgttgcaaaggctgttgatattgcgacaaaagaactgattgctattgcaacacctggacaaggtatatatcatctcctgcttgccaaaactgcttcagcatccactgaagctacctgatctgaaacttgatgcgatttgtatgtatacagtgacagacattgaattggcacgagcgaaaaactcaacaatttctgccgtgctgatgaatcttgaatccagggtaattttggaacccccatccccaatacacacacgcgcacacacacacaaaaatctttctgacccttttcacaggtaagtaacctgctttagtgtacttattttaatttgcaccaggtaattgttgcagaagatatagggaggcagatattgacttatggttgcaggtaaggcaatatctttcacacttcattttttagaagtcttccgcacagaaatcattgattcttttctattctgtcaccacaggaagcctgttgaccattttcttcaatgtatggacgaaatgactctagatgatataacagcttttgccaagaagatgttgtcttcaccacccacaatggctagttggggagatggtatatatgctttatgaatttgcgaaaaatatgaatgacacaaaataagaattaatgtgagttcattgactctccttctgcagttgataaagttcctccatatgaatttgtttgcaagaggttttgaagttctccgacacaatgatcagtggtggacatgaagatgggattttgtttacaatgttgtataatccaattctcgctatatttgggccttatcttagaaattgccctcgttatacacatcacctgatgagattagatttttgctatcatcttcaaacagcatatatcttgtgaaagtccaggtcaaacggaggtgaaagttttgcaatatctctcgaagcaagtttagcgattcctcgtcttgttatgcaaacatgcatatgcacttgtcttattgagtgctctgtaaacaattttcacggcgatgatatataggggttacggtgcggaaattgacaggataatggcatggccttgtttcgacaggacattatgttctcggactgactggtttgacttcagttgctaccgtatattttgtgtttcttttaatgtatggcaaagcaaatcttcagaaaaaaactagtacgaaatgttgcgtctttgcttaactacagagttggataataatggatgaaaagcaacaacactgttgagttcagggaaattgagctccccatcatctgaacttttacaaaacttccaacctgaacttgtacaaaattttcaacacttgctgcaccgacaggtcagtttgcacgtttgaagtgacaaaacaagcagatggtgcatacaaaagctcggcttgcaagtaaagccaaaataaggagttccaacattccattaagcattaatcgccagtcatcagactcgcagctcattacaactaatcccatcctgacagtgcacctgatcctacctccggcacagatgatagctgctcaagagctgacgagccaaagacggtgcctttggctttcttcttcttcttggtgtgatcgattaccaggccaccaaattttccatctcgggcaatttcctgatttttgcccttcaactcaagctctggattgttgccttcaccggagaacaccaagtctgcaaatggcatttctgtgtcatcaattccgtcggcgttcttctcttccttcttggcagattttgtcctcttggctcccttactaacctttttatcagtatgatcaacagaagagttgtcatccttcctctttgatttcttgttcttgacatgttctacagccgctttttccttcttcatttccttgccatcaagcagttcagatttggctggggcagcaatggtgacatccgggcgagtactttgtcctgcaggttcttcagggctcttaatttgttgctttgagtgtttccccttgcctttcttttttgtataaatgtcagtaggaccatcatcaggcgtatcagcatcattgattggtagattctcttctctagaattcttactcttggagctggcctccatgggctttgagttaaatatgcgtaggttgggaactaatttcttaacctgagaaaacatccagagttactccagaattgcatacatacagaaaggcagaaaataaacggtattaccttcttggctagaccgtctttctcagcaataggatttccctgcaagtttaggttcctcaagtagtgcaattcagaaaggacctaacccaaaaaaaaagaaaaagaatagaaaaaagatagactgagacagtgtaaagatattatgaatgtagaagggtgggagaaaattaatcagatgcaaacctccaaatctgatctcctctcaattaagttgtttcctaaatcaaggttcaaaattttgacattttttgccaggtctgatggaattgtctgtgaatcagacagagttcagcaagatgttacagagtgaccaagtggaatgtaacatgctttcgagcagaaaaaaaaaacaatgtgcaaaagagacccagacatatgctatccataagtccatatacatacagtgatcttgttgtgagcaagtctaagttccttcagttccacacacgcagtgagagaagaaccaattttttctatctggcagtgagataaggatagctgaggaaggtaatgacaaaacattagtcatgtaaaacaggaaaaagtgcatattaaagctgataggtcttttttttttgcaaaactaaataatacaaacctttttcatggcctttgccttcatcaaagcatcaccaatagtgaaaataggattcttggaaagaactgcagcagaaaaacattcagaagtaaattaggtggagggaacatcattattctttgcctgttccaaactggactgtaaaacaactcttttgttgggtgatgggtttgtactacaatatgaaaactgaatatggatgatttataagaaaactggtattttacatgcagaaagaaattgcaatgggcaaggatcttaatgttaaggttcccaaacttactatacttacaaaaactattaacatccttttggtttatcaaaattatcggcacaaatcaagaccatatcatttaatcattccaaggggaaaaaatgaattctacaggatgaagccactcagttcattctataattaattgagatctcactatgcataccaagtgtgttcaactgatgaagctggtcaagtttgcagatggaagaaatgttgttatctgcatgagaaattacagagatccagtcatcaagctaccagcagaaacaaaatacaactgacaaaacatagcatttgtgcatagcattaccatttagaatcaatgctcccaggcttgtcaaagatttgacctcatccattgttttaagtttattcttgccagcattcaatacctgtacaacaggagaggagcaactgccaatcattgcaagtgaagtaatcaggctaagatccttttgcggggcagagaagtaactcacctgcagctttgagaggccttcaacaccttttaggctcacaagcttgttttcaataaccgaaagccacttcaaattggcacagtttgatagacccttcagcattcaaaaccacaatgtgagtggaaaaaaaaaagatactctgatgaacacagccacagcaatgatttaatggaacgattagccatcaattctctacttcaatgaactcaaagaataatccagaccgaatgggacatcaaattagtccattatatgactttctaaaaggttattacgggattcatccttttaactattcaatgtttcagatggatttacccagtgcctatgcttgtagagaacacagtaacaccgacatcgcatatatccatacaggtgaaattcaccaagaatctacaccgatgctaaatttgttgtataaacatgtgcatttctcactagaatactgtgttttaacccgtagtacattgactagttacctcgagagtgaggaggcagttgtagccgaggtcgaggcgctccagattcacgaagctgctcaggcacgacacctacacaaaaaccaacacagcacagcaccgcacaacacaaggatgagaaaacatggcaggaaaaaaaacaccaatcgacgaggcagaggctacacagcaccgacgtcggagagggcgcggtgggagaggttgagcgacgtggcgagcgtcccggcggatcccgcctcgcgcttcgcctgctccaccgtgagccgcgccatctcctcctcctccggccgccgccgttgaggagggcgaagcgaagcaagcgctcgttgcggcggcaggcgagctgagctctcaagtctcaaagacttcaagagagaaaaataccctaacctaacaagggcgatatgcagctgacatgtggggcccactgtcagcctccacggagtatttctctctcttctcgttagagaggggggtaaagcgcaagagactcgcaacgcaggtcagagcggaaggggagaagaaggaggtgctcctctcgagtttggagaaaatttcccccgcagaggcctccgcttgctcgcggagatggcgatgaccgtcgaaggtgagggtcgctctgagtttccctcccccatctaagatttgctcaattgctagtctggttctgttcccgatttcggcgtcgtttgggctctccgattcgagtgtcggggtggcgggggattgggcggctagggttccggttcgagtttggtgttacgattggctggtgcgtgctttacggattagggcgtcgggttcccaattcatcgcgcatggtttgttgtaatgcttgtgaagttaaactttcccagatttagtcttggcattcggtgaacacgattatctgtttatatgtcattcatagaatcagagtgaattatccctgcaaaaaaaaaaagaatcaaagtgattagatcctccaagttagcaccttgtattgggtcttatgttttgccagtagatattgtagtccggcttacctacaattgtgcatgaaacactatcctgtatttcaactcatctgcatcctcccgagtttccaacagaacaaggagcataagccaaaaatatgcctgcaaaaatgtgaacttaaccatctagctcaataacaagtgtccctcagaatcgcttaactgatacccatgagcatttactatgtgcatttggttttgagttctagctctaggatataaattttaccatgtgcatttaaattattttggttgtttgctaccaacctgaaactacactgcttctgagatgtatttggatatcactttcttcaatttattgctaaaagcatacagtgatactgaagcatcaaactacatggttttgattcaaaatttgtaaccaaattctacttatgattcatggaactggacaatttgaagttaacatggagctctgcacatgcttgatgtatgtttagtccatcaaaaaacaacatcccagatcaacttatgttcttctttcgacctttatttgtgcaacctcatgttcataaaaaatatcatcgaacttgttcaaaagcacttcgaaaaccatgtcgtctttagattagcctttatgtagcacaacaccaaagatgagcatgaccatcctctgaagaaaaaaaaatcatgctgaactattaagcctttgaagtgtttttagctaaactgggaggaagaatatgcattaaattatggttatgaaattcagaccagcttgttgattttatagaatagtatttcatttgcatagagttacctttctgaaaatacagttcattttcactatcagctatttgttagactctagtgctccttattaggtcatgccatcatctttgttctcctgcaattggtttgaaagtttcactaacttaatgcttcttgtctttgcttttatacctttctgctggatgatgatgatgatgtcacttatcattgatgtgtgtcttgacagtgtaagtatattattcagattcttttctgaccattcttttacatttaagataagtgttaacaatataattgcttctactacaggctcgctggacttgcatttatgttctcaacaagtattcttttgcaaatactggtacataattctcacttgtttaaatctccacctagcctcttttatttgctaaaattcaggcttctgggtgctttgtttcatgacagttgctatttatttactcactaactatttcattactttgagaagtgagaacctaacagtttgatttggcattttgtttgtacaattcattcatgcacattactctgtatgtctgtcatgctaattatgttgtgaaattcataaaacttagagcaatctggagcatcaattgctgtccagaattactgtagaagagtatgcgtgctagaaataatacttcacagtcagtgaacaaagcgtgtagcattttgaagacaccatagcccacatgacggacatgctcttgttgtttgatcaggctgttggttctatagctaattatttttccttattttgatggtgcaggcttgtgctctgtacaataattggtggcctatgttagcaggtaattgttagttagttatcctcaatcagtgttgtctaatcctcgtcgaccttcaactgacatttgccatacttctgcagctcttatgtatgtccttgtaccgatgccatgcctattcttcggtggtggatctacccagttcttgactagcagagatggtggagggtatggtttgatttgttgttttcgttccagaaactttaccatacatactgtactacttggatgtaaactaacatatgtaaagaatagtttggaataaggaaattccttctgatttgtagttgtgacaaactaatgatagagtgtttatcatttcaggtggttcaatgctgcaaaattcctgactggtgcatctgccatgggaagcattgcaatcccagcaattctgaggcacgctggcctaattgagactggagccatgttcatcgagttcacgtccttcttcatccttgtatgcacagtgatgtgcttccatagagctacgctggatgaagattggtaaaaggctcgaggcacatggacacaagaaggtaaatctgtttcatggtttgcttctcagcacgtacaagagaaattccttagtggacactaacatggacatgtgtacaaagaagcaaatatttgagttggcgtgactgtctgtataaatgctcaaagatttgctgatctagcgacaatgccaatgttctatgtgcacttttcatgtgaatactcctcacatgatctatgggcaacctgtcagccatccgtgtgaaatgcgatcaaacgagcaggcaggcgccctgtttaattcccttgattggttctttgcattttgaagcatttggccaccgtgcggcagctcgtctcctgctgcatctctccaccgtttcgcttctctcatccctatcccgcgccaccgctcagaatgtcttgggctttaatttttctgtgttatactgttctcgatcaatgcgattaattttagacatgtgcttgttctaaaaaccaattcatcaaatcaatactggacagtttttactacttgggtttgaagatgaagattttctttttggaggggttcgattcagaattgttgcagaattcctaacctcttctccctcttttcaaaccatctttttattataagaaaaaatactttaaaaattatattaatttatttttcaaatcatgcgttaattcatcgctccgttttttatgtgtatggatgaagttaccaacttcttcaaacggtgcgttcctatatgatatttgtgctgtaaaacaagcagagatatttcacatagcaatcgagcattcagaattttatttaccggccaaaaacaggtaacctctgtcctcttctcagctccggcttgtttttctttttagcgtttttaaaatgtctttatgatttataaataacaatccgcctaatcacaacgaagacagtttggccgagtggtctaaggcgccagatttaggctctggtccgaaagggcgtgggttcaaatcccacagctgtcataatttttcttccttctgattgattttgatttttaatcctctggttttttgcgttcccagatatataggttccgtgctcatggattttcgttctggtgaaatttgcaaggattttcaaatcgtttaaaatgttatcatctcagcgatgaggtaataccgcaatacatcgagcacaacaacccggagagaaatgcagaacgtcagtgtgtgtagctatccagtgaagtatgagattttcagtagttcggtcagaaatatattctagtggacacggttttttcccctcccttttcctttttgttcttttttttttgggggggggggggtggggagtggatagagttcagacagcaaaacaaataaaaaacaaaagaaaatcacaagaggattttgttgacagactgctgctgaaaatcagagtccatggtcaaaaaaaaatagtttttctgcaggaagacccctgaagaagtgaagagagaagatttagagaagaaaaatgtacgagagaggagaaagacagaaacattgggagggtaggcaaatcaggaggcgaggaagtagaagaaaccttttgcaaagtccatgggacaagcaagaagtcttatgaaaatatgctaaatgatgcttagctggctcaaatagattcttcaaggtatattatggttgcagacagttccatttttttttcatttagaaccttattttgcataaatttacattaccaagtcaaacaaactaagtcatgctgaaccttccttaagctggtatgctccatgatattgcaacaaagcaaggtctaaatggaaactgaccatcctgttgaagtaaactaagtactgaatgcttagaaaactcctgtttggaccaatccaagcaagtttcattacttttgtactgctgggtcaccacgccaacaagttaacaaagtctttcacacatctcacatcgccatttggccatttcctctccaatggtcatggccccaataccccagccatggcatcagtggccctttctcatcctcttcttccttgtacttttctcctgtgaatctaatcttccctgcaggaatggtgtagaggccacacagagagtcttcctctatccacagtctccaaaggtctcctctattgtcagcaagggatacagaactggatatcacttccagcctccaaagaactggatcaatggtatgtctgcatgttttccatcagtttttacccttttgactttggctgaatccaaccagaaactgtattatccaatttggtgttccttttgtttcttgattcaagaagaaacagctgccctaattagttagtatcttttctagctgcagaagttaagccgtgtggatgagcttaatttcttgtgtctatatgaatttcatggtatagagaggaggggggaaaggtaggtaggcaactcactgcttgtgtgagctctactgctgattgttgcacacgtttatggtgctgcagattgattttcagtaaaatcgtaatatggttatttctatgtttagattttcgctggaaaatatttaccgctgaaatgttgtatttgtggccgtcttttgacgctaggcatcatatttgtattaacagaacgaacagtacaacaaatgtggagttttctcagataaagctactccacatttgttgtactgttctgttaatactagctccagttagaaaatgttgacctagataattctaagatttgttctaaaaggcctaactacataacttttttttctgaatatttagcagatcttttcttaaacataggctagtaactagtaatcaagcatgtactgattcttgaatttttcctcctgtttgctatgtcttctatattggacaattcttctaaagctgacattctctcttctttttcaaatgttccatgaaatgacaatcctggcaaatttgtggcaattcaaaagatccaaacggtacgcatcttcttcacataatatgcatccaaacaaattgtagaataaactgagacattgcgtgcctaaattatctcaaaatttacagggccaatgtactacaatggcatctaccatgagttctaccagtataacccgaacggatcagtctggggtaacatagtttggggccactcggtctcgacagatctcatcaactggatccgtcttgaacctgcaatagaaggaaatactccgagcgacataaacggttgttggactggttcagcaacaatcctcactggtgatcaaccggttatcatatataccggtgccgacacggagaagcgtcaggttcaaaacattgtgctaccaaagaaccggtctgatccttacctgagggaatggaccaagccaaaaaacaaccctttgatcgaaccggtcggtccgggtttgaactcaaaccaattcagagatccgacaaccggttggataggaccggatgggctatggagaatagcagttggggctgagctgaatggctacagtgcagcacttttgtacaagagcaaagactttatgcagtggactagagtagatcacccattgtattcttctaatgcatccaacatgtgggagtgcccggatttctttgcagtattgcctggcaagaacaatggactggacctctctgcagctatcccaaatggcgccaagcatgtcctcaaaatgagcttggattcctgtgacaagtacatgattggggtttatgatctgaaacatgacatgtttgtgccggatactgtcttggatgacagacgattgtggttgaggattgattatggcaattactatgcttcgaagtcattcttcgattcgaaaaagggaagaaggataatatggggctggactaatgagacagatagtacgtcagatgatgttgcaaaaggttgggctggcatccatgtaagaaaatcagcctctaatctcctccttgagtaaattgcatcgtcggtacacaaacttgtcaggtgggtgcaacctagtgcacaaacttgtaaaatgctcgttttggtgcatgaacttgtttggtgcgtgaggaggaaggtgaaaaggacactacaatactacatggctaatcttatcgatttaggggccgattaagatactatgtaaacatatatctaaaaaggttgctattaaacatacacctattcaatcaaaaataaaaaataaaaaatagaataggatataatgatagtagaaaatgatgaaaaagccgagcactgatttaagggttagaaacatataaaattcatcaattccatgatgaaggataaagtagagaccaaatttataaatattgcatgtcttatgcatactcactagatgtatgcacgtcacatactaatcaacatcagcattataaaattaacattgtcaagttattttggtcctcgttcgcacgaactagacaagttcgtgtactgaaacgagtattttacaagtttttgtactaaattgcatccatctaacaagtttacgtaccaccaatgcaatttactcctcctttaattttatactatggaagcaatgttttagccttagcatgtcagtgtaacatactgatcctcattcgtcatttcataaaggcaatccccaggacaatttggttagatggtgatggcaagcgattgctgcaatggccaatcgaagaggtcgaatcgcttcgaagaaacgaagtcagccatcaaggcttagaactcaagaagggtgatctgtttgagatcaagggaactgatactttacaggctagttccaatttacctcaacaaaagtattatgttttttttttgcagacactgtagctaatatggcacaccattttcttgaagcaggcagatgtggagatagattttgagctgacatccatagatgctgctgatccttttgacccttcctggcttttggacaccgagaagcattgccgagaagcagatgcatcagttcatggcggcttggggccatttggacttgttgttcttgcctctgataacatggacgagcacactactgtgcacttcagggtttacaaatcagagcagaagtacatggttctcctgtgctctgatctgagaaggttaatgctttttcttcatccagattctgttgatgcttaagaactccctatttgcattgcactgataaaagtgaaatgatatttgtagaaatctaacctttgacagtaaacactaaaaaaaagaacgaagatatctgaaaagtctgaacttgctcttttgtctgacagttaattgtccaacattgtgttcatcatttttacttgtgcagatcatcgttgagaccaggactgtacacaccagcatatggaggcttctttgaatatgaccttgaaaaggagaagaagatctccttgagaactctggtgagtgaatgaatcagtgactctgcatctgcacgatcaacacaacacatctaggaagtgaaatgaacaaacagtccgaaacctgactcgccggcgtgcgtgcagatcgaccggtcggcggtggagagcttcggcggcggcggcagggcgtgcatcatggccagagtgtacccggcggcggtcgtcgacggcgccacccacatgtacgccttcaacaatggcagtagcacggtgaaggtgtcgcagctcaaggcatggagcatgacgagagcacaggtcaatgtcaggaagggatgaactgattgattaatcaaaatggaaacaagagagcaacatattacatgctaattgtccagtaagtagttaattgactacccattcatcagaactcctttggtaggaataagaaggaaatccagaatcaaaatttttagctgctcacagacttgttgatgacatctacttgctttgtagcaatatgtttttacttgtagaaaggagatggaaatcaaatcattgttaagaaatggttcgcaattggtaacgagatactactcttcgtgttttacagtcgaactgtaaaattcgttgtccgtcagttaattatcctgctccaactctcatccaaaatcattccgtttccacattgaatttattacttacccaaatgatgttttttactgagagaattcatttcagcatgaagcctatggatcatggtttcatgcttgatgaactgatgaaaaaaagtactgacttatcggtgatgttattgttggtggaggggttcggggaaaaaaaatctccgaacccaaaagaggcatttgggccgtagtcgtaggacagattcgatggcctttcagctgctcctcagcctacagtgtattcttcttggcaaaagaactctgcccaatcagcgaattaatttggcaagcgaaggcaccggcaagaatacgtttcttcatgtggctggctgtaaaaggacgctgtctgacagctgataatcttgaaaaaaggggatggcctcacgctgattgctgtactttgtgccaacaagaacctgaaaactgcttacatctgtttatcaactgcgactataccatcacagtgtggagactgatgcggcaatggatcagcgcttacttccccatccctgggagcgaaaacacatgcctgacagagtggtggttgcaggccagaacatgttttcggaagtgctacaggacaaacttcgacagcgcttgtatgctgatttgctggcagatttggaaggaaagaaatgcgcgtgttttcgaccaaagatcgagaagccctaaccagttagcagaggctatcaaagaagagatcttagtgtggaaagaagcaggctatttcgagatttgcagatcttagttttttagttttttagtgttgacgttccagttctttagtttgccgggctgtggttcctgccacagtctaattcgacagcctcctgtcgttgcaagcgaaaactacttgtactttgattttattcctcccaatcttaatgaaatttggtcgccggttccttcggccgacccggcagattcgatggcctaagtgggctggcccaattgctgttgcatatacggcccaaacgactctttggggttcggagatttatttcccgacccctatgtttcctgttttttgaatcagcgtgtgttgtttttctgagctgaatgttgttgtcgagagctgttcttggacggattgcgaaagaggatgtactacatctgaatgaaatggaaggtttgctaagtttttgaattgatggactatgtagtttgatacgacgttgctttgacgatatcatcgcatcattgttcacaactggttcacaatcggtaacaagatactcgacttgtttgatctgcagattcgctgtccgtaagttaattatcctgttccaactttagcttctcccagacctattgatgacatctactagccttgtagcaacatgtgtacttgtcagagttaagaccgttctctcccccgagtcggttctccccaggggcggctcgggaggcgacccggccgcccctcttccccctaccccaccccccgaagccgcgcggccgcaaggacggcggcggcggggcgctcctcgtctcctcgcgctcggacggcctggggagccacccggggatgggctggcgacggggtaggcggcggtggcggcggggacgggcgacggtggctgctgaggtgagtgcgcccggtggtgtttgtgggtggcgacggcggtggtggaggccgcggatccggcggcggccggcggtggcgtgagcacgcaggcaccccgcggcggccactggcgtcctccggcgcccctctaggcgtcggccggcgttggtggtgagggggacggccggatctggctcccttgcccagatccggcgtgtcctcgagtggggacggggtggtttggcgtccggccgtcgtgcaggtgatgtgcatattgcaggtaccctcggtgtgtaggtgacatttggtagctcccgtcgtggatgctatagttgatgggtgctccaaggcgaaagtcttgctccgctctcggtgctagcaacggcgacgcccttgggcgccgttcactttcttgaaggcgtttgctactggagccctcgttcaactccacttcaagagttttctctgggtgaaaacctagattcgttaggatcggacgatgacgtcgttctgtcggcgtgaccttcctgaaggcttcgttttaggagtttatctcttgttggacaactgtacttaggttcagtttgtcaatgtcggggttttgccggttttcctttaattaaccgtgctgttgtaaggtttttgggtccggtttcccttataaactggatcaactctcttcttctatagtgaattgcaggagctccctgtctgtcccatcgaaaaaaaaacatgtgtacttgtatagacaggagacgaaaatcaaatcactgcgataaagaactggttcgcaattatggtagtacgtgcgataggggaagaggctcctctgacataccgccctctgatgtgggtggctgacatgtgggtccaccagctgtgaggctcatatgtcatcctctcaaagttagagggcaatacgttagaggatcacgtttcgtgcgataggacttaggagcggatcggagaagaaatctccgaaccagagacatttgggccgggggtggatggtgattgacccagttcgtactaaacggctggcggcgcaaatgcctcttcggggtttgagctcccatcggatggcaaaaaaaaaactaaattttaaattttcaaatttgattttgagatatttttaaggtagtttttttttcagcattggcttttaagtcaaaaaacatatatataaaagttttacctataaatccatttttattccctaataaatagttttggcttattatgaaaaaaaccaaacgatggggctctcagactcttctacaccgaaccccacaaatcacacgtacgcccgtgcgagactcaacgacgagtgcaggtggaagcccaggttttcgtgcgatgattgtttactccatgaatttgcttaatattctactgagtaaaattgaatcaatgtgtttctttttacagaaacacaaacgcagacgtccatattgcgcatatactcactcttataaatacacaccctacctctataatcacctttaaaaagttgggttggcgtatcttaaaattgatgaagtcatcacgaacacattgttgttgagggtaggtagtctatcactaaaaaaataattagccgtaaatgcgagtattcatatcaaatctaagttttgaattcggatgagctggttcaccgtaagatgaaagatgtttttcatattcttggaatgcgatgcagtttatatagcccaacgtaaaaggctgactaaattttgcattggttaagtacatagttccatatgacgttgtttttaccctaacatcacaacattgttcaccagtttgctagtagttaaataaaggtaaatgaattgaggaaaacaatgtaaataagatgaggtaaaaaaaatcgtaaatatcacatcttgttcaccagtttgctagttgaataaaggtaaatcagttgaacaaaaaaatataaatcagttgagttgagcaaaataatgtaaatcagttgaggaaaaaaataaacataaatcattttggagaggatgggctcgaaccggagaaaaaaaacgattttgctatatctcactcgaaagattttttcttatctctcactcgattttcttactcaaatttacagtgcattttctggtaagttacagtgtaatttatgaaacttacactgtaacttttgtaagttacactgtaatttttgaatcttcgcatgtaaattttaaattttgtattggatttggtctttttattgaggatatggtaatttagtgtccattatggtatttcttaattgctttttgctttttattatatctatcggattttaatctaaagattaaaaatctgtgtgatacgattataaaaatctttcgaaagatgtataggtactcccaaaaaaaaaataaaaattcaactgagggcccatccgggttcgaaccggagaaaaaaaaataaaaattcatccgagggcccatccgggttcgaaccggagacctattgatctgcagtcaattgctctaccactgagctatggacccttgatgtttccaaaccaaacagtttattacttgatttccatatttagcaattagccgattcttaatgataaaaaataattaaaatctaaatgaaaaatcacatatttcctatagcagaataatgcgtgacacattttatgagaaatatttttatttatcttatacaatattatagtatatttttttagcaattagcaaacacatgcatttagctagccatctaaaatgcacatactccctccgggttaataatatttgttgttttggacaagagtatagtctccaaaaaataactttgaccattattttctgttataatatgtataaaagtattaacaaatatatgattttattaaaatactttttaagactattctatacatgtaatcaccatatttgaaagataatgattttaaaaatgattcataatcaaagattctaaagtttgatctcatccttatctaaaatgacaagtattatcagcccggagggagtagtacttttagtcaaaatattcattttacctatcgtgaggacatggtcaactccaatctataattatgtgtgtagggtttattgcgtgtacaaattaactgggggaccgaaatttcagaaagaaaatatttgaagtttgacaaaaaaaattgatagaatttgaacagatgttactaaattcacaagtattgaaattttcggaaaaatatagtttcgtaccgggggttcaaaattcccgaaattttaaaaatttcaagccgaaattgtaaaccctggatgtgtatggattggaccaaaccatatatatatatataccccgatcgagtacaaccaaattagtgttgaattcgtattatattaacatgaattatctgtaaacacgtacgtttggtacgactccaattccgagattcttatctcgtgggagctaaagctatatcaagcacttccaagatcttggataacataggtaaagctaccacaccgcttccaaaagttacactacaagcatggagcggcatattcccgccgctttctcagctcctctccaccatagtagctataccaaatacacccttaatcgatttagtaatctttctagcgatagaacatactagcacacagaagggagtggattttaaactgacatcctctcgttatttacatatcatgcaaataactacaagaaaaaaaataagataaattaatatgtgatatatcactccaccaacatgtaagttaaaatttaaatttacaagttgcaacataaaacaaattaaactatagatagtttacgtatacaatcaaatttgcctttttttaacttgtagaaattaaatttgatgttgcttatttatgaagtaatatatcacaaattaatctaccttaatgattctttctttaagttttttccataattattcgagtgacacttaaacaataagaggagtctccttaagagtttagaatatttcagatgaccaggtgcacacacaaaatagctagcctcctgggtatacacgtatgtttaacacgaattgttcgacaatcttggacaaataatttagtatagttcggcaagcaaacatcaaacaagacaactatgcatagatatactactctcgtgctttgactcaatatatacagcagcattagttaacggttacaaaggcacacgtcgacacacaacacgtaagagtaagagacgaactactaatccaataattccatgcttaattagtacagacaaaaccaacgcgtcaaaatgaaagccatctgaattaactggagtatcttccaactactaatactaattaatctaaccactaaagtctctttcattgcatgagataatccatggcttttcccacaaattcattcattcattaattccatcactcactttgcatgatggctgctagtggccgtcgacgacgacgacgacggcgccgccatctccacgtagttggtgatcttctcctcctcctccggcgacggcggtcgagtggcggcagagtcgtcgtcgccggccatgttgtggatgcggaagagctcgcccatctgctcgagcgtgcgtccacgagtctccgggaggtaggtgaagaagaagagccaagcaagcgaggcgacgccggcgtagaggaagaagctgccgccgatggtgatggccttggagagggagaggaaggtcatggagatgacgccgctggtgacgcggttgaggccgacgccgagagcgcagccgagggcgcggaggtggagcgggaagatctcggagctgtacacccaggtgatggggccgaggccgatggagaagaaggcgacgaaggcgaggatggaggcgatggacacggcgatggcccagccgccgccggtggcgtcctcaccgatgacggtgaggcctaagccgagggtgacgagggtggcgatcatgccgccggcgctggccagcagcagcggccgccggccgaagcggtcgagcgtgaacgttgccaccaggatgaagagcgtcttggtgacgcccacggcgcacgtcgtgccgagcagcttgttcttgtcggtgatcccggcgctctggaacacgcgcgggctgtagagcacgacggcgtcgatgcccgacgactgctggaagaagtggatgccgagcgccgacaggagcacgcgccggacggccggcgtcggcgacaggatcagctccttccacacgcgcctctcgccgccggccctcttcggcacggccacgacgtcaccgtcgaggtcggccgggatggccaccgcctccttgatttccgcgaggcgggtggcggcctcctccgccgtgtccgaggtctcgccgaggacgaccttggcgtcggcgaggcggcccttcatgacgagccaccgcggcgactccggcatggcgagcaccatgagcgcgagggcgacggacggcgccgcgccgacgccgagcatgaggcgccagccgagctgcaggcggaggcgcgagaaggcgtagttggagacgtagccgaggaggatgccgaagttgatgaacacctccgggaaggaggtgaggaagccgcgcgacgacgccggcgagacctcggcggtgtagacgggcgcgatcatgaaggcgtagccgacgccgatgccggcgacgaagcggccggccatgagcatggggtagttgacggagaggcccatcatgatggcgccgacgaagaagatgaccgcggcgaggatgatggtgaggcggcggccgatccagtcggaggtccggccggcggcgaaggagccgacgagggagtagaggttgaggatgccgagcaggatctccacctcgacgtccgtgatcttcatgtcctccttgatgaacagcgacgccccgcatatgtaattaatgagactgcatatgcaacatgaggctctctggagactggagagagcgtgtatatataggcagtactggtggctgtgtgtgtgatcgacggtcagagtaatcaattgatgacagtatgacatttggagcgtgtatatataagccatactggtgtgtgatcgacggtcaaaataatcagttgatgacagtatgacatttgcccattgcaacttgtttacttgtaaaggttggaacttggaaggcctccgtgccgagcccagctggctcgtcatccaccctatttggaaggcctccgtatcaactttgatcctgctaccatcaccatcgacaggtacacccaaaatatttcaaaaattcatatttttaaaaaaaatatttcaaaaaatcatattttctttggatccctcgtgggtttggatcccatgccactcgacttcattttatcagtttctcatggattctcctttccttgatttcccttttaccatcaaattaaaatctccattccttgatttttcctgtgcacttttgtttattttatgccatctagttacgaattaagaagcgggaaagctggacacatgtgcacatattgcctcataacaattcacatactgccatactgcgatacaaggcagtgcttctagcaattcagaaagtgagaaatcaacacaaaacataaccagtcgagttccaaattgtcttcagctaatatattgatgattcaaacagatgctaacgatgcaagttagaagagaggtaaatccataagtcataacaactccaactccaacactcaactatcaaatatagctgattctggcccagttctcttagacaaaggcgtttggacattgctaagagcgacgtagcaaagaggcaatcctcgacacaagactatatagataactcatttcgggtttttgagcacaatgatgaccgagtccccacgtaggaacatcttgctgatgaacctgtccttgttcactggaagagccttcttcttgcctttaccagtctttggtacctgcagcaagagtaacacatgttattactgaaaacagcactacactcaactggaacaaaagttcaaaacttcagataacgccttgcatgtacctcggtccacatctccctgacattctcaagaaccatgttgcaatggctatcaaatgccctcacacgacctagtaacttcttgttgttctggcaattgataagcacctagaaagaagagcatacacaatcaaaacaatgcatatctttagaagcatcaagtgtagtcaggagaaccacttatggtcggctaattctataggtaactcctaaagatacacttattaatataaccgcactgctagccgcaacaaagatctgaggtcggacccatacaatatacatcaagcagatattttcagagtttttgcctagtgtacacaaaatacagtagcagctatgaagaagtcagcacaaatttgcaactatggcttgttttcccacatcatacaaatgaccaaaattgacaaatggttacacatagcacagcatgataaagttgaggtatctaaagaaaaagacataacaccaagtgaataaattcaacatcctagtaactgaaagcaagatagcatatcaaggtatctaaaccaaaagatatcgcagggaatgaatgaattcaacatgcagtaactcaatatccatgacaaaatggcatatttcaaggtgtaaagggcaaagataggtgcgtgaattcaatccagcaactcatcttgctattgcaccaactcaacactccagtaagtaaacagactcagaaaatcaagtaaataatgaaatactaatcccacaacccacaacgattctggtcgccaaaagttcaaattaggactccatacgatacacaaacaagagcagtagagcatgttaaggtaatagcatggcgagcgcgaacctaagatatggacatacctagacaaaccatagcacaatccaagactactgtttgaactgataaaagtgaacaaaaagtaggtaattaagaactacataactaactaaaacagaaaacaaccttactgaagaagtgaagatagactaccacgttgcaatcaactatgtttcagaaaatgaagtggcagcccagatgcaacatttacactaacactacatgaaaagatgttgactatgaccaattattcagatacatgagaaaggctccattaatttaacatgacttacagagcatccttattggctaagagagttgagagaactacagttcattcacccgttaggagaagggtacttccttatttcagaaatccagatgttcatagacagttcaattgcaaacgaatcagcttctaaggaatatcaccaaacattcaaggcaaatcggttgccaaaacttttctaaggaaccccaacccatgagccagtttacaatctgtggctacattgtccattgctctgttgtaagaaattaaacttcttttgttctttgcattagatgcgataaagcttatcttatagtcattgagttcgcagatattagagttagtagaattgtctgatgtatccagttggaggatggagaaagctttaaagaaaaggataattacaatactgtggtgcccccacacttttaccactgtagataaaagtgtaccagctgtgaattattatttaacaaattcttgttttgccaaaaaatagcccaccatcagagatcgcacagagtaatagttagaactacctttaattcgtccctaggagtctgaaggccacctcaactccatcttatacttgcaaagagcaattcctgtaaaggggttatatagcaagggtgatcactttcgtactcagcaagtcaatagtagcaaaacatagatgcataaatgatacctttatatcctacatcatggtcattcatatttcatcatcaaatctaagtttattttgtaaaagggtttccaaaagggacttataaaaactaaaatacactcataacattgacaaagtttgtagcaactcctcgtacaaaagcatgaatcacgatttaatttagcactgtgcaggcttgtaccgctttacccacagctactctgatttttagggcctttgcattccattcgattgctagacttatcagagtacaagactttttccctcatttccatttactacactccacgacaccatatacgccgggtcgtctaatggggtttatatcatctcccatctatcactatgcattcgatggggttttatatcatctcccatcattgctacgcatttgatggggtttatatcatctcccatcctaactactcatagatggggtctatatcatctcccatctgaatactatgctcttgacggggtttatatcatctcccatcctcctacaactacatacccatgtggagtataataaacttaataaggtactaggcccagcccatcttgagacagatccatggttgatcggtatacatggttctctggtacaagtgaggatcaataatctttatatgtatatcaatatctccatcataatcagtctagcaaataatatcatctatattatatttattttatatgaataatggtttgatgcaatactaagagtaaaaaattttataaaataggtttttaattagagggagcgtatcctatgcacacaggccctcacgtgtacacaccgtgtacaccaactaaaaattatcaaaaaaattctaggaaaattcatacatatactttcaatagtattacatctacgtgcaaagtcgcatcttcaaattcattctacatagagaataacaaaaaagataaaattctgacaaaattgcaacctcaaaactgtcagattttttgtttttttgttacagttaaaatataatgaatttgacgttaagattttaaccctaggtgtaatacaattgaaagcatgtgtatgattttttctagattttttggtgacattttttagttggtgtgcacgtgtgtacacgtgagggcctgtgtgcataggatatgttgccttaattagaatagaaggatcatcatctatcaatatgatcaaagagagacttgcctgagtttctatagttttttaattttttgaggttaataactgcctagcatttgccgagcctgagtatctgtagttgaaatcgaaattatctagtgccgattgacccattttccattctagctttatgaaacttaatcatgatgtcattgttttccaactaattgaaccatgtgccatgaattaatattaatgatttctatttaggatttaattaagtgcgcgtcgtttcaaatatgcacataataaccctgtattaagctgatacccgatgggtgagagggggatctgactattcttatgttcttatgtaacaggagctctaaggtagtttatcccctcaattcagtattcaatttgtcagaacaagcaactcttagtttatcccctcaattcacagaacaagtaaagatgtaccttctaccatcctcgaacagagctaaaagagcatctgaattaatacttttccaccatccctcggacagagtaactgagttaacttaggctgagtttgagtaggaggagattaagaagattgggaagatacgcaaaacgagatgagctattagagcatgattaattaagtattaattattttaaattttaaaaatggattaatatgattttttaaagtaactttcgtatagaaactttttgtaaaaaatacaccgtttagtagttcaggaaacgcgagcgccggaaacgagacaagctcactcacaatcttctcctgccgaacgctcccttagactacttttttcttttctttttctcttctcttctcaacgtctcagttctcacgcctaggcaggaagatgcaggtgtgcggccgacggcggagcgggcgcggctgccggcgcagcgggcgctgcgacgcgcggggaagaagctggagagggggagaggaggc

SEQ ID NO: 7991 - DNA, 13338 bp, Oryza sativa
aaactgatcgataacgaccgtcaacaaaaccccccaagcttgaacctttgctcgtcccgggtgaaggacggaaggaaacaatgacttggttgttgatcaggagttgctactatgctgcatatctcaaagatacatgtgcaaggtatatgtactctctctcagattaaataatctttggcacggtggcttacccttacccctgattcccacgagacactgcttctccttggcttgggcggttggaagacagaacagcaattagagcaccaatcacccgatctttgttcaactcttattccggaagttttcaaatgattttggaaaagaaagccaagttcctcaaatgattcactcaatctctctaagtgtatcaatttgaattcctcaccaaatgttgccttgttgattcctactctaaggtttatatgtggagctcggtagggatcaaacatggcatacttacattcacatctgttactaagtcaaaaacttagactaaagcagataactaaacattctcaagatcaagatcgtgcataatgtgtgtggtatatagtggaaatggtgtatgaggaaaaataaaagaaaaatgcttctcctttgtgcttactttcttctcccaaaaatccttcttttattgattagaagagggcatgataacatttttttttcaatcatgctcatgtttgatggagcataaccttttattattattattattattattattattattattttcataaccatgcctttccctcctctttttttcttatcttcaaaggatttttcttttttttaggagaagaaagcacatgaaagtatggagaatttattttggtggtaatatggaatggaatattgcttagctcccagtgtaggagtttagcatgtgcatatatgtgcatgtatgatcttgatcatagagcatgagaagtatctacacaagtcacaagagtttgacaaagttcaatggaatggcaagtaaacaaaatgtatatggtttaatcatgataggacatttttggctctggtaggaatttatatcaaatgaggaactttcaattttatcattttgaaaaacaaaacatccggaattcaagccaaactagtatcaggatcatagcaactcatatttactatctcatatctcgcaacagcttagacttagattagcaagtgcagcccatttacctcaggttcccggataattgttggctacttttattcaatcttcgagagagtacttaccaagaatccatatataagagatataaaacagagcaactattcatcatttcaacaaagagaactagcttgtcttaccttgcatgactcaaacctatcttatctttttggtattttctattttgcaaatttttatgttgttttcaagttttataggatgcaattggaaagcaaatatgcaattggaaagggaaatatgcaatgtgatacaagttatctcagtggggggagcgaggtctccccccaagcttggctttcgctcagggtccttgataaggattgaacccctgaaagcgaaagtacgcctgaaggtcatcatgctgttgctgcatcatgttgttgatgttggtgaactgagcatcagcagattgttgccattcttgcgtttgagctatgtgttccgtgaggtcatactggatctcccccatctgcacatcaagggtgtccattctcctagtaatttcacccaagtcccaatgagaggaactcgagcgccattcacttggagatggagacacaccacttcatctgggaggttgattgtccccccagtggatgtcatgagacgcatgccaccggtcctcactggcgtttgcctaggttgagactccgatgctatggcgtggagcttgggtccatctgggtgcatccccggttcgtgcccaacctgcctcatacatctgcacgggtgtcgaggatgatgaacttccttgttcgttccttgtcatgttgcgcgtctccctgtatgttccacctgcacaagattcttctatggtctgcaggggaatggttagttcatggcagttgtacaaatgataccccacatttggtaatgggatttcatttgtacaaccggggaaaaagtatatcaaagatccatctgctccatgtttcaaaatatgcccttgcactagataggcctcataaatatgcggacgagcggctgagataaaagcaatctggttgctaacgacccctagcccttttgctatccgagtaatcagagaagtgcactcaataggagcagagaactttatactttctaaccattgtcttatcatacatttcataggagaaattttgatctttctaaccatggcaaacatgataattaattcatctcccctaatgggtctcagatcacttctaggaaacaaagtcatagcaatccatttgtgcatgagcccaagtgtaggattatggatatcattcgttctaggtttcttgcaaattggagcaccagaaatatcttcccaaaacctatttttctcgaacccagaaattcctttctggagatcgattttacaggaatcgtgaaaaccaagaagtgtactcaagcctttccatgtgagtgtgaactccttacggaagaagcgaaaagaaataccatcttctatttctttcaaagtgcatagaaattgcaaagtaagcaaacgagaaccaggctcatctaccacaacaaatctctgccaaccaacagctttccaaatagaacgaaattcaacatccaaacctatctttttcagcagctccagagagtattcttgagtgtgagcatattcccggtcgctcagcatgtagtaggcttgtctctcccgatcactgacaaggtcgaggtcggtgtcgttcaggagtcatcgcggagcttcggcgtcttccatcgagacatcagctaatgaatgagtgctagattcgccatgatgacttgatgaagagccaaaccccttgaacagacaagacagttgcctcctcatactgcacaatagagcaagaacggactaactcggcgggggttaggaatgacaagaatttcacccgccagttagtttcaccaaagcaacttgtatatatgcaactaaataattcaatttgagggaaactatcaaagcttgaatgaacttgagagcaaactttggagagggaatgaaaatgtgttgaaatggggtggaattccctctctcggccggctggctcttatagggtacccataacggacagaaatgacatgtgggacccactagctgttaccctgccaaaagcggcaggtagcagttgcctggccggttcggccaaaccagtgggttcggccgaacccctggtgggcccaaccgaccccactttcggccgttggaatccaacggtcagtgtggtcgtggcatagtgaattttcgttgaaaattttattttggtttgctctgaaaaattcatttgaagaatttcctgaaaattcaaaagtcctaaatgcaattttgaaattcaaatatgtgatgatgcaaaaattcaaattgttgaaagcaaatatgcggatacataccaatttacctgtttgcgaaggtcgcgtcattttgattcagttcacggattttccacccgtctccggaggtgatggagcgggtgtctttggcttttccttccgcaccttctttgatttcggtgcggaagacggcttcttctaagctggctgctctgactttttggcgagtgcaggtgattttacctgcgtcctccaataacggttcctgggcatcgttgtttcctcctccaggaaattctgcataaacttcacgaggctgtccgtcttgggtggctccacttcgaccacttgaatattctgtgggttcggcccgtactttatcctgaccatggagcattgttccgtccatggttggaactcaaacttcacttccttcccgttgatgtggaaacggatactccccattcccacgtcaatgttggctcctgtggtgctaaggaatgggggccccaggatgagtggcgtctccttcccgtgtccatgtctagcaccacaaaatcaactgggatgaagaaatcccgtatcttgactggcacatcctctgctatccttgccgggtaacagactgatgaatcagccagttgaaggcgcatcggttttggtgccaataccgtgaagttgagcttgtcgaagacgtcttttggcacgacgctaacactggctccaaggtcgcacaaggcctggtccaattgttgtgccctgatcgagcaggtgatcgtaggacaccccggatctttctccttctccgggagcttgtggagtatcacgttgctgcattgttccatcagcttgaccacctctgttgttgggagcggtctcttgttgttgagtatctctttaagataacgggcgtatgttggcacttgcatagcgtccaacaacggcacgttgatgtggatcttctggattacttcaacaaaacgagtgaattgctcgtccactgacggtttcctaccccgttaaggaaacagcagcaaccgtgtgtcgcagtactcctgcggcatggtcttttctggctgaacctccttgtcaaccgagtcactagatggcgctccttttgatatctcattagttcctgcagggtcaggatatggcagatcacgagtggacttacctctcctcgtcgtgatcgccttgacattttcaatggaggggtcgggttgccccggaatcctcccggattcatttgcagggactaaagattccaactgagctaactgggtttctatcatcttattaaagctcatctggttttgaaatgcggaagcaaagccatctagcttgacatttatgttctctaagatcttatcattagcagcaagctttttgcttagcacatcaatggttttagcttgcgcaaaaacaagatccttcaaggagggttggttagagaagttaccgttattattacctcatgataatatgggcttagttggttccacccctgacctccttgtggacgatacccgttgttgttgcccatgtacatcgcctcctcacgggtttccgggcagtcgttcccagaatgacccgtgctgccgcagacttcacacgtgacgtgtgagtccaaggccttgacggtgccttgtggccgtttctcatggtcgtccaagcgtttcatgaggaggtccagcttggcagcaagtaactccgtctccttgacggtgtgcatgcctcgctgacaggtctggagtcgttcctcgctccaacccatattggagaccatcttctctatgagttcaacggctccttgaaccgttttagagaagaaggctcctccagctgccgcgtccaagtgatcgcgggacattggggtgagcccattgtaaaaattctgcaggattagccagtcgtccatcccatgatgaggacaggcggccatgtgctcctgcagtcgttcccatgcttctggaacagactcgtcccttgtctgctggaaactggaaattcgtccatgaagggcgttggttttgcccatcgggaagaacttcgagaggaatgccgtagagcatttatccctggtgttgatagcagcacggttggcatagaaccactgctttgctctcccgaggagggacaacggaaacagccgcagcctgacggcgtcaggactaacgcccttgatggtgtacgtggtacatatctcctggaattgttgcagatgagcgttggcatcctcattaggcttgccacagaacgggctagcctgcgccatcgtgatgaggctggacttcaagtcgaaatccacatctcctatgttgacttgcggcccgacggccacattggcagcagagggagcagcgaactcgcaaagagtcttgctggccattgtcttgaaagttggtggcgctggtacggctggtttctctgtcggaagagttttttgcggagaaacgactcgcggcctgacgctccggaagaaagcttctagattttctttgaagttttccggcaggttgaaaccagtcatgcactaccctgttttcacaacaaaaagtgaaaacaaccaaggttagcctgcaaaggaaaatgactatacagaggtaaatataaagcattagtttaagtaatctctatcatgaatcttccccggcaatggtgccagaaatgcttgttggtatttcttaacgacattacgagaaatataattcccagcaatagcgcagaaatacttctggtatattatggttatagagttcatccgcaagcgcacagatataccattgtagcatttcacccaagagtattccaagggtatcgtatttattttatcccgtgggaagatcatgtagagagaactcaactaataatttatatattacttgccataatcatatctaagcaggggttaagataatccaagggtagagtgacacacaagcatttaactactcatcctcataataaataatctaagctaggtggaaagaaaagagaaaggaaatctattcctatacttctaatatacatagtacacatacattctagttaactgatatactagctaataccctctatccgatccctcctggtacttcgagaagccacccctgactgccgagttccttacgacagcccgtcatgaccatacaaccggggctaaatacggaggaataccctccccgaggaattaacttaggattatataccggggtggaggaatacccgtactgagctgtcaccatcagcggcccacctctcatccacaatatataatcccaaataatgatatctcataatctagacaccacgtcgaaactaccagatattactctaatatcatcgtcatgacatagagtaattgaataagaaaagactatacccgcaccaaagcatctcccagataagatagcaatatattcagtataacatgaacataatgtaaagtaggtactcatatactcggaaagtatttcaataccataaatgtatttagaagagtattcttataaaagtacaaagcttacaaaagaggaaagggaaactactagagccatacccgaactcttccgaagacttccggactcctgattcctattctaattctattccaccagctagatactactaaactaaacttgagaggaatgagagagctcttgcttgaggtgtgtgttgaagtgaagagagtgaactccttaaataggcaggtaatgacggttatggtggttggaaaggtcggtaatactccatcgttccctcaaatccctgcatccatcggcttcacgggaagttcggctgaaccaccaggttcggctgaacctagtgtggcccaaccagcccacattttggctagtggccccctctgctgcttcacttcgtagacttgtgaaatttggcccgattcatcgtgtcaagtctgcattcttggcccattcatacacaagtctgtttctcgacatcgttcgattgatctatcgtctaagttgatgtcgattttccttcactttattgtcattctctgcaaaaggttagtagacctaatacttgtggaatattattattctaacatatttatgcattgcaatcatcactagttctcccttgttttagtaatattgacggttgaaactgatcgataacgaccgtcaacaccaagaagcaggacaaattcgagtggaaccaagaagccgagaacgcatttatcgcgctcaagggctacttgtcaaattcccctgtactcgttgctccacacatcaatgaagaattattcctgtatatcgctaccacgccttattctatgagtacagttaacgtcgtagagagggaaaaagtgcaacatcccgtgtactacgtaagcgaggccacagatccaaaaactactctacgctgtagttatgacatcgagaaagctacgccactacttccaggctcacaaggacaccatcgtttcctccttccctttgggtgaagtcgtctggaataaagacgtggtcggccgaattgccaaatgggtagtcgagctaagccaattcgatgtccactttgtgcctagaatagccattaaatcacaggtcctcgctgacttcgtagccgactggaccatcccagaggataggccagccgcccaaacggacaataaaacctggaccatggcattcgatggagcactggacagccaaggagcaggcgtcggattcatcttgacatcctccacagggaaccaattcaagcatgcaatccatctaaacatccgggcaacaaacaacatggccgagtacgaagtactactcgtagggataagagcagcagccgcacttggcgtcaagcgactaatcgtgaagggagactccgaattggttgcgaaccaagtacacaaagactacaaatgctccagccccgagttagccaaatatctcgacgaagtcagaaaattggaacacaagttcgatgggatcgaagttcaacatgtctatcgaaaagacaacgtcgaaccagacgatgcgcttccaggtgagaaccgcttcagcccggaacgtttttggatgtcctgacaaaaccatccgtcaaggacatgaacgacgaaagcaccacagccaataccagcatcccgcaaggggctgcagaggtcacaaacgtcgttgcgaacatagagacaacggacgactggcgcactccgctaatcaaattattggagtcagatgagctgccggacgacgacacagaggccgagaaactatcctgtcaggccaagatatattgtatgatcggcaatgatttatacaagaaggccccgaacggaatcctcctcaagtgtgtatcatccgacgacagaaaaactcttctcctccacatccacaaaggcatttgcggatcacacgccggcgcgcgtactctagtcggaaaagctttcagacaaggtttgttctgactaactgccctccaagacgtatgtgaaatagtgcaacgatgtaaagcttgtcaattttttaagcaaacacaccaagttgctagcacaagcgctccagactatccctttaacatggccgttctcatgctgggggcttgatatacttgggccatttccacgaggacaagggggctacaaattcttgttcatggcgatcgacaaattcactaagaggattgaagcagagtcgacaagagaaattaaagccgacaacgccatataattcattaagggaatattctgcagatacgggttgcctcaccgcatcctcacagacaacgggtcccaattcaccagcggtgatttccaagattactgcatcgaacttggagtcaagatctgcttcgccttagtgtcccatcctcagagcaacggacaagtcgagtgggccaacagaatagtactacaagggatcaaaactcgcgttcatgataggcttatggcctatgacaaaacgtgggttgaagaactcccatcagttctatgggtcgtacgaaccatgccaactacatgcaacaaggaaacacctttcttactggtatacggatctgaagccatgctcctaacggagttatgacatcagagtacatgcgtacagaagcatactgacgagaaactagacgaaaggcgaagcgacaatgtgaatcttctcgaggaacatcgtgaacgagttgccattcgggcagccgcatactagcaggccctacgcccgtgtcatgagaagcgcatcagagctcgcacacttaccatcggcgattacgtcctccgatgagttcaaaaccaggcagggcgtaacaaactctcgcctaagtgggaaggaccatacacggtggtacgaatactgtgaccaggcgcgttcaaaattgaagatggcgacgaccttgcaaatggcgcctggtcgcgagttatctaactcctggaacattcatcaattatgtaaattctatgtataaagtcaatgtatcccaaatgtgtacaaatcaattatccaaaggtattttgatctcctcatgaaatacatcagtgttttccccagagatctcttaccacgataacacccactcttggatcgaacctattgatcatttacgccgtttcgacaagcctccgagaaacctacgggaattttggttggggacgcccagagcagataaggtctcgtcggatttgaagagccgaacaaccatgtaagacctggtcatgtaagagtgctcaaaaggtgtattaactaagctgtgtaatcggaaattggtttttccaacttcacggctgggggctaggcaaatcgcaatttcagataggcaagttacgggtgatttgaagagcggaatgaccatgtaagacctggtcatgtaagagtgctcaaaaggtgtattagctaagccgtgtaatcggaaattggtttttccaacttcacggctgggggctaggcaaatcgcaatttcagataggcaagttacgggtgattgcgccttcccctccgagagcagacctcaccgaggacaaggccgggggctagggagagtaccttgctcaataacgggccaaagacagcccgtaaaaagagtagtactcgttcacaacataacctgtttaagcatttcactatataggtttctacttcgattacaaatccttaataaagataacagtatgttataaattctttctaggtgtttcttttacagggactaaaagcctaccacgacggccattgccagttcatggaagcaaaaacctcctcagctaaaggagcaagggatcgcgccagtcggtcgacctcgtccgccgataaccgcgaacggcgaaaacccccgcgcaggaacccgagatccatctacgagcggcgatcttggatgcaagcgaggacgtggcttccatcgtaatggctggcgtgacgacattcctccttgaggttgatgtcgatccgctgtcctatgccctcaagctgagcacatgcccccctcatcaaggacaagtagcccgccgtactctcctcgggctccgcgcgatcaacctttagctgacgacaaacgtcggccatggcactgcagcagctcttaagatacgacttcagccaaacctcgcagcctcggagagcctctacggcctgctcctgcttcactaccacgagcgaccgctcgagttccgcgacctcgaacttcgtcttccagtatgcaatacgcctatcttgttcagcaatgatcccatcgagatcttaaaaaggggagaggatgtaagagatgccaccatttaaacaacatgacaagtttgaaagggtaacttctctatgccatcgcacccgagttctcgctagggagcccgaccacacccaggttaggcggaccagagctcatacccacctccccatccttaacaatggcaggggtaggcatatcgctcgaggaaggtaggtcgatgcttgcgacatcacgacatccgccttgctagacatcctcggaatctacacaactacgaaagacaaagaaacacgacaaatcgacaaatggcgcgaagtaaaagaagtcgctccgcccacaggacaacaaaagcgtttgtacaaaaaccacaatacaagacggagagagtttactcctcataaagggggaggatgctctccccgagaaccgacacgctggacgtcacgttctcccgcgtggcatcagcagcccccttcgccaagatctccttgaggtcgacgccagggagagctagcttcacgcacgtgaggacatgacatgcccccgtgtggattccattggagatatcctccgcaacatgggcggcgtgctacaacgggattgcctccatctcgcctgccagctccaacaataccgatgtcagcgatgtctcgtcggggtgcgtcgggatagaagactccacgccgcacgacaacgctagttggtgcaggcttgttaagctcttgcggagggagtcgcggagggaaaagaggatgtcttgtgtatcgttcatcttcttctctaggccctggcgttgcatctcattgccggccatgatttccttcatcttctgaaggtcttcatgggcaacctcgagtcgcgcctctggctgagccaccctcccgtccgctaccgtcgcgcgggccaccacgcggtccatctgggcctccaccgcccgagaaatgctctcaagaaggcggtggcattcgaccaccatattagaccaattggccacttcgggcggcggtaggccccacggactcggcgacaacaggggcgacctccacgcgagggatggtagcggtgggagatccactcatcaccgcttcactcccgctttgcgcggagaccgccgatgcgttcctactagggctagcggatatcatcagcaaatattagagatgtgacaacggagtgggtcaaaagtttcacttacttgccggtgggcaactttaacacccttctcttcggaggaggagcgaggctgcctaagtcctgcgtaagacggcgaattatgacttcattccagtatctcaagaaagaagggtgacaacggtgcgctttacctcaaagctggcagacttctgccgagaactggcgatagcgcttgacctcgcccagggctttcgcttggtcccgctgcctcctgcaatgacgggaacggaggaaatgttggcgaccttgtccttaagcaaggcggaggcatgatggtcaacaaggggaccgacaacatctgtcaatggcaaggcctacagaatttggagtcactttggctctccaaaagaagaaaaacataaggtgcaccagtccttgcttacattgatggcggccaccttctcggatgccgacttgtcgcagagcggggccggtggttcgacggccgttgaggcagcactgatcaagacttccttgaaccgctgcgtcacgatgtcacccggaagatctgaaataaatgaagatacaagaggatgagttaggcctcagccccaaagtcatcaacgaaagcaggaagaagattacaacataaaaacaagtaccccgcgaggagattcaagttatgtcctcagtcccgggtagtcgaacgaggatgtcattggaggtttagaggtccagtccccggaacgctctggttggacctcgggcatggcaagaaccgggtcgagttctttaagttcgaggtagaaccatcttgacctccactggctacgggatgagtggcattggagaggaatgtatttcgccttcatgccaccacgaaggcggaatccacaacatcccgtgatgaaccttgagttcctctcgacactcaaggttgttgttggcccgatctttcggtgagttgtgataactaccatttgggagaaacgttgacgatccgactacaaccgtacgagacattgtgttgc

SEQ ID NO: 7992 - DNA, 1510 bp, Oryza sativa
agattattgctatattcggttgaggaaattgatctactaaaggaagcttatctagaagagaccgagttcaaagagaatgcggcatggcaaatatatctattaattaggaatagtttgttagtttccttttatctttaggaaagtgtgtttagtgtcctatcaggactttatgttttccttttatctttaggaaagcttctttcttgtccgacaaggacttgtatcaacccatgggtataaatatgtatacccggggtctatgtaatttatcgctacgatcaatacaattcggcgcatcgccaccctttttacttctacttttgtttttacgttccggcggaacttggcacccgacgcggggctgcttcgttttcgatctctggcgaagggataagtccaatgttccgtcggtccaggcaattgtatcgtctacgtcggcgtcgttcaaggctacatcagtacatttgacctcttggattgctctggtttggatgatatatttgcctacctatttatcatatgtctctgttaatctagtcttagcatatcaatttagcaatatcggctgcttctcgttttagggtttctgccggtatcggctaaatcgcgttgctagattagattagcttagacatctaccaccctgaaaactcagtcaacggcttgattgtatagatattatgtttcttttcatacttagtgctgcatcagttaagtttgatctactaagtcgagcttagaaccataatctctagcctgcttcttgattgccaataagggtttcatcggggtttcagccgatgagttatctggacgttgcatcggctcataaggattgcatatacatataagttcgatttagccgatgacaacaaaggtttcactgtttaatctaaacatgtggatttcatgacatcggacctccaaccgatgtgtgctttaaccttcagatcgatgcttatttatcatatcattgctagccaattggtttatactggattatattgttattttattatatcatcatcagccgattgcctttatatcattatctacattggacataaagccaattgcttaaaccctatcgctatcggctggtatcggcatcggctattatcggctatcggctggaactactccgtcggcttgtcagccgatcggttgttttgatctactatttgcatatcttgtcagttgcaggatcaaactgactggcacgcccgcatctcaccaacctttggacctgcactggagcaaagcagatctcccaggccagtgtgttcgattttttcatcaacacaaattggcacgcctggtgagaccacgaattttatatccacatgtctgaagaagaagtcaatgccaagatcatggtcacggtggagaatttaatgaggaacaacaatatcggctcagggggcaagcgcatcagttccagcatggtggagcacatcagtatcggctcatgaaagccgattgcaagaaccaaagcaagatcggttttgga

SEQ ID NO: 7993 - DNA, 26318 bp, Oryza sativa
ccccccccccagatctaagcaggctaaatgataaaagaagattcatcatcaatggggaattgcttagcaacaatttctccctgtgttcttcctacaggtgtgtctcagggaagataatctttctcttatgagtgttatcacccaacatcggctgcaagacaactggggcttggccagcttcccatcagtctccctttactgaaagtcgtagagccaagatgtgaagtatcatcagccgatgtcatgaagaaaccgctagaatgcaaattccaagtctcagccgatattggcgattttacactttatcagtttaagcatgtcacctttgacagttggtggtcggattggtcaaaacacctcttctctgctccatcattctattatcttaccaagattgataaccgcatcaaggtaggccgcaatctacttccgactagattatgcccccgtgatctaacttgttttgctccctttttccttttttgcagatatcaaaaccactggcaccgaaacgcagcctgagtgatcggccaattttctatgcccaggttctcaagcattccagagggattaccaagatattgccctccccgatcatttcttctgctccttcaattgaaacactcatgaagactcttactggggtcccggctgccgatctcccaaattttggcaaacgcaaggatccttcttcgagaattgccgggttatcacccaagagggctaaggccgatgattctgctgggacaagtgcctaagcgttagctgacaatatcctgccctctctctcgtcatccccaccaaccagaattcgtcacgccattcgcaaggttgatattcagctttgccaaaaatgtttgtcttcttcatggcctctttgtaacccgtccttttccctattgtaggtgaaagcgtcatcgttgatagacccatcggccccatcggcacaagaaccgtccccatcggctcaagctgctccgtctgtccaagccgttaccgaagaaattacatccacctcttctaaggctaaggtacttcccccacttctaagcttgatcgtcggctaatatttatccatgcctaacccatctcttcctacaggatctgtccaacatgttctcctttgacgttaaagaatttttaaatgagggtgagggaaatagccccgagggagctcagataaccgatgaagttagggccctattggtggaaatcgccgatcggctcaatgcctctttggacacccttgtaacaaactgtgggccgatctgacaacgcttccaggagatccaggatcgaattccagatgatttatccaacaagatagcctcggccgccttcctggagcaatatgagaagcaatgtcatcgggccacaaagaggatagccgatcctcacgaagcccaggctttggatgccacgatcgacacttgccagaagcaaataattgaagacaaagcaatcttagatcaactcgctattgccctatcgccgatggagcacgaacttgccactttgcaggtgaaagaggcagcactggtcgaagagctgcagcaatgccgagccgatatattgtctgtagaaggaaagatcaagaacttgccacatgccaccgaggagcaaaggtctaaactgaaagcctccctcaaacacttggctaatctagtcaagtcctccaaagagatcccagggaccacagagcaagatcaggaggatttagacgagatagaccaaattcgcctgcgtgtgattaacgcaattgttgacggttgttgaatacaaaatttaagcatagtggtagggtttatttctaacaatttccacgagtgttggtgtatattcgtatgcagttgacaactgacaaactacctcagttgagaagaaatatacctggaggaggagaaacaaacacgtatccgaacatatggagttttggacccagaaacccaattaaacacctccaaataggccttccatccataccaacagaatgaggggcccaaaatgagtgtccaggacgaaaatcggagccgacggagtcgtcccgggttcagccgaactcttacggaggccgctggcccaggcccaggttgcgttcggtggataacgacttcccaatgacggttgtacctacagaaaccgtcatggacacgtgtgaagaggagaaaagagatgccctttggattccatggaggatctccacattcccatgaaagcttacactataaatacccctctcctctctcattctcacacacttgaagcatgagctgaattacaagaggctctattgtactttattgcatactagattagggatagagtagagtagaagaagtcggaggagttccggagttgtcggtaatccacttcttatttctttctgctctattaattactctaattataatataaatatattttgagtaatttagttttgcttggtgagaattatctcttggttagttcctaattagcgtgtaggatcattgttcactatagttcattataatatagtgattgctttagtgagttataaacacgaaagtagttattaactgcgtagatgctgtgtctaggtagttgatttccagtgtttgctacgcatctcacagtaggtgtgaggtgggtgtagaggtggtaacaaccctcaatatcattaaagtcctccctgtccgggtgcgcagtagagcgatatctgggagcagcgagctggctagtgccctaagtatcgcgttaggattgaagttaagctttctgtagacattgtttctcaccggtgattcctctatatcctttgcctatccgtaacttcgtgtccttggatgaacctgatttagagttgacacacacgttccctgtggaaaatcgatacctaagaatactcccaggtgaagtgctgcatcggtattttcgtgcgcttgcggattctatctgtgaggttaagaaataccaacagcaatccaaaatttcttgggtctgtaaatatcatggtcttagggcagtttagcctcggtgatagggaacttcagtttcggtgatggtaccctgactgtggagccaacgatgcccgctttgacaatattttgctaataatacttttggttggccctatcttgtccgtaatggttgtcctagaaagttttgcaaatccgtacttcaaattctctcaaggatctcaatcctatccgtgtacatatgctcctttaattttgtagtgttgaaaaagattgacaaaattatattggtctaagggcgatatatataacatatatcggccatctgaagacgatgtaaacaaatcggctatcttgtatcggcttaaatcaaccgatccatagtactgaaatcttctaagggcgatcatacacgtatctgccatctagaggcgatgctttgcacatcggctattatgtatcggcacaaaccagtcgatcatgcattgacccaaatacttaggaaatacttcttcaaatattttccgttgagtgctcttccataaacttctccatcgagcccttgtaacatgtaagctcccttataaactgacttgtagattcagaaaggtccttcccaatttggtgaccatttgtcgaatttattatcacgggtccctatcggcaaaatcaacttccaaactaactcaccatctgtaaaagacttgggcacaactttcttgtaataatgacgggcaactctttctttatccttcatcactttttccaatgtgcgtagcctggattgaaccaattcttccgattcgtctaccatgaggttacggtattcatcggctgttaactcatcttgcaaagcaatccttcttgagccgatgttgatctcccttggtaggaccgcttcatgcctgtaaaccaacttgtaaggaggaactgttgtatcgacccatggcaagccatccgataggaccacaatgcttctgctaacctggtatgacattgcttagggtaatccaaaatcttccttttgatcaatttaattaggcttttgttagatgcctcagcttgcccattagcctgcgcatagtatgatgaggaattcaatacttgattcccatgttctctgcaaactgaacaaattcatccaatacgaagatagatccttgatcggtcgtaatggtctgcggcacaccgaatctatacatcatatgttccttaacaaattcgattgcgtccccagaatcaacatttttcaatggaactacctcaacccatttagtgaaatagtcggtggcaactaacataaacttatgccctttgcttgatagtgggttgatctggccaatcatatcgattccccaacctctgaacggccatggcttgattataggattcatagctgatgtcggtgctctttgaatagctccaaacttctgacagtcttgacagcccttgtaatatctgaagcaatcttccaacattgtcggccaaaaatacccagcacgtcgcaataaccacttcatcttatgggccgattgatgggtgccacatatgccctcgtgtacttctcccatcatgaccttggtttgatgtgcactcaaacacttgagcagtaccccatcaatcatcccataatatagctcatcttccaataaaacatatctcaatgctttatatcacaattttctcgaagccgattgagagggattctttaagtactgaaatatgtcatgcctccagtcatcggctgcaattgtagtgacttctatcccgacatcccttgccatcggcttgtaccccgatgccccctgagctaaatcattagcctcagcattttgcgctcgagaaacatgtctcattgtcacaagccaaaaacaatccatcaattcccggcacctctcattctagatcactaacgtatcattcttgcactcatattcccctaccagctggctaatgaccaacagagaatcgcctataatctcaacgtcatcggcttcaacttctttcaatagctgcaaccccttgaggaccgcttcgtatttggcttgattgttatttgcataaggcttgatggtataggcaaactcaaaacttgcccccctaggtgacacgatcactaagccgatgccacatccgtgagtgcagacggacccatcgaagaatagcgtccagggtactatgaataccaggccgattgagccgttttggtgttcgacaataagatcggctatggcctgccccttgactgccttaggtgattgatatcggaggtcaaattccgtaaggcgaaaatccatttcccgatccttccttttaacactagagccgatagcatgtacttgacaacatcggctttgcacagcacaatgcattcattggacaataagtaatgccttaacttcgtgtaagaaaaatataggcataagcgcaatctctccactggagaatacatcgtctccgcgtccaaaagttttctacttaaatagaaaattgccctttctttgccatcaaactcctggactaagaccaaaccgattgccttctcatcggctgataagtataatttgaaaggcatccccttttgtggaggaatcagaaccggtgggttgctcaaacatcccttgatgttatccaaggctttttgctgctctgcccccagacaaactcctgatcggctttcaacctgagcaaaggcgtaaaagattctatctttcctgataaattagaaatgaatcggctgatgaaatttatcttaccgaccagagattgcagttgtgtcttattctttgggggttggatctccttgatcgcgttattgctactgtgagttacctctatccccctttcatgaacaaggaaacccaaaaactgcccagccgatacatcgaaggcacatttcgtacgattcatcttcaaaccatatctccttgttctttcgaaaacatttcttaaatcggctttatggtctttgaccactttggatttaactattacatcatcaatatagacctccaccaataagctgattagatcgtgaaatatatagttcatcactttttgatatgtagccccagcactcttcgacccaaaggtcatcacaacccactcatataagccgattgcaccaggacatctaaaagcagtcttatgaaggtcttcctcacccataaatatttgattataactagcattgccatccataaaactaccatcgaacacttatcaaagctgaataaaacaaacccttttctagccaaatcaacaattgggtgaatgagactttgtaaaaatagaacaagaggcttttaaattcatcggaacgttattgacatagattaaaatataaaaaaattgggccccctaattttttgggacccaaatcggtcgctcacttagcacaccctcatcgacagccctggttctatggcacatactctaagagctgaagatcgtggacataactgtagatgcacacctaaaacgatgagctctagcagggcttacgcgacggcggatgctgtggtataggtgtgggagatactgttttaggaagcccatgacgccaagcgatgtcggcaaagctcaacctcctcatcgtgccaaatcagaaagctgagaagcactccgttccagctccaccggggttatgacaggcagcgaatcgtgtcgacgacctcgacaccatccctatatgccttcccccttatctccatgtggcgtgtccctactaccagccaccacctcaccgtcgtgctccaacatgtggactccagtactcgagtcgatgacctcgacacgacctccctcctcatcttcgtggagcacatctctactcttgacctcctccttaccatcggagcatccgatgtgcagaggttccagtagtcatgccgacgggtggaaaatcatgctagtgacctcaacaccatccccgtattcttccctcctcatctcggtgtaccatgtccatgctgctagccttttcaccattgtactcctcctccatggctcgcatcccaaagctctagtctcgccgtgtcgtcagagctgcagtctgacgtggaggtacaggctatgacacaaccctcatcgacctctcctccgcccatgaccaccttcaactctaacgacattgtgacagtccgagcatgggagctcggcttcatcctccagtgaaggcttgccttcatggggatgagggaggggatgccgtgtggggcacatgtcaatgaggtggagagaacaagtatagtaggggcattttgggcaatacgaaaatataatggcctgcatgtgggtccaatcacatccaatttctataaaataccacatctaattgtaatgcatggtttctaaaaggtgaatagtaatggtgggtctctaaattgtagaatttgcaatggcattaatccaattaacccaaattcatttctaacgtttttatacgtgaagtttttatgtataaggttgtttctatgtataaattttatttggaaaaagtttctatatagaatgttttccatgtacaaaatttatatgtaaaaagtcatttatttataaagtttctatgtggctcgtgctagagatatatttgtaatattatctccttggtcggtttccctatttctcttgtaattatgtttctttaagtcggttgtaaagataaggatgcatcttgtctatatgtactcatgtccggcatcaatataatttatcacgttgactctcgtatacttttagctcaaaatcacatgtaggtttcgctcacacctaactcctcagcctcacacacggaatctacaccatgtcggctcatatattaggcctaccgatcaaatggcgagtctgaaattctaaccgtctatgttatgacggtgcccaactcaaccgatttctgcgtgtttcccaaaatgtttttggatgaagagatgtgtacatacattcaaaatatgagcagaaatcaatatagaagtattttggaatgtggagtagtttaaataaaaaaattggcatgccaaattatttgacattccttccaatgcaatacttatcaaagcttaattagtctccaaacaataacctagcaaaaattttgctactatcgaatcttgccactaccaaaaacaccccggaatcatgccattaccgaaaacatatatggcggcagaaatggctgggaaagtttttggcgggaatccaaagtgtatttcgcgccgaaatggcaactgtataaaatgcgtactcctccacggtgcgacttctactaagagagaacgagatggaaccgtgtgtgagaagcgagagcggcggcgtcaagaagccgatgacctcgccgccgatcgacgccgtcggcgtggacctcctccggaagatactccttcgcctccccaacatggcgtcactcgtcaatgccgccctctcctgcaagcgctggcggcgcgcggcctccgaccccgccattctccagcgcttcctcccgctccgccgtcctccgctcgtcggtttcatcctcaccgaccgcggcgacaagcccgtcccccgccactgccccaacatctacttcgtccgcaccaccgcccgtaagcccaatctggcatccgccgccgccgattgcgatatcttcttcgaagacctccccgatatcgattcggacgaggacgacgacgacggccgcggtttctactccgacgagtggcgcctccgcggctgcgacggcggccgccttctcctctcccgcggccgctacgggctcgacctcgccgtctacgatcccatctcgcggactgccatcttcttccgcccgccccaagccttccgctgctcgttccacatggtcaggtacgccattgtcgtcgacgacgccgacgcctcgttccgggtcatcggcatctgtgacgacacatccgccgccatgttctcctcccgcaccaacaaatggaccctgttcgacttcgacgcggaggcggatttgtgttaccgcttcaccgaccgcgacggcatgtccgccggccggttcgtgtactggcggtcgaacaccaagaacaacaagaacgtggagaggatcttgctgctcgatgtgggcaccatgaattggacagtcatcgtggcgccgtttcaggtaggggagtcgtactgcgtcgctgacatggcggagcacggtgggctctgcctcgtgtccagccaggagcaaaaccttcagctctgggtccgcagcagcggcagcggcaccatcaatggtggatggctgcttaagaaggagatctcattgttgcatcagtttgggtacttgaagaagctgcggagtgaggagtggatgaagagggtgcgtgtgctggcagcaaaggctggctatgtctacatggagttctggtccatcaggaaatctaattcctatcttctcgtcctcaatctcagcaccatgaagctggagatgtttcgcaacggttcggatgaacctttcaggggtcctgcatttccattcttgttgcgtttggcacctctgacgacacctagctgggatgatgcaaatgatcttcaggttccatctggatgatggaatcagtttactagctaatattatattaagtttgtttgccagattgcaattcctctgttttagtaggtaatactctgtttaatttgtttgatagattgcaattcttctattttctgttagagtaagtataagcctaatcactagattctggacattattttttaaacaaaagcactagattctggacgatttcctttttagcaggagcactagattgtggactgatgtataggtggtagtcgatttacaaagttatttgatctttgttctgaaccaaatacctctgtgtttggttgctgtgaggatggacaatggtacatcccttttagggcacttttgggattcgtggagctgcaaatgctagaacggaatgagttaatggctttgctggcaaatgttctgcttgcagacggggaggatagaattcgatgggtgtttgaaaattttggtgtgattttctgtcagatgtctataaagtttcatgtttcatggcgcatagatgggttataaaccaaaggatgagaagactttggatatgtagacttccaatgaaaatcaaagttttttatggcagttattcaatgatgaaccccctacttctcaacaactcttgagaggagaattatgcagacaataacaaactgttgattatatctttttttttcttttctttttgcaacttttgtatgtatttgctgcactgagtctatttggtggttaagaaataagatgtcaattgaacataagttcccttcaaatactagtttggcgctttacaaattcattttcttgtaacagtccaggagcattctgtttgagtggtggacagagataaagtggtagctggcttttgttctgcagttgaaagactggatgctgtcgtcaggaatttagttagcgaatgttcagtgatcttttggtttcattctgtgttggatagggtagtgttggctcaatgttgtctaagcttttggctatggtttgagacctcttcgctgcgctgttaagctgctaagcaaccttttatgttaccttaaaactcttattcagctttcaatagaagctggggtaatatcactttatccaaaaaaaaaaaagagaagggcttaacattcttagctgtgaccatttctctttgatgattgggcaacactactttggcagctcgcttcatcttctctccgggaatatctatagttatcagtcactacagcaattgattgacgttatttattttgaaaggaaacagttttttttttttgctagctcctgcagagaacattattgtccccttttttttcatctctgttagagcaggtacaataaactgactcagcaggctacaaaactgtgccacatcatcctattcctacgtggagggaagagaagtgaagagagagagaagagaacgaccgactaatttgtagcccggcgatagcgatttttttactccgcatcgctcgcctgcagccgcactcagcgattaaaaaaacacaatgcgggtcccacacaaccacaggggatcacgctttccatccgtatcgccctccccgtccgcatcgccctcctctccagatccccttcctctctctcgatcgccgccgcctcctcgattctcagcgcgcgacgcaatctatccccccggctcccgcgcttctcccctccctcccgcgcggttcccgcgcttctcctctccctctcccgctcgcgaaattgcctacctatatgacagagaaatccagttgctccaaaattccccatcgccatattccgccgcttccgatctccctcttccgccggccaccgaatcgacagccacctcgaccacagacccgctcctcttccaccttgtataatctctcccgcccccgcaagaaattcctgcctaaaaccctagttccccaccaccaacaccatgtctcgtcggaggaagagggaggtagcgccgcctcctcaggccgtcgtgagctctactgctccattcgctgttcctacgtcgcaggcagcgccatatccatatgggggtctcgggttcccgccgccaccgacagcttggcttgcttctccacagccacaagccatgcctggctcttctgctttccatcctcctgcggccggcaagactgatgtgcatcctgatcttgaagaatggtatgtctgtcaattggctttgttagttctgaatttgccatgctgattactccttttagtgctaaataaaaaaaaagagcatgtactgatttacttatttaagtgatgtttctttgaaaaacaaagttacaaagcatgcactgaattctatttaggctaataagatttgatatccatttgtgactgaaatctgaaacaatttgattgtggttattgcactgaaattttacagatattgtttgcatttaaaaattgttgacataagtgaccacaagctataagtttcggtgggatcataataaaaacctgaaacaatttgattcgattttcttgcacctaaacacatgcaacccatcattccaaatttaagcacacaatgttcagaattatatttctaatcagcatggccagtggcgaattcacctcccgtgcagctgcccgggcttcacagcgacgatccttcgctaaaatagattaattcccgggcagtgtgtatgctagttagaggtaataacggcaagcatgtaggctgcaaccgacacttgggttaggcctcggctgcctatggcatgcatgcctcacaagtactagcctcaatgcgtcacacggacatgtacagaagcattgaacaacttgctaagttttaattctaataccagttccttgaatgaatagactaacttattgttgctagagtttcaggcataatgtaatatttagatgatatatatgagataagtcttaaaataacagagttacatataagataagtcttaaaatatcacaatgttaatttttatggctttatacaaaaaaaatgaacatatttaaatattgtagcagtttatttgttagctagccttgcccaggcagtttattcagttgaactggtccccaacaaaataaattggctgtctttttaataaaaacccaatagattagtgggcttctgctataccttgtttgcaccaatgtagtataggctcgtctgttagccctttgtactggatgagtgcatgtttattttagtagtgtatagaactccatttacaaactgaatggccattttcttgttaaaatattatattattcggacacaacttgaacaagatttgcatgttcatgtgttctatacggggggttgaatctcgtccgcccggcggtttcgttaattttatcaataccccatcaaaccatgtccatcatgtggccgaagggagtccatcacagcccatcaatgttgtgaatggacatgtcgctaggactgataagcgcttgtcatggatgaaggatgaagacttgagattggtaagtggcttatgtcagctatttatttgttaatggcatgcatgtcacttgcattactggcaataataaatttctttttcctgaaattgtagatcagtgcttggctgaacaactcaaatgatcctatagaatcgaatttcaagaagaatgataaatattggggcgatgtagctgcagcttacaacagcactacaccaaaaaaccgagctagactagttaagcaagttaaggatcgttttggtaaaattaggaagaaggtcgggaatttttgttgctcttggaaggaggttaattcattatatgctagtggggagtctaatgaagatctgatgaacaaggcacagaaaatatatgagaatgacttcaaggatggtccattcttgtttatgcactgttggaatgaactaaaaaaacaaccaaagtggcatgcatatttggagcagcttgacaagtcaaacaaaaggaaggcagattacaatgatgttatcccccttgatgatgaagaagatataccacgaccaataggagccaaggcatctaaggcgcaacgtagttgcaaagaaaagagcaaggtccaagtttgtacaactgagcttgaggatgacatccgtaagtttatggatgcgcatgcagcaaccaaggaagggcaaaatgaagtgttagagacccaaatacgggtttctattgacaaccatgcagccaaaaagcttagtcgccagacagctatgattgaaacctatcgagacttaatgaacaaagacacaaggaagatgcctgacgatatgagatctgagcttgttcacatgctgaaatgcatgagagaagagatattcaacaaaaatcagtgaggtatgaatctctgttctaaaatgtagttagatgaaattaatttgaagccttcaaaaaaaaacatgtaatcagcccaaaaatcaatgcaagttagtacaaacacacatgcaggtagttccctctttcatgcttattaattgcagtttgtccaaaaaaaaagaactttctccaagttcccatactgattgcttattcattgcagctagtcaaaaagttatgtagtcagtccaaaattttgcacttggtccaaattatgatgcagtcaactcaaatattcattgctagtagtctcttatggtgaaattagcatgcaaaagttgtttgcatttaaagtggacctttgtccaaattcccatgttgactacttattaattgcagctactcaaaaaatcatgtaatcagtccaaaattttgcacttggtccaaattataatgcagtcaactcaaatattcattgctagcattctcttatgctgaaattagcatgcaaactactacaacctgtcaatctctatctatatattgactctcccattctggaattcccaaaccattccatccttttctagaaccaccatgtcagattcatcctcaaactcaaactcatcctcctactcaaatgacctagacccatccaaatttcttgacaagtacatttctgatcaaaatgtcctagactcctttgctactcgcatcgtagagaagatcaagaccaagtttgcagctgggctactcaagcgctaaagtggaactaggaagaccattgcaagggatcatgaagaaggtcaccgacgtctagtggctgattactttgcaaatcagccactctaccctgagagaatgtttcgcacaagatttcgtatgcgaaagcatctctttttacgtatcgtgcaagccttaggtcaatggtctccatactttactcaaagagaagattgttctggtcgcactggcctttctccacttcagaagtgcacagcagcgatccgtatgttagcatatggcactcctgctgatgctttagatgaatacttgctaattggcaaaagcacttccttagagtgcttggacacttttgcacgaggggtagttgaggtctttggtgggcaatacttgcgacggcccacaagtgaggatatagatcatatactacaagttaatgaatctcgtggctttccgggtatgttaggaagtattgattgcatgcactggaggtgggagagttgtccgagagcttggaggggacaattcacccgtggtgactataaagtcctaacaattatccttgaagcggttgcgtcatatgacctttggatttggcatgctttctttggtgtcgctggttctaacaacgatataaatgtgctgaatcagtcccctttattccttgaacaagtgagaggggaggctcctcgggttcatttttctgtaaatgggaatgagtacaacaatgggtactaccttgctgatggtatatacccagaatgggccagcttcatgaagacgatatcacttccacaaatagagaagcataaattgtttgctgaacgtcaagaaggtgcaaggaaagatgtggagcaggcttttggggtattgcaagcccgtttcaacattgtacgccgtccagcaaagaagtggaagcgaaagagtgttgggaaaatcatgctagcttgtgtgattctccataatatgattgttgaagacgagagagaggatgcaatatgtgacattgacctcaatagaattcctaggacatcaatagttctgcctcctgaagtaacttgtgatgataacccatgtttttctgatgtgctacgtaggagatctgctattcgtgctcgttcagtccatacccagctgaaaaatgatttaattgagcatatttggaatcggtttggaaataggcagtcaacataaacatggtagggtaataagcatgtggtttttgccttctttttttgtcatatatagatcatcaattaatccttgtgtaatatatttcaggaagatgttctcttgtccaattcatggtgctgaacttcttacaggtaacttgtatgaactaaatttactcctaggccagactacttacaaccatagtttagtgattctctcttcttatttgggatgcagtagcatggcattctcttaatgctcttacatgttgaactcatactgaattaacttgtttatgcatttggatatactggatctctcactcaattaattatctcagcaactatttctttgaaagaactcacactgaattaacttgtttagatttatatctccttcatcacatttttcgtatcctgtactaaggaaaaagcatgcagtagttactccttttagtgaggtttcattgaaaagatgattcactgtgcaatttttagtttctcatttattcatcacacgatgtacatgtcatatgatacatctgtcttttttttttcagcaaatgatggtagttcaggcaatggtcatatgatgcaatggttcaatgaagagtctctctttgattagatgaagaaatcgttatctatctgttagataacatatttatgtattttgcttaatgtcacattgtttgtgacttttggatttgtaaaccattaagtatgttttgttttatcctctattaccttgtcggttatttagacatgcactaccctatccttttgtttagacctgggatgatccattaatctacttgctatggtattttatttatctgttgttggtgccttgtatttttttatactacggagactcttcatcttataacacaaatttggttgatgtgcactgtattgtgttaactatgtggtgttttatgattacttctgtagcatacaaatgttcatgccacaacaaattggctacaatgatccacttcactcttgatcatacacattgacatgtgctagttataattaattatttgatctatgagatgtagccaaccaacagacaacctactgtatgagcagttggctgcagcgttggctataaaatggagtgtagccggcaatgggctatactattagccttgctcttagggcaccgttacatgccatgcgtgtaagatcactaccgaaagaatttctattgaatatacttggttaacttgttttccatgctctctcaaatagttcagtatatttttttcaaagaagcaggtaggagctctgccattttattttatattagaagagactaaaaaaagttttttttttactggagcagcaaacacaaaaaaagaattaaaaaaagacaactttggtaagaagcttttggagctacatttgagccggcgcttctccccttgatttgcacaatagtagtagctatgttgaccacatcttccactgtctcgttataaacgttgttgaaaactctatcattctatcgttttgctccagccaaacgcaccatgacgtgcatatgatgatgccatcaaacatcctttgatgttcctttagagcaagtttaatagtatagccaacaactactagctccaaatcttctatagcgcctgaaaattcactagtaattttcaaactaatttatgcaataaaatcatcatccagaaatcagccgaggtacacaaactaataatttaatatacaaatccatcataataataacactacatacttacaaaagaaaagaaaaaacaacagcggaattacggtctagcgaagctccggcttcacttccataggcagctcaactggggtataaaccaaacgtcttctccttctatttccttttcttcaactgaggtttgattgattattgcaagatgagtacatggaatactccgcaagccatacagcaaatatgtaagtgtacaaggataccaaaggatggcataatatatggctcatttgcaaaagaagcatttagcaaacatttgagaattgtaaaacagtagagtaattaattatcaattttaatcaacactgaacatcatacccatgctgcacaggcccaaccaaacctgaacaaccatacccagctgtacagatctatctccaaaccaggaatgtaccgttccaaaccaggagctaatcaaattattaccagttatagcatcatttattatggtgagaagtgtgagactaatcacgaaagacattgttagatccgcccataaccgcgggcacggctattcgaatagctttactctggccagagatgtaccactgtacccacaagacacaacccaccgtcatgtcaccgtgtccgcgcagacacgtcaccatggcgagtgattatgacaagacccctcgcataactcaactcaaagctgtacaccattcctggatcaataatcacccccttataaaacaaggcatggactcccagcaacccccgtgggtttatctccaccacttctcagtctgccacaccacaatgagccttgctatacaaagtgtccagccgttgcccattctggcttgtggttagcatgattaatgtttcataaccgaatctcgcgaaccggtccttaattgtcatgagcacgaccatcaaaaccatgtgctcactgttgacggtccttatcgatcagtttcgaccgtcaatattaccaaaatagaggagaactagttatgcttgcaatgcatatatatgttagaataataatattccactagtattatgtttactaaccttttgcagagaatgatcattaaatggaggagaatcgacatcaattcagacaataaatcaattggacgatgtcgagaatcagatttatgcatgaatgggccaagaactcaaaattgacacgatgaattgggccaaaattcacaagtttgcataaaggagcaatggaggagaccgccagccaaagatgggccaggatggcctagcccatggttcggccgaacccatcctgacgccttggatgcagggttcggcgtggacgtccaggattgcttcccaatgacggttggagggcactttggacaattctccttccacaaccatcataactacctctatataagaacttcactctcttcagttcaatacacacctcaagcaagagctctctcatattctctcaagttagtttagttgtcttaaactattggaataggaatagagtagaaatcaggagtccggaagtcttcgtaagagttcgggtatggctctagtagctcttctcttctcttttgtaagatttgtaattagaatattcttctatatacatttatggtattgaaatactttccgagtatgttaatacctactttacattatgttcatgttatactgaatatactgctagcttatctaggagatgctttggtgcgggtataatgtttgcatatgcaattactctatgtcatgacgatgatattagagtagtatctggtagtttaggcgtagtgtctagattacgggatatcattatctggggttatatgctgcggatgagaggtgggctgctgatggtgatagctcagtacgggtattcctccgcgcgtgtacatagtcctaagttaattctctggggagggtatttctccgtatttagccccggttgtatggtcatgacgggttgtcgtaaggaagtcggcagtcaggggtggcttctcgaagtactaggagggcatcggatagagggtatttgctagtatatcagagaactagaatgtatgtataccgtgtatactagaagaagtataggaatagattatcttccttttttctttccatttagcttagataatttattatgagaatgagtagcttaatgcttgtgtgtcactctacccttggattatcttaacctctgcttaggatatgattatcacaagtaatatataaattattagtcaagttctctctacatgatcttcccatgggataaaataaatacgatacccttgaagtactctcgggtgaaatgctacaatggtatatccgtgtgcttgcggatgaactctttaaccacaatataacaagagtatttctgcgccattgccgggaattatatttctggtaatgtcgttaagaaataccaacactcacaacccaccagtgtcaagttttagttgacaaattaattaattaaccaatcacgattgaccatcgtgagctacaattaaatatccatcattaggtaatagtgaagcattaatcagcctaatagtgtgctaatgtttctaagcatggctaagcaattagatctaatacatgcaaatgggccataacaaaggaacaggttcacaccacccggtgacattcgaaaataaatgcacagttgaaataaacaaagaaattaaatataggatcaacatgcttaaaggaattgtgtttgggatctgtgtgacttgccttgcaatattcggtcttcaattaatcttcttgaatacttccgacgcactcgcgaacctccgaaacgacgaaaacgacaagctaacacacaaaatgaggaaaaagactaataaaaaccaaataaacagtacatataaagtaaacaaagatgtcgataataaatttagatgaattatgagacttgaatggcctcattgtgacttcatatgaattagttacgaatttcacaagatttaatctaattaaagcctagtataaatattttaattgaattacgacgcaataaaaaattacttttgaaaaggaaaagagatttattgcgtcatcaaggacagtccaccataaaccgggttcacagaagcggtccacgaaaccaacggccgagatctaattgacctaaaattgaccgaatcggacggcagagatcgatccggtctaccacggtctacggctgacgtggcactgcgatcgacaatgatatcatcaccggcggcggcccggcacctcatgctcgccagcgaacaatggcgcggcggcgcaaacggagggcgccaaggcgtagagctcggctcaacgaactcatcggtggctcagacgacgacggatggcgatgatcgacgacggcgacgaggttgaagcggcggagagcttcgagtcggtggtgacggtggtcctccagcggtctacgacggaaacggagggcgggacggggacggtggtgaccttgcgaacccgatggtagccttcccgagcgacgacgacgaccggagcgccggcggcgcacagccggacttccttcggcttcggcggcgcacgggctctagtggctaaggtgctacgggcgacggcgagctaaggagaaggtggtggcggatagaggaggtcctgggggtacttttataggggctaaggggcggtggctaggcccacggcgaccggcggtgagaaggaaagagctagggttttggaaagagaagctaaccaaatcggcatcgaatccgatgatttccaaacgaattagctcaggattacaaaagagaaaaggaagaggagatcgaggggattatttcccctcaattgattcagccggagaaggaacgaggtggccggattttaggaaggaggcggcggcttgcggcacagccagggcgcggttggaggttgaacacgaccctgacaggtgggccccacctgtcagcgggagacagaggggagggagggactgggccgagcgcgagcaggccgagggaaagggagagagagagaattgggccgactttcggcccaaacctgagaagaagattttaaaacctttttctatttaaattattcatgaaatgaaattccatttattaaaaatacttcctttgatcaaataaatcccagaaaaatctaggaactatataaacaatagaagtatataacaaaattttatctagcccacttttatattgagatttagcaaattaaaattagatcttctcttttaggcttttaagattatttctaataattccttttaaacaacaatttataatctaaggatttttaaacaagaaaggcacttaacaaacttataattagatcattaattgataaatttatagattaactaattactgaaacattctttgtattattaaaattaggaattgagctctgaaaaatcgagaaaattccaaagtataattaatcatggagaatttaatacaaattaaatccaaccatgctttatgtttaggaaattttatttcccacatttaacttcacttgtaaattaatgaacatttaatataaattctattaataatttattaaataatttataaatcctaaaacggaaattcaagctgtgacattgtcagttttgcttgttggtgcatttggaagcaacataatggactctcaaatgagattcgtctgcatgtctgcagaatgaatggttctctcacctctttcattcttagctggttacagagcttgtagtttatcaggttttgttttgttttttgtttttctgtacatgactcttcttttttttaatatatataactactaggcaaagccctggtagtaatatctccatccttttcttttctcgtcaagccacattaccttacttttacatttggattatcaatctatatactatttaaattatcataaaacttattaacttatataagcttatattgtttagctattttcatattatttttatttactgctatcatactaaagttaaagttaagtagcaatgcgcgagatttcacttagtatttaagtatgactgaagtacacttgtcttgctgccaggccttcaaccaaacaatggtcactagtcaggctgtgcaaaattcttttatgtttcaagtattccttttcgtagcatattgcggaggttgctaagcaaacaaccaatatcgcataatgttgcctaatatttaagtgcttaatagaaaatataaaactggagaacagagatggcgtgaggagaggggcacatggatggataagtacgatcgatgggtggttggattgacagagggtgccagtcatatgttatagttatcagttttcaataaaccggcacctatagtttgtttattgtatgtacgggttttttttaacaaaaataccggtaccaatattatagttgttggtttttatatagaaccgacatataggtaaccggtacctatattataggtgtcggtttttatttatatctttttctactagcaatatgtctgtgcgttgcaacgcgtgaaaatgatattaatattaacaataaataaatactaataattaaaatttaagtatcacaacatattgaaaaggaatatttttttgctaaatttcttgttggttccacttaggcaaaaaaaaaatcaaagtgcaaaattattcctaaatcgtaattccagtgggccgggggaataaaaaataattaaatattctaactaaacttcctgttggttgtatttagttagaaataaattaaaatgcgtcaacaaaatttactgcaattttatagcttaaaatgatggctcaaattgactaaaattatttataaattaaataaaacagtaagtgattttagagtgaaaataaatgaaaaatgaatttttggccgagaggctagtgtcggcccaaatggcatgccgacccaatgtggggccgatctgagccatccgatctgatggacagcttggatcggtcctgtgccgattaaatcgctggccggaggggggaggggtccaaaaaccctaaccctaatccactttctcccctactccccctatccaatctccagtgatgctagtggtgatggcggtccatcgtggtggagcacgcacacggctccgacttcatcggctggtacgtgttgacgatccttaaatcataatatctgaccgtcaatatctgcatatagtggaataaaatacggtattcaactgagtggtagggtttattactaattatttccactagtgttggtatctatttggatgcaggtgacaaactaccaaagttgaaaggaaatatacataaagaaggaggagaatcaaacttatatccaaacttatggagttttggacccaaaaacccaattaaacacctccaaatgggcccaactaccatgccaatggactgagggcctgaaaatcagtgtccacgaggaaaaacaggaacaacggagccggccagggttcggccaaaccctgagagaggccgctggcccaggcccaagttcagttcggtagcaaaccgctccacaatgacggttatggccattttcaccggtggaaaccgtcatcagctggatacttggcaagaagagaaggaagatgctctttggaagctatggaggatctccacaatcgcaaagcacctccacctataaatagacctcctctcccccacttcacccacacacaactttgagctgaattacaagaggctttattgtatcttttatacattagaaataggtagaggatgaggggaagctctggatgagtgcccagaagtttggcgctctcgccgacttctacctcgacaagtgtagctttctaggaggaattctggaggagtaccggggttgtcggtacactctgctccgtattcggagaaacttcttctattaagtaagcattcgggatcctttcttatgttatttaattactttgtctaagtgagatagatttccatctttgcgggttcattgtttagtattcgtactaagtgctctattactaggactttggataaagaaggaagttcatgcgcacgtattcgagtagtaattaaggcatggtgtctaggttagagattatctttgtttgttgtgtgttgacggttgttagtgatcagtttcgaccatcaatattaccaaaatagaggaaaactagttatgcttgcaattcatatacatgttagaataataatattccactagtatttggttcactaatcatttgcagagaacaagtataaagtgaaggggaattgacatcaaatcagacaataaatcaatcggacgatatcgagaatgggccaagaactcaggattgacacaatgaattgggccaaaattcacaagtctgtacaaaggagcaacagaggaggccacctgctgagtttgggctaggtgggcccaacccatggttcggccgaacctcccgtggcgccgatggatgcagggttttgatggacggctgggattgatccccaatgatggctggagggtattaccgaccattccaactgtcacaaccgtcattaccttcctataaaaggagctcctcttctcacttcactcacacacctcaagcaaagatttctcatattctctccaatttagtttagtgttctcaagctagtggaataggaatagagtagaaatcggagtccaaaagccttcggaagagttcgggtatggctctagtaccttttctcttctcttttgtaagctttgtactattattagaatactcttctttatacatttatggtattgaaatactttccgaatgtacgaatgccagctttacattatgttaatgttatactgaatataccgctagcttatatgggagatgctttggtgcgggtataatgtttgcttatgcaattactctatgtcatgacgatgatattatagtagtatctggtagtttaggcgtggtgtctagattatgggatatcattatgtggggttatatgctgcggatgagaggtgggccgctgatggtgacagctcagtacggatattcttccgcgcgtgtatataatcctaagttaatttcctggggagggtattcctccgtatttagccccagttgtatggtcatgacgggctgtcgtaaggaactcggcagtcaggggtggcttctcgatgtactaggagggtatcagatagagggtattagctagtatatcagataactaggatgtttgtatactatgtatactagaagtataggaatagattctatttctcttttctttccacttagcttagatatttcatatgagaatgagtagctccctgcttgtgtgtcactctacccttggattatattaacccctgcttagactatgattatcacaagtaacatataaattattagtcaggttctctctagcctgatcttcccacgggatataaatacaatacccttggaatactctcgggtgaaatgctgcaatggtatatccgtgcgcttgcagatgaactctgtaaccataatataccaggagtaatgtcgttaagaaataccaacaagcatttccggcaccgttgccgggggagattcataatagagattaccagaactaatactttatatttacctctgtataatcactgccttttgcaggctaaccttggttgttttcacttttgttgtggaaacagttgtcacaccccgaagttctcctcccaagcctaaaatttaatttataaaaacgaccccaagaaaatgaaggtgcaatcaagagaaaaccctaagaaagtaatgcaaataataatcggagttgacatgtggaatttttcttgagttctacatgttggaattcattaacaggatttttagtggaattttcagagctctagaaataattttaaccatttaaaa

SEQ ID NO: 7994 - DNA, 104482 bp, Oryza sativa
ccccctataggcaatacctcctcccacttctccccttcctcctccccttcttctcttcctactacagtacaccacaaaaaatttaaaaaaaaaacaaaagttagaaaaatttatgtatagaaatactatatataaaaaatttgaattcaaattcaaatttgaatcgggtatgtaaacttttgacttataaactttgggtctataaactttaggtgtataaactttagatgtatagaaatactatatatacaaaaaatttgaattcaaattcaaatttgaatcgggtatgtaaacttttgacttctaaactttaggtctataaactttaggtgtataaactttagatgtatagaaatactatatataaaaaatatcaaattcaaatttgaatcggatatataaacttttgacttataaacattgggtctctaaactttagatgtgtaaacttgtggtgtataaactttaggtgcataaatttactaaaatagggaagtaatgcggtgccaaaaaaaagaaaccaggtggagggagggagggggagggggtgcgaattgatcgctacccccatcgctaggcgagcaatctctgattagcatttctggctcagatctagatccattgggagattgaactcggtgtaggcatcataggcaaagagaacatcagtagcattgttgttgtaaaatatgtcgaaccatgtcttgaaaccttcaacggatggcttgacaccatggtaaactgaagctgcttccctataagacttgcacgaccgggattctgattgatcttcattagagtcatatttggggaaggccgattcaagcagggaaggtctgttggccacggtgttggtgtgaattgtcaaccacagctgaatgaaccaccaagggcccccataactgaccggtttatttagaagtataccggctgaggaaacatgtaacatctgataagttgcccctaggaggtatcggccaagaggaattttttcctttctcaccagggcttcagcgaagtgaaggaagttcgcagtcggtgcacaagtagacccatagaaaacaaacctctcaagccatagggaaagaaaggcagcatgttcctcatccgaaactagaccagtcttccgatggtcgacgatgaagcctgaccaacaattgttcttcttctttgtgttcagttgataagagcatttaatgtccaagtcaaaaggattagtggacgaaaggatgtccaggcctgttagcatcttcacatcaagcaaagtgggagtcataggtccctgcctcaagataaaagcattcaatgtatcagaccaaaagcagccgacagcggaaagtaggggctcatccttttttatgtctgctatagataaagccaggcattgcgctattcctactttctcccaattagatcgcttagcagccaccatcctcttgtaccatgacttgtaccctttcaacttggacggccaagacctaaaggtcgatttccattgagctaagtctggtttggtctgcttgaaggggatcctctccgtttcagcgttgataaactcggtgggatccggatcacccatcggcccaaggaaaaagtatgtggaattccagaaggtgggaatcaaaagatgatccctggaatgctggcagaaggaaagaaggaatcggatcaccgaagatccaaagaagattgagggaattgctcaaagtaacatggagcttgcctcggggatctccgccacgtatgccatcgccataggtccgaacaaagttggcggggtggaggaattcgccgattgaggaacgatcaccaagagattagggattgctacagtgggggcttcacggggaataatgaccgaaagcggtaaaaaagggaagcagggcggcgtaagtaggatcccaagacggtgatcactatttaaaagggcgcggtaacggccgaaacggaaaagaaaccctagatgcgaatggaaacagaatcgagcaaatccgcaacatcgcaaatatcacagacttgggaggcatgtgttaacgaccaaaattggtaaatcataattggatccgaagtcagaaccaaagcggatttggaggaactccataatcacggaaacagaacccgcatcggctacgagttgcatcagctaccgtctgcattggctgataccaaaccagatagggagaagccgatacagccgatcccggcaaggcaatcatgagaccattatcgagatcggttcaagtgctacacaagtattggcaagtgtggattgagtctggagaaggtaattgtatctattaattaggatattttgatagtttccttatagatattttcggtaagagtccgcctaagggacttgttcgtatttttgagttgtaatagagatagagttgtgtccagcaaggacatatcatgttttttgtgtataaatatgacccgagaccatgtaaacaaacaacatcaagttcaatacactctcggtgcatcgccgccctttttacttttctttgttttcgacgagttcttgctttcgagttgggctgcatcgatttcaatctctgacaaagaggtaaagcttgttatagcggcttgagttctaggggctagtgcttacatctttataacactctagtcccgcctatgtaaaccgccgagttatcatatatgctatataatctagttcgatctagctatataatctcatcggctagcctctatcatcgaaaacagccgataaggttaaatagctgcgacgaactagattatatagtatatctaccatctcgaaaaggctttcataaacttgtttagatcttatgtttctctatgtacttgatgttgcatcggttatgtttgatctgttaagtaacattcagaaccataatatctagcttgtcttatggttatcgatagagatagcatcggggtttcagccgatcttacctgatttagttatctcgttcctcatatgcttacttgatatgctaaatctgccatttacattaagatctcatttgggccaaatatattaagcctgctatcagtctgttaggttaccctgacactggattgatctctgtttagcgtatttgatctatatcgaaaacttagtataaagtggtatcagagtactagctggtacacgttgggtttgcatgtcggctatgctgtgagtatatataatccctgccttaaagcgttcttggattcaagtagtttatactgtctcggtgcgctgaccgatctatcctaatcacttggtttaagagtatttcaaagcatagattatatattactgatatctatagccgacagagcacattcaattatcccttcgccatacactacttggccgatctgatctatattgcatcggcccggtataaacgatacgtcatcgacaaaccagccgatcggctatcgtttatagatttaactttggttctttgtttcttgttggttgcaggatcaaaccaactgacacgtcctagactcgaaagcgatctctttagatctgcactagagtaaagcaaatctctcaggccagcacgtgttttccacgtcgacaagggggtgggtagggaaaagggcaggaagacccctacgttgtcacccagcagccgcccgcctccatttgcgcgccccgccctgcagctggggatgctgctgccgtctgccaccaacgcggcgccagctcgacccggacgacgaggtgggggaacgggtgggagcggagagggagagaaggaagccccgccaccgctctcctccatctctgccgagccgcgccgtcagctggggtcactggctcgccgccgcccgcctccaacgtcgcgctgcccagccccgcataggacaacgaggccaggggaacaggagagagggggagagagatggaggagagctccgctgccgccgtccctgcggctgccaagggtgcgccgctcgtgcggtggcgtggcggagaagaagttagcggcggtggtagggattggcagctaaatagacaggccggctactctagtatcacagtctcacataagccctgtgggtgatttgttgaaccaggtttaacttcaccagcatggatatagcgtgaattttcagcttgttgtttcgaggtgaagtgcactacgatcttgaaatgcctgatcaaatatgtctatgcagctaattcatctacctgtgatgtttaactttcatttgctcagaatgtctcgtaatacaatgccaacaaatgtaggtctttcaggaaaagaaatgaaacaatgtctcgtaacaatgccacaacaaatgtgggtttcagaaaaactaaacagattgtctccaatatgcacccagttggaaagaaataaagaatagcaaagcattcagacaatttgcgtcaacaagagacccttttctgatctttcaaaggcctgttttcgtcatgggctatagaatactgtcttaagtaatccccagtagccatggttcactcccatagtacatagtatttctgctacattctatagattcagagtatcgtgcaagactccacacttcattaccatatgcttcaactggtggaagcaaaattccatgcacattggatactctttcttcaagcttaattgtttgtaacaattgtgtatcccctattttcacgcagcaacacacagggcatcaactagatgtacgtggaccactgaggccaaacgacagcgcacgaccactgaggccaaacgacagcgcaccgcactatcaaatatcaatggcctaataaaccacgtttcatctatcatccatcatccatccacacattcaaataggccatggtgactaatttcaaagtttagtgtttgagttttgaaatttcctcccacaaccttctgggcttcttgccattttgtatctgaaaggtgtgccatttatttagcattttccttctaaatattcacattatatttatttatagagtattttttttaaaaaacaaatcacatgtattatgacttgtggtacataaccacatattgaaacattgttttttaaagtagtgaagagttaaacttacaagcttaatcaataaaccaataattatatatttcatatagactattttaaaattgtaattttaagtagatgtgtgcacggcttatatatgagtggggttttgtgaaactttagatctataatacctaaggttatttgtcacaagtcataatacctaaagttatatgcactttaatcaaaaagcatagagtttattgaaacgtgaagatctgaagaccatccttgattcaggtttaatagagtgaccatccttgatgtttggagatggtgctgtactgttgcacgttgtctctaaaggtttatgaacatgaaacatgaccaaataaccccgtacaacacttaactgctatgaattttccataaaagacaaatgttccattggtgtttaatttaaggatctcattgttcatgtgtatcacctttgatcctagaggacccagtagcaagttgcaacatattttaaatttttaatcaagggatttacagccaacctgcgcactccattatatatctgtaggagatacataaatcctaaatataatcagacgaaaatgtaattgtatatcaaagcaatcaacaaaaggaacaagcaaactatctaaacaggtttactatcatacattgtgtaccacctcataactagaaattaagctctgaagccatacacaaaaacgtagctcaagaagtaaatagtgattttcacctacattatcacaactgaaatgaaaaatataagcacagatatgtcagtaaaggtggaggatacctaactgctggtttgctcccgaagatcatgagataatgacaagcagttacactttcaccttcttgctgttagctttgtcaaccttctcattttcgaccttcatcttcttgatggaatcaaaaagggatgatggctgttctttgcttgatgaggatttcgcgaaggggttaactggccgctgaggctgtacaccattgcagctatcgacgctcttgtttttaaggccaacctgaccactgcctccctttgggttctgatcaactgtagttgcatgtgatgctccatcattatctttcttcgtttttacacccatttcactgttttttggaattttaactaacggagtttgtgcaggtgaaacctttgtactgatttctttcaaattgtctgcttgttctacctctgccttgtttgattcagttggattgcttcgttgggcggcaggattcagtttaggcaatgtaggtaacttcaagctgtttccattttgcacaaccttagctggtgggactgcttgagtgctcaacgctggtgatggtgagtagtttgtattactattggagaaaacaccagatgtattggcaatttttgcattgtttagcatcatctcctacaagaagccattgcataaccttcagttgaacatatgataaattcttaaatattgaatgtgccatttttagagtgctaaaagtacgcaggttcagtataagggttgtgaatttcacctcgagtatggcactgaacctttcttgcaatatgggaagttttaagcgtgtaacaagcatcaatgctcccttcattgacttctccagtgttagtaattttgcaagctcggtagctcgtacaagcttatcaccttttgaaatcaagaaataaaacaagaaataatttaatgcaaagcactatttatgggtaaaaagcatagttcaagtcttgtaccattgcagcagctggagatgagcctcaagatgcaccggtcaagtgcagcctccatgttgaatgcttcatcatctaatgcaatcgtgtccagacccaaagcagccatttcttctattttcttttgaatctgagataaacagcaacgattaaaaacaatatcacagatactgcccttcaaaactgaaagaaacacagtgcacctgtgagagatgcagtttcctcatcatgaattcagtttccaaactattggcaccaaggtcagatgatgcaagaggaaatgacagctcaagtattgtcaaaacaggtttgggcatcacctgataagatcagtcaaagacgtcaaacgacaaacaaatttcaatatttgagaattgcatatagaagtactatttttgttggaacatcaacactcaaaagttgtacacatgagaagttgcatttaggcatacctgtggataggactccggggacttgcatagaatgcagaatatattattagcatctaagcccaccacccagtggctttcatcttcggattttcttgccttgattgaactgcagttggatataattattaagtgtgctttggtagtagtaaaatgcataacctgtcaggcagatactatacctaaatattggaatccagcttccaccgaattgaccagaaaagaccctcagtattccctagaaataacaatattcagtttaaaactcccatgatataactaaagatatgttgaattgttgacagtgttcattggtcataccttggaatcaaaggaactaagttcaccattctcactgaaaccaaaccaagataatttagaggcaggagttaaaacaagtcggctggacaatgattgagcacattcagatatcttcagtactttaacatccagcacctgaaagggttaatcatgaacaaatccatgtttcaattcagaatcttgtagtaccatttcaaccatcagttcatatgtactgtgaattggttcacacgattggaatcatggtacactaggaggtgctgacaatctgataagtgatagctagctacaacatatatcatcactacacaaagctccaaaagtcaaacgaacatatactgaatacctggtctcctgatgaaagacaatctgaagcatgagacacaatcgctagctgatctccatggcctgccgcagtaaccactgggccaccgactgagaggatatgcatctgaaaatcaagagatgtgtttgacaaaacttaaagagtttttaattgggccacggaccgaggatatgcatctgaaaatcaagacatgctaggtaaaagtacaatataaaatgagtaaattaaattgaatttttcccacttcaagtaacaaacagggaatgatgtaaatcagattcatgaatgcttatgtaacccccagctcgcatgtatcaagaaaaaccatccaagattagtaatatgtagtttggctttgctatgtaagtcacgaccaatgtcatgaacagcatttttaatgatctaaaaatgtaaatgtgttccgtagaccacttcttggtgagaaatggtgataaaagttactagtatctacatggaaagtgcattccctgaattattttcttgagtgcaaaaagtcaaagttataattcgtgccccacaagttataattcatgagtggttacatagtacaacaatttctgtgcttctgatggttagggcgggacaatttcggctgtacattggatgtagaaataaaaaatggtttcagcatttaaatgttggtagtatagaatgtttccttgaccaataaatttaattggaaacatgtcgagagtcgcatgaatctaattttcttctataacattaattgtttttaaaatactataaattcttttgttaatacttcacagctattttggccttatgaaagctctagtagatagcactgaaaaaaactaaagcaacctggttttttgggtattacggaactaataaggaggcagttttctttcaggaaaaaaatgaacttcacaaactgattaccaggcacaacctggttttttgggtatttcggaactaataaggagtcagctttctttcaggaaaaaaatgaacttcacaaactgactaacaagtatattcatcaggaaaaaaggacttaaatacaaagcttgaggaagttacaaaacctgcaaccctccctctgtgaaaatgcgcagaaaatttaaagttgtaactgcagcgacccatccaacaccaacagccacagccttcacttcttctccctcaaacctcattgaccactaagtaattttcaaattagtccagtaagcaccaaagtggtaaacttcaaccctatctcagaagctggcaaacaacaatttcatttagttaacttacctcactgttgcctgcccaactactgaaagggcggtacataagagtgctcatattcttgtcacccttgcatggatttgcaaagacacttcctgattcattcagtgcagccattgtgaaaccaaaataatcagtcatcgaaggaactctaggacctcttccggtgtcatggaagtctacctgaaaaacaaagtaacttcggatggtttattcacatccaagctgcaaacaagtagaggatacaatggcttataagatagagggtgagaagattttacctctacatgtgaatgcccctcattttcgatagtagtgatacttccaagcatattgtaggcaaggaaatttcgcttgccaggttgaggtggtgtggacccaggctgaaatgcagtttgcattcttgctgtaaccagtcttactgaagttgctgaatcacctattgccttatcagcaacctccttgttatctctatgtgtatctttcattctcttgcgtgactccatctgaagtatcagatcctcatcttcactatctccatttgagtgatcatgataggttgacttcctcctcaatctcttgtggttgaatggacctaattcaccaagactttcatcatcatcatcatcatccagtccaccagaggtactcggcctctcctcatcatcctcgtcatcaaacaaaggaaccttagtagagttcaggtcaggtgcaccctctgtgggcgatttcaaagtcgacgggatgaccgattcccaaatgccaaatctgccagttacgtcgatcactgctacagcattactttcaggtttccaagccaagctacatatcctttcatcgaacttctgcctctcaacatcctgctttgacttcacatcccagatcagaacctgcttatccaatccagcagtgactaggtacctcccatttggagaccagcagagactacacactggttgctcatgctcccctttcagagtgaacacctcctcaccggtgtccctatcatacatgaccacattattcctcaatcccggaacagcaaggaactgcccatcagggctccagcacagggcattgttgattgagtggtctgaaccaaatgtcggcgcaatccgcttcagactacgggcttcagtccccgtgcagagatcccagaagatgactgtgccgaaggtgtcaattgatgccaaataatcgtttctgggatcgaaagacaacccggttaccgatcccttgtggcccttgagcactttggagatggtgttgtcgatggtggcaatcaacttgatgccgtcgtcgtctccggccgccgccagcagagtccccttcttgttgaaggccagtgaccggatcggcagggtgaaccgggcgatattgctctggaacaccccctctggaaggaaatccgaagcaaaatttcacaaatatagccgtggaaatgacggagattaggagaaattgcatccggggcagtcagatctaagaacctgggaaagaacagaacttgacggagtgatcgatggagccggacgccagcgacgcgccggagcccggcgcgacggcgagcgccgtgacgccatccttgtgaagccggatcgtggaaagcgccgccgcagccgcggagcccgagctccggccaccggcggcggcgaccgcagcggcgtcatggatgaggatggccacgtcggcggcggatgcggtgacgacatgctgcccgccttggccccacgcaacggagcagaagactggcgagccggccttgtgcgcctctcggagcttcaccgcgcgccctttcatggtgacaccgacgacgacgacgagagattcttcacccacgaggctgaagctatggtggcggcgggtgttcaggaatttgttaggggtttccagagattgacgatacgcggggtggggttttggttgcagacattttggtgggttttggcgcgtccccccgcgcgggaaaggacgtttggcgggaagcttttggtggagtaccgcgggaaaaatacaccgaatttcacggccgcagtggcggaggtaaggtagggatattttcaaaaataaactcaaaaggaatatatgtttaactatcgcatttcttagctgaaatatcattgctaaccatcacaataaaaaaaattgtgctttttagtcaaagtccagcacgttatatacttttggatttttttttccttgtcccagcattgctcttgcgcgggcggctggcggcaaaacaccgccaccttcctcactctttcttgctgcatcgccaccgtcggaaaccgagcggccaaccaagaaggcggtggcaggcaaaacaagttaatgacgcttcttctcggcacgggaggtggagtggcatgcaccggtgggtagagtactcggcgcggccaatttggccacgccggatgcgcatctagccctcctgcagcaagattgggagcgggcaactccggcggtgccgaatccctcaacagcaatggcgctcgcggtgacggcggcccggtggaggagcggggcggcacagggcgacatgacgaagcacggtcatggtcgatggcggaggacgaggacaatgcaagtgacggtcggacgacgaggccggcgcgtttggcagcggtggaggcaaggaggtcgtcaccgaagaggctgacgtggcgtggaggaggctccgttgccgaaaggctggagcgggcgttggcgatgacagggaggctattgcagtgaatccggcggcggctgaggccaaccgagaaggcgtgcagagagcacaacacggaggctcgtagctggcgagcgcggcgcagaggctaccgctgtgggaggatggaggcaacggcaatgcgaccaagctggtcgttggacacgaatagtctagtcgaggcggcgatgacggtagcgccatgaggtgggtgttgaaggctacaacgatctcttttctaagcgttagtcgaggcggcgatgacggtagcaccatgaggtgggtgttgaaggctacaacgatctcttttctaagcgttagtcttgttgtggtggcggcttgccgcggcaagatggccatgttggacgggccagtgcggaaagaagggattcattcctctctctcaccctttccctctccaacccacccacgtggatggatctagagcatgtcacgccttgaaatttagctcaaattttcagactattttatatataaatccttgtcgaggaaccaagccaggatacacaaaacaacaaattaatttatagatccaaacgtaaatacttatataagagacaaaaatttacactccacagacaaaaaatcaactggggtataagccttgggcctctaacttcgtattcagctcggaaagcacaaacttctgaaaagggggaataatacaaaggctgagtacaaccaccgtactcggaaaccacaccaacgatacagacatgtaagagaatacaagggaggtttatggctatttgcaaaaaggcagttgtaaacatttgaagttaaaaaaagcaaaattgttgattgattaaggcaatattaaatctccgctgaacaattctacaccacgttgaacagacccaaccaaaccacctgaactacaccaatttattaaatcaaattaatagagtggggctaatcacggtgaaactagttaatcgcccatcatcacgggcatgactattcgaatagttttactttagctagagatgcacaactgtacccacaagacacaatctaccggcatatcaccgtgcccgaccagacacgtcaccatgttgagtgattgtgacaagacccttcgcataactcccactgaccaattgcatcatactgtaagtttcgcccctatctttaaaaccaaggtaggcaaccccttttgtgcctaggtgaatccggaagccataaaggccgtcgcagggcccatccaaactccatcacgctcactcttgcctcagtacgtcagaaagggaaaagttacactacaagtccagcagttgcccattcttgcttgtggtaagcactgtaagtcttctagggtttcacgcgaaccgatccttaattaccatggatacaactagcaaaaccatacacctaggtttcccgcgaaccggtcgttaattgctatggatacgactagcaaaaccatacacacacagctcaccattaagccatattttagttgtataatttcgagcaataaaacatggctaggtgtctcgaactcacaactcatcaagatactaaaggtagataatgtggtaattaagcatggctaagcatatataattctacctaggtcaacataagtgacaagctagtcaaattatcatccaatttgacaaaggatggatattaagtaaacatggcacaagcgagcagatcggtagtccctaatcccatgtaattagaaaaacatgcaatttaattatttgcaaacggtaaaacattgtataaagtaggctcaaaatgctcaactgggatgtgggacttacttcttcaaaatatcttccgaactcttatcctcgcgatcgctatcttccgaaatggtgctacctaacggcatagcacttctcatagccactcccatccagccacacatcattacctctatcgtagtaattttttattcaaccactacaccaccgatctacccatcactctgtctatcaatagtgatttttttactctcacccctcacccttatccatggcacccaccaatatatttacggcgaaaatgctagggatcgggaacccgatcagcgccagaaaaatcaggcgcccgccacttccggacctccatgccgtccccaccactcgccccaccacatgcgtcgttgtaacaaattacccacatattatggaaatgctctattaaaggaatccgtttcaatttttgttccaccaacattgtttcagcaagtgtactcgtaatttttcactattgtcgaggagagatcctctctagcgggtggtcgtgagacccccccctttgtgagttcggccgggggagatggtgcgatgatcaagagcctacttccacttggtgcttaactactaaatcgctcttgtggctgtgtcagagaccatggattatacaggtttgggccgctatcaagtgtaataccctactcctctgtgtgggattatggtgaattttgacaggaggttttgagctctaagggaaacctagctgttcttcctctgagctcaagttgtctgagagtcgtcctctttctcggtgggcgaggtcctccttttatagttcaaggggataccacatgcaccgtttgcacctacccctccacaggtggggggcccacatggccctgatcagatcgctatcctttgtttcaaccggaagcaacacggtcgcccaacttcaggtggggcccagcgccgtcccccgcctgacatgggggacatccccgtcattccccattaattgtatggggacttcggcggctcaccacgcgcggggggcgcccctggcagtgtgccgatgcgacggggcgtacctgcccccattccgcttgacacagggcggaacgtgggggcactgccacctgtcctatcacctgtgaccggtcatagaccagtcaagctcgattgacatcaatcgagcagcgccgcacgtcctcccacgccgcattaaatatggcacgggatggttggggcgccgcgcattgaaggcgtggagcagcgtttctcgtcccgcccgctctccccgccacgtagtggccgggcgagggcctccgggtagcacgccccgaagccccgagggctgtgacgtggcaccccgaggccccccggccacctcagcgctacccgaggggcgaggggagacgaggccacgtggccacgcgacttagatgagaatgatacttccctctattgtgtgtactcccaagcccatttcaccgacagtagcctccggcactgtatccgagtgcgacccccttggggtggtctggtgtggtgcctcataacttccgtctcatgataatgggttgcacgggggggtttgaggagtcattgttggcgagctcgatccaagcgtccaccgtgatgattattcgaccgccgataaacgcgccacacgcgaggcgcgcaaggcaggaaaagtgaggggtcctgttagactgtgcccggtgccattactggccgtctcgtcaaccgcctgaccaccaggcgcgtgggaacgcgggattatcggtgggcccgcctggccgcaaccgtaatcatcatgcgtcccgcaccggccacgccgttgacaggcgtgctaagcgcggggcgtgcgattagcgggacgaatgggacgagtgggtgcaaaaaacgaggaggcaaccgaaatggcgagaaacgaggagtcgggcactggtgaggcgaggataaaaagggaggaatgcggagagttcgtctccttcctctcgccattttcatactcatgcacacacttgccaacccctagtgctcttctctttctccaccgtactccgtgcacccatcctcttgctcgcatccgcccagctgccatggcccaggacgccagcaacgccgttttccccacggacggcgccatcttttttttatttttctctttttttccttttttttaaaaaaatactgcaactggggttctcctgttgtgagattccctcccgaggggcctcgacagccgaatcccccgggggtctaagtccgagtggccggggcggctgggagccggccgaaccggggccgtgaatccttcacagccccccagcgggggccgtggcccgtacgccgggtccggctccgaatctaccacggccgagaccgccccctcgagggaggagagggtgccatccaccgtcggtggtggcggcaccgagatccccctcggcggcgttcccgagggcaccgccgaaggggaacacggcccagaggcggaggccgaggtagaacgcggcctagaagccgaggtggggcgcggcccgggggccgaggcgagtcacagcctagaggccgaggtggggcgcaagcccgagcccgaggccgaggctgaatcggcccgggggcccgaggcgaagggcgatgacagcaatcgtacccctctgcacctggggcgcccttgggtccaaccacgtgaaagggggcccgagtgcagcccccactctcgcggggggtccagccgtactccatcgtcccggggacggaccacgcccttctcttccccgactcccgcaagcatggagccgctcctacgggtgctcgtcgccgccgactccactgtccgggaggagctcaactcccaagtccaagccctggcggacgagcgagcggccctagaggcagagtggacgtaggtcgcggcggaccgcgcgcgggtggatgaggggcgctgcaccgtggacgacctggtggagacagggcgcaaaatgcaccaggcccagctgacggagatccaggcacgcgaggagacgctggactccatcatgcgggagacggaggaggagcggcaggcggcgctcatcgcctcgagcgtcctagacgaggcgctaggcaacatccgcctgcagtatgaggcccatgcggacgacctggtgcagagggttgaggacgccagcggggtccttgatgcggccgcggcctaggagcggtgggcatcggaggtcgacgcctcgctgtgaggccgagcgtaaagccttagacgagcgcacccgctccgcacaggagttcgaggccatgattcgccggcggatcgaggtcctcgactacaacaaacgcaagcaggaggggcgcgattgggcacaagcgcagcgggcctaggatctggaggagtgggccctagtgctcgaggagcgggcacgcgcgttggaccagcgcgagaccactttggccgcccacgaggcgacggcagccgaggccgaatccgcccttcgcctccgtgaagaggtcgccgccgagcgcacccgaaccaccacggccgccgaggccgtagtggcccatcgcgcggaggaactgtggcttcgagaggaggcgtggcaggagcgggacgccgcgctcacgaacgcagggccgaggtcaaccgccacgaggtggcggcacgccggctaggcgaccagctcaccaagcgtgaggaggccgtcgccgggcacaaggcccaccacctagaaggcgcccgggccaaacacgcggcgatggcggcacgggcgtccgagctggaggctagggagaaggaactggcgtcgcgcgggcagcctggcgattaggccagccagcttgccacggcccaagacaccctcgccgatctggggcgcttggtgcaggaccaggctggagagatcgcggccctccatcttgccaacgacatcgggcccggccagctccacgacgccatcgaacggctggaacgtgcggggcgccgggtgggcatctccatgcgccgggacaagaagctcccctccacgaggccggtgctcgcatgatggttggacgagatggtggtggacctggagaagctggagaaggaggtcgtcgaggccgtgaagtcgtcatcggcttccttggcgcgggctgcggtggagcttatcctcgcgagccaccaggcccgtgaccccgacatccttccctggcgcgcactcgaagatttccccccggggattgaggcgacggcccgggagcacgttcgagacctctcgctctctcgggtcgtccgccatagcctctcgctctcccgcggtggcctcggggccttacttgggattggtggctttgggcgttgggccgctagggaacgaggggctgtcgctggttaagtgggcccctggttccctcccatgtccgggcttgtgacttggcatccgcgggtcatgttcatcgcgttccactacgagggcggcgctcaccacatggggggtcgcaaccaagtagagtagcagcggctcctctggaactggggccaccagggtcgaaggggaggtgaggtaggccttcaactggttgagggcttgctaagcctcctccgtccacacaaatggccctgagtgcttgaggagcttgaataggggtagcgccctctctcctagcctcgatataaatctacttagggcggccatacgtcccgtgacacactgcacatccctaagcttactgagggcgcatcctctttatcgcgcgtatcttctcgggattagcttctatgcctcatgacgagactagaaaaccgagaagcttgcccgccggcacatcgaacacacacttttcggggttcagtttcatgcgcgtggacctaaggctatcgaaagtctcagctaagtccgtcaacaatgtttcttggtggtggcgcgtctttaccaccaagtcatcgacataagcctcaacattacaccctatttgattactcaaagtaatgcgagtcatgcgttgaaaagtagggcctgcatcctttaaaccaaaaggcataattgtataacaaaaggtgtctacaggagtaatgaaagcaattttttcctcatcttcccctagccatgcaaatatgatggcatcctgaataagcatctaggaaacacaaaaggtcgtaccccgcagcggagttaactatctgatctatgcgtggtaaagggaagggatccttagggcatgccttattgaggtccgtgtagtcaatgcacatccggagcttgccgttggcctttggaacgaccaccgggtttgctagccactctgggtggatgacctctcggatgaagccggtctccaggagccgcgtcacctcctcacagatgaagccttgccgctccggggcctggcgccgtaccttctaccggatgggtcgggtttccggccgcacggcgaggcggtgctcgatcacctccctgaggaccctgggcatttccgacggcttccaagcgaagacgtcggagttcgcccgcaggaaggagacgagcacgctttcctatttggcgtccaagttgccgccaatcttggcggtcttggacagatcatcgccaaggggctccttgacgggcaccttatcgcccgaggtgatgcgcttcttggaggcgtgggatgcggaggccttcgggaatccgccggcctccactggctcggtggccgccgccaagctgtcagcacactgctccgcacaagccaaggcgatcttgacatcgccagagatggtgattgggccattggggcccggcatcttcatctgaaggtaggcgtagtgggtggcggccatgaacttcacaaccgcgggccttcccaggaccacattatagggcaaattcagattcgccacatcaaagtcaatccgctcaatgcggaagttgttggagtcgccgaaggtgactgggagctcgatgtggcccaaaggccacgtgtgccctggtgtcaccgcaatgattggcagcgacggctgaagcctcatccccgaggccttgagggcatggaaggccaccggggagatgatgctgaggctagcccccccgtcgaccgagacgcgcttcatcttgacgttgtggatggtcggggagaccatgaggaccagcttccctccacgggtgagcaccgtcgggtggtcgctctggtcgaaagtgagcttcacctccgacccgcctcgtgggttgggatggcggccagaagctcacgcctcatggccttgaaacttcgacgggaggcatgagcacaagcccccccccggtcgagtgtggcgacagtcccctgaggtacctggaactccaagttctcgctgttgtcatcgtcatcggcgggggcctttttcttggcctcctctcgctggtcgccagcggaggtcgcggggccttgccctcccggcgactctgctgcctctcctcattggtcttcctgtaccgctcggccaagttcttgaccgtgcggcagtcagcaaggctgtgccgataagtgttgtgcaccgagcaccacttatccgctgaccggctttcgccggggggagtggtgatgcttggcttgtcgctagtgaccttctccttgcatggggtccgagaaggaccgtctgcggcaaggacatggccctcgtcgttggagcgggccggcttcctctttctcctcttatcccaccgcttggagtgggaagagggctcgggggtagccactgccgccgcaccatagccagaggagttccaagcccacgcctcttccttccgagccaccttgtccgccagctcgaagagctaggcggtggtcttgggctccttggaggtgatcttctcgagcatgcgattgtgccgcacgtcgctgcggaatgcataaacggccgtatgggccggtatgcaggggatggtgttgtggacctagcagaaacgctgtatgtacgagcgaagggactcgtcgtcctttcgctgcacagcgtgcaggtccgcctccactcctgggcagggatatgtgccctggaagttcgtgatgaaccgctagcacagtcctcccaggagtggatagagtcagggggctgggtcatgagccagccgcgcacctgacccttaggggccatgggaaaataattcgccatgactcggtcatcacctcccgccaccacgatgattgtggtgtagatctggaggaactcaaaggggttgatgctgccgtcatacttctcggtgaggttgggacggaacttcgggggccaccggacattccggagactcgccacgacggccttgcacccggccccaccgggaatggacgtggggggcgagccacctcgcgcggaggggcgcgacactccagatgaggaggcgccttcccctatgcgggcagcatggcactcgtccctgcggcgctcgattttgattcgagcgtcctactccccgtagaggtcatcatgatgcctccggctttccgagggccacgacgacgttgggctgtcgaccgcttcgatgtcaaggccgatcgacgggccctccttcttgcggacaaggagagggtagtgggggtacgcgaggtaccagtagtcacgggcccgccatcggtggccagctgtcgctgagcggcggtgaccaggttggccacgtcatccaaccatcgctgaataggagtctccggctctaggttgacagggggggtgccgcagaagagcccccaccgcctgaagtgcgccctggggcgaaccttcgtcgccgtaggttaggcggcgccgcaccctggcgcggtgtggcctccccccaccaggtggcggggagagggccgagcccccagaccgattggggtcctcctgccgtcgggggctatggcgcggaggagttggagaattctggtgatggtgtcgaggatcgctactcccacttgcatcctcactcccggaagaatgggtgtgcgtaccaccacctcatgttccaccacctcaaccatggtcactgaggatggagagaaacttagggcggaagaaaacgacttccttctcaagcgcgcggatttcctcctacctagcgcgccagctgtcgaggagagatcccctctagcgggtggtcgtgagacccccccctttgtgagttcggtcgggggagatggcgcgatgatcaagaccctacttccgcttggcgcttaactactaaaacgctctcgtggctgtgtgggagaccaaggattatacaggtttgggccgctatcgagcgtaataccctactcctgtgtgtgggattatggtgaattttgacaagaggtttttagctctaagggaaacctagctgttctttctccgagctcaagttgtctgagagtcgtcccctttcttggtgggcgaggtactccttttatagttcaaggggataccacatgcaccgtttgcacctactcctccacaggagggggcccacatggccctaatcagatcgctatcctttgcttcaaccggaagcaacacggttgcccggcttcaggaggggcccagcgccgtcccccgcctgacacgggggacatccccgtcattccccattaattgtatggggacttcggcggctcaccacgcccggggggtgcccctggcagtgtgccgatgggatggggcatacctgccctcactccgcctgacatagggcggaacgtgggggcactgccacccgtcccatcgcttgtgaccgatcacagaccgagcggcgccgcacgtcctcccacaccacattaaatgcggcgcgggacggttgtggcaccgcgcattgaaggcatggagcagcgtttctcgccccgcccgctctccccgccatgtggtggccgggcgaaggcctcagggtagcacgccccgaaggcctgaggggtgtgacgtggcaccccgaggtcgcccttgccacctcagcgctacccgaggggcggggggagatgaggccgcgtggccacgcgacttagatgagaaggatacttccctttgctgtgcgtacccccgggcccatttcaccgacaactatgtatagatcaaatgttgcagtgaattgaaatatcctttcgctatttgctgaaacattgtttttatatatagtgaaacatcacctgattttttggaaaccttttgtttcatacgttgtagcaaaatgttccatgaggtgatttggttgtgtttcagctttttaaatgattgaaacaatttcgatctacttgatgtaacaatgcccgatttttgcaaataataataataataatatcgagcgtccgatttgtaggtgcctcgtatttacagtagtgatatttttattatctaataagttcttgcgatttatatatccgttttgagagcgactagagtacgggatcccgtcacaaggacgagatattttaatgaaccccctacccctttcttttctccagttacgagaaatcccatgcgtgagaaaacgagtaaagcaggaggacacctacccaccctcgtgcacgcatggtgatgatgctagcaggaagcaacggtgctagcaccagcggctagacgccaagagggcgcacggacgtagctacagcaggacggcaacaacaacaaggaagagatagtggaatcgaggaaagaaaagaaaggaataagagaacaagaggtgttggcgatagaccctcgccagccgactaagcagtggcacatgttccttttcggtgtcttgatactaggtacgtccgtacgtggggtatcatacatgatatccataggtaccaaatctgatctcttggtactatgatacctggtacttattaggtaggtatcatacttgatacctatggtaccagacatgatacctgtggtatcagaccagatacttgatacctgtgataccatggctcacaactgataccttatgatacctatggtaccagacctgatacctatggtatcagaccaaatacttgatacttgtgataccatggctcacaactgataccttatgagacctatggtaccagacctgctacctgtggtatcagaccggatgcttgatacctgtgataccatggctcacaactgataccttatgggagtcttcttcgatggtcttctttcttgtttgtttcccttgctgccttagtacctggacttgatgggcgtcaccttgctgcgagcttgggacaaaagaggacacaagagcgttgccgctcactgccctcgtccccaatgtgcgctcagaccggatctagcgataggatgacctaggcctctagatccagcattggcagctttgctcagccaccaccatgactgcccacaaatcagcttgttgcgctgacgccacacctccacaagaacaatactcttggcgaacgagagaaaggggagtgcgacagtggtgttggttggaggcgagggagaggagggaagtatcatcagcatcagctccgatggaggccttatcggctacgccgctatcaattcagtctgtaccacctgagctcgtcctcatctctagcagatggcgtcaggagatgagtggttgagggaggagtggcaacatgagataagactttattaattaactgacatccttatcctttacctcgaacggtatccagtgtgctagtttttctgatccgtttttacccaagacccactctattttttattctcccactgccttcctcctttttcccaacccctctccctcgttttccacgcacacgcttttcaaactgctaaacggcgcattttttgtaaaaagtttctatacgaaagttgtttaaaaaaatcaaattaatccatttttaaaaagaaaaatagctaatacttaattaatcacgcgctaatggaccgttccgttttccgtgcggaaggatccggtttggatccaggaatagcgaacacacccttaagtttatcccgtagctcgaacggtatccagtgtgctagtttttctgatccgtttttactcaaggagagcagctacacaacgggatcccgttgctacgggatactttaaatgactcctcccctttcctttcatctgtataggtgagattccatgtgtgctccccctgatacgtaccagaggcacgatacctatccggttccaactcggtatcacgcgcgcgatacctcgtcgccggtgtcgctcctctgcagccggaccagtatagcacaggctggtacctaatacctgatacctggtacacctagtacctgatacctagtatctggtacctggtacctgatacctgatacctgataccagtgtatggtacctgtggtacctggtacctgtaaaattatgggattcaagaggataggacaggggaattgatactatccatataagccggagaaaaaatcagcaaggaaatcatcaagaaaaaaaagaaaaacacacatgagtaagggatgcaaagcggctgtgaagcactgccgacatggggggcacctaatacctgatacctggtacacctagtacctgatacctagtatctggtacctggtacctgatacctgatacctgatacctgatacctgataccagtgtatggtacctgtggtacctggtacctgtaaaattatgggattcaagaggataggacaggggaattgatactatccatataagccgaagaaaaaatcagcaaggaaatcatcaagaaaaaaagagaaaaacacacatgagtaagggatgcaaagcggctgtgaagcactgccgacatggggggcggagaaatcagtcggagtagaatggagtgtgaggggtacctgcaggtatcgaaggaagggatgcaaagtagcggcgcagcgctggtggcgtgaggaggcggatggacggagggaagcagtggtgggtgaaacactgctgcgtgagggtagagggacgaaggagctcgcggtcctcgtcggcaggggtgcgacgacgcaagagctcgcatgctgcttcgccgccgctccgcacgttcctgagccggcgggagcaactccgcgcggcgccgtcttccccatcgccggtggaggagggagagcaagacgccagcgaagcaccgccacgcgtaagcgacgacgaggacggcggaagccggcggagattcaccgccgtgagcggcaacgacgccgatgaagtcgatagaacgccactgtttttccgagagtcacgggtgggtgggggaaaatgaaacaggcactggacgcttctgttcagaaaaacggtttatacactaattaatcacggttaatcgctatcggtaatcgcaagttaagttctcccgttgcaactgaaagccgtggagtagattttctgttacccaagacccactctattttttattagcccaccgccttccctttttttccggatctgaggtcttggctcttggcggcggtaagctcgggtaagctggggtcgacggcggcgaacttcacctacacgctccgcgcagatttaacatgccatcatcctctgtaccatcgcgatgcccctgacgagaaggcagcgatcgaggaggtgcgccccacgctagatcgggagaaagaggtgagcccgtcgtggcccatagagcacctccgtcgcaccacccgtgcagatcggaggatgggacatcgtcccttgctctatgaggtggtggaactggacctgctgataggcctcccctatggactgagctttagcgccgttgatcaccatcttcaccggtcggaggaggccgaagatgtagccgtcagatcaggcacgacactgccgatcttcctcgtgtgttccgtggttgtgttgtagaagagtagcagcctgctacggctggtggcggtgttgttaatggccggcacgtctcagcgtggtaagtttgcattttgctttagtctgcatcttgtttatgtagcagaaacaagagctccgaggcaaagcaagagtgtgctgtagaagcttggcacaatgcagatgccttccctgtgcgttaacgctgccgccggcgccgggtttcctactctggcaccgtaaagccgtcctccctcttcctgctccgccggtggacgccatgactgttttgttgtcgtcatttttagccagctgcccggaaggcactaggacaggagacaggaggagttcctttgatatttgattgaacattggggcttcgatcctttgcagtatgcttggtgagattgaatttttagtttatcacttaattgcaggctgccaaaaacagattaactaagacttaactttgttgttggtactattctcccttacctgagtatgaactttagacccggtttagatcacaccctaaaatttttcaccctgtcacatcgaacgtttgaatacatatatgaagtattaaatataattttagaaaaaaaactaattacacagatggggactaatttgcgagacgaatcttttaagcctaattgctctatgatttgacaatgtggtgctactattagtgtctgaacaccccatgcaacaccctacacaatatccgatgtgacgccaaaactttactcccctagatctaaactctcccttagtttgttatggatgcttgtttcaggatgtcggcaggcacttctgttcagtgtccaaaatgcatatatacgattatcattaaggcagcgaaagtgtactgcgtcataattggaattctactactgcaagcatatagcattatggatttatgaagctgtgtccccgatacttctgagatgtcctgctaactgagcccgccccgagcttcacacgagactagagaatcggcaagtggcgatgccgtcggcgtttatggggtcgtgctacaacaaacaacaattattcatagtgacgaggtctagtgaaggtgtcaaatgctcatttgccgatgtcctagtgctcatatagtctgtaatctttctcgcggagtcagatgattttatttgtgtgcaatttttttttcatggatagattttgatgtttgagatgtaactacgtatggtgatggtagaatatctttttactgcgatttttagttggcatataggaataaattacttccttcgttttatatatatgttaatagatatatatgtatctagatttattaacatctatattaatgtggacaatactaaaaaatcttataaccttttctgacaaagctatcgagacattagagagagaataaaccaatgagtaaagaaattactagtggtgaaaaaaaggccacgggggattagagagagaaccggtgaagcaggaagtaatttttcggttttgttaaaatactgtcaccatatttttggcttgtttacagtagatctctagatgatttgatcttctctaagattcatgctgtggcaaattacaggatataaaccaaacaatgatgcaagatgttagcagctataaaaatatggtgacaactttttaggtaaaaatacgtcaaatgaaatttacacagtagttacacactacttatatatgtaattagtatgtaattttgggacttacatcgtaaatacactaaaattatatatgtaatttagtgacttacaatgtataaatacatgccgactattttttattgaaaaatataacgccataaatatagctactccctaatctttttactctactataagtcttttttttcccaatcttattggtgagtaatatttttacttcaatctattctggcttttattgtgcacatatctgagtcggtcgagagcaaacaggggattgaatcttagaaggacaaaatagtcttattgtgttgctttttttttacgttagttctataaatattttttcctcttaactgcaccaaatcaaacggcaatggcgtatggcatacgccatatacatgcactaatttcagtggcaaatttgcaattgatggttttataatggctattataaattagagggtgaaagtagtgatatatttataattcttccaattttaactgaacaaatgttccacatacatgcggatttatttgacgagtaacttttctactcatgctatacgagggcaggtgggttggtggcctcgtggtgggggactagggtttttgtcactgtgtcgcgccaagaagttttatcgcgcgcagcgtgttgtgtaacgggacccctgaccctcgacaaaaacggaatttctcccacatgcgctccgtgtcacacacgcgctaccgcgcttcgcgtggggcatcttgcgtggcctgagccttagcccaggacagcatggactcccccacacatcaggacatctgtcgtctttccacctctggacaaccgccacggcattatcgattgaaaaaaagagaagcacgaagaggggaggaggaaaaacagcaacttggaggagaggaagccggaagaacatatccaaaaatcatagaattatcacatgtaactacatatcaagttcataaactgtgttttgagattcatccaaaaaacacataacttgttttaataatggaatataatcccggcctttactcaaatttctacagccaattattacaccaattcaacaaaaactcacacatgaataaacaaaagcacacacaaactaataaaaactcccacggcataacaagatcacaaaaattattgaattctatttatgaatctccatccaaagttagtgaacaactgtataaccattgactccagattacgacatgcagctttcactgacttgatttcttcgtcacactttagtagttgaggctaagaccagagccaatatattgccctgaaaagaacctgcgtatacgacatcgatggtgatttgttaaaaaccatatcatttctatacaaccatatagcccaacatatagcggatgctccagcaaggataagtttggtatattctttatcaccccccacaagccaattctcaaaatatgagatatactatgaggagtatataaaccagtagtaaactatagagctctccaaagaaattttgcatagtgacactccacaaataaatgttgaatagtctcatttctcatgcaaaaacaacatttcaaactaccatgctaatttctcctagctaaattgttctttgttagaacaaccttgagaggcatcttaagtttccagataatattattcctctcaatgtagccattattaattaaagctaagtatatagaccgaaccgagaatacaccattttgatgaaaattgcatataaaaatatcattctcctcagtcaaataaatatgcacaattgaagcacataaattatgccaattgtttaaattatgtcctactaaagctctcctaaaagaaacatttagtagaacacaagacataacatttgcaattgaagaattcctcctacgaactatagcatataacgacgggtacccatccttaagagaatagttccctgcctatttattctcccaaaatctcacttgtacaccattattcacaattcaggaacccatatttagaaacttgctctgaactttcataagacccgaccaaaaatgggaatccccttgtttcttctcaacttgacttaaggattgattataaagatatttcattttcatagatcctaccacacgccctactcatttataagcctaaacaaccatttactcaaaagacattgattttgaattttaagattatgaactccaagagtacctttgatctttgggttaagcctatacttattcttgtgctcatctccttgccaaaagaaacgtgatctataattaattttttgaagaactcattttggaatctcaaaaaaaaatcataaacatggctaaactagaaagcacagaattaatcaacaccaattttcccccaattgacatatgcttacctttccaactactaagtttcttttcaattcttccctcgattgttttcctatccttgttactaagtattctaaaatgcataggaataccaagatatctcacggaaaaattcccaagcttacaacaaaaaatattagaataaagctcttgacattccattgactaaccaaaacaaaatgattcacttttataaaaattaattttaaggccagatatttttttcaaaagtcaataataacaattttagatttttggcttgtagtagatcatgttctaaaaaaaaaagaaaataagagtgccatctgcatattgcaaaatagaaagaccatcatccaccaagtgtggaatgatcccgctaatttgaccatcatccttgaccctcttaattataattaatatagtaagcatatcaacgactatatttaaaagaattggagataatggattcccttgcctaagacccttataactttgaaaattagaaccaacttgactgtttacttttataccaacatgtcccccctggataaaagaggcaatccactgacaccattttagcgagaaacccttcgtccttaaggtttgttgaacacaagaccattttaccttatcataagctttctcacagtcaatcttaagaattaccccactcttgtttttgcgatgaatttcatgtataatttcatataaaataacaactctttccataatatttcttccaggaataaaagcagtttgagtaggactaatgactttttgggcaaccccaattattatgtttatagcaactttagtaaaaattttaaaactaacataagtaaacaaataggctataaaatatagtaccaaagttaacagaatataaacgtaaagttcccctatgaaaatatttaaataactccaacaaatcaaatttaatgacattccagaaaaacctgataaaacttagctggaaatccatcaggactcggagccttattatgttccatttggaaaactatgtctctaattttcttctcactaaattcctgagttaaagcctcattttccatttgagaaatttgaggaatatcatttgttctactctcatctaattgtaagatagagtcctctagtggccaaacaaacctttgtaataagtggtaatatgcaattttaaattcgcatcaccatttatagtttggtcaccatcttgtaatacaaagattcttgttttcctttgtttgccatttgcaaccaaatgaaagtatttagtactagaatcaccttctaaaatatctttagtcttagctcgccgataccacttaatttcttcttctctcaacaaacatgctagtctatttctccaaacatatctaatatcaatctcccccggagttaataaatctgtttcaccctttttatcaagcaaatcaagattatttaataactattttttctcttttttataaacaccacttgtatgtttatcccatcccctcgaatgttttcttaatctatgaagtttagcctgtcaacgcttaggagtattaccttcatctgtggaggaccatatttccttaaccatgtctacaaaaccatcccatagtagccaatctaattcaaacttgaaaatgtgttgtccattacatggtgaagaggagtttgtaattaaaagtaaaggagtatgataagaaatatctctattaagagcaacaaccgaggatagcgggaagttatgttcccactccgtcgacattaatactctatctaatttctcataagtagggtttgctaaattatttgcgtaagtaaaatttcttccagacaaaacaagttgtctaagactcaaccatccatagttgctttaaagagaaaagggcacatatcatcacagttatcattatttttttcatcatgactgcgcaaaatattaaaatcaccaccaatgagaattggtaaagcttcatatctgcacatattcactaattcaagaagaaattgttctttaaattcattttgcgtcagaccataaaccaacaccaaagcccatttaaacttatccaatttattacataaatgaaatttaatataaaaatcaccctcatcaattaaaccaatatcaaaagttcataaattaattcctaataacatccctccagatctatccctaggaatgccacaaaaaatctttactagcacaaagatttttaagatcagaagaagtaaaatccctcctaacaaactctgataacgcaataaaattaagttgatgttccttagtaaaatcagaaataaacttatgttttttttgggtctttaaacccatcacaattccaaaagactcctttcattataacttatttttataaacttataacttatttttataaactttgtttcgcctcactcttttgccttttttttttgtccatggaaggtatcttagaatctgaagtagtttgaaaacgaatccattacctcatccataatttcactacataactgatgtagtaaaaagatatcctctaattgatcctctacgaaatcattatcaaagattaaactcgagtcattattatcatttaaactaacatgatccctaagtctttcatgttctacacttcttatatcattaatagcgtcatctaagctaacatccttatttgcagcaaaaataccaagattttgtaaagaggcagaaatatcatcattagaaaaatgtaaaaaggaaacattattatgcaagttacctttagccttttgattttctagatttctgtcagcctttatcttctctgccctttctagagcgtgttgaatgatgtcactacctctcctcttactcttcttagatggagacaatatcacttctggaacagcagcaagcttttcaactaaattgtcctgggattgaactccctccactagagaagtatcctccatcaaagtatcaaattcttcatcagacatagtcaatccacgtaaaagcataacctgagtagatggaaaggaagaagcacccttctcacggtcagaacgctacgacgcacgggatggacaccatgtcgcttgttcgcgggatggatggctttcccagcattgcgcgatggcacaaatcgataggcctctcgatgtagatttatgttctttttagaaaacctgcatgtttcaggagactggaatcctatacctatacaaatcatccccactactagaactctctgcttcctggtgcttccacgtcaccttttttgtccccaccgttggatccgcatcgagcccttccttccgcgtcgcttctctcctctcctctcccacatctcgctgcttcgccggctccacgctccccttctctcctctcccgcatcactctgctttggcggccccacgcgcatcaactcccctcctgcatctcgcgccgccgcccccgcaccgcatccacactgtgccccgcttcgcgtcctcctcctggcgccactctgcgcgccggttccacttcgcctcccccttctagcgccggccacttcaccttccccgccccatcgacgcacctgtccatccaaccctgcgaggctgcgaccccccatctggccgtctgtcctatgcctcgccacaccaacaggaagcaaggccgccgctcccgtgctgcttccactcaccgctaactgcctcactgccctgccctcctgtcttttactgatccattttcttgcaaccattcccattcctcttctccgtccagatagagttcagatgcaaataaattcccctcctcttcctcaccacgaactagcatctcatcaatggagattgtttcgtcctccatcgctaccgctggtcaagatgaaggcggatccacgctgttgcatctctgatgaatggctcgtgtggccgtgttatagcagccttgctgacgccctttcgtagggcctctttcttatacctacttttctttacttgctgctttgggttctttcacttccgctctagaaagtaggccttaattgctattggtgactggtgaatggtgatactggtgagggaaccggatcctctaacgtaatctattctacgtcagagggacgttcgataacagatcgtcgttgcttgcgcatccgatggcaacaactgtttcaatcccatctcttgtctcaggccccgcaagcgcgatgtccctgcctgctctccggcccattcgttaataggggcagcggtgccgcgccagccgccggggagcttaggccaccgcgcgctgaagccggcggggaggtcggactggaacgcggtgctaccgctgtccgccggcgaggtcgacggcgatggctccgcccagcggctgctgttgtcggaactgtcgtcggagagctatacggggaacaaatagaacagaaaagttactcatcttctcttcacttcatgccatgagatttctttcattggttaacatctgcactcgttgatctcttcttcaaggaaaaaaactatcttctttggtattttcttattgcaattgtagacttgctatgtcgcattcaactgtgaatctgttggcaaagttttggtttcttttcttctggttagctctgatttttattcttcaggttacttgtagtttctgagaaaagttaatgacagcacgaatgccttagcaagattttcaaccagctgcctcttccatgagaaaaggcaacctgatgatggaagttcgatcggctacagatcgattccaatccaacctcgccggcgacggttccgagaacagcagtcgttgggcgatgggaccaacagcaaacaccgaggcgggcgtagccgtcgccctcgacctcgccggcggacggcggtagcaccgcgtcctagtccgacctccccaccggcagcagtgtgcggcggcctgagctctccggcggccggcgcggcactgctgtccctatcaatgaatgggccagagaacgagaaaattgtgattttgctatcgcaaaagaatggtttcgttggaatactatcccttcaaagtgattcattaaaatgctatcctaaactaagaggtgttcactgaaatgttattttggatctttttgttagtactaatgtttttactctcttttagattttctccggaccaaaatgccctcgcctctatgtcctcctttcgccaggataatggcaggttgacacatgctttgctagagcaaaatatattgctatatatttgtgaaacctatgcacggctcacgctccgctgcatgatatgtatatactaattgatcattaacactaatacaaaagctctagtgcactggtttgaaagtcaaacagcacctctctagttaattttgacacatgctttgctagagcaatatattttgctttcacatttgtacaataaaaatggtgtgtagtccagtttagccacaagcgcgcataaagatcaagatttttctcactccaagttataaagatataatggtgaagctagcttaacccataaattttgggcatgaaaaaattgtaaaaacaaaatagaacaaatttggacagcatgtagacataatattgaatagcatgtggttcacaaaatacctcacataacaatggttcacaatataacagtggttcacatgtaccatggttcacaacggttcacaacataatagagacaaggacacaagggtattttggtcagaacaaaacttaaaatagagtaaaatcatttctagcaaccaaaaagatctaaaatagcatttcagtgaacacccctttgtttagaatagcattttaatgaatcactttggagggatagtattccagcgaaaccattcttttgcgataagcaaaatcacaattttctcccggagagcaggcagagacattgcgctgtggggcctgagacaaaggacgggactgaaacggttgttgtcgtcggatgcgcaaggaacggcgatccatggtcgaacgtccctttgaagtagaataaagtacgtcagaggatccggttccactggtgagtagtgactatgagtttccttcttctttcctctatcttcgactggacatgatttttgttttccaagattacaaccagggttcagagcaaaaccatgtggttactgattgataggcaaattctatgtatgtggatgaaggtatgtacattgtttaccacaaaacatttcactctgcatcttctatttactaattaattatgtaacgcttactctctcctatggtagtgtccaggagcagtagcaccatgatttcatctatgcaaatcacccaaagtaaagtacaaggcatcttattaccgctcttgcttctaagaactttatagatgaatccagttccagtactgctttggcattgagcaagagtaacatcgtatgatgtttcctgatgcattttgtccttattatttattgtcatattctaaactgtgtgttgatgtatttaggtagacaaatattctctttttccagctggcaatgtatctatgtttacctacaggtatttacctcttcttttttttttgcgtcaatttgcaggctatgctactgcttcctctaggaaacagttctgcacaattagaagaacctgatataatatatatatatatatatatatatatatatatatatatatatatatatatatatatatatatatatatatgatgcattgtcaagtttgttcccagaggtgatcttctatgctttaaatatctctcttcagttctttttatccaatgtacattacatagttttattcctatcaacactgtaaaaattaatgatctaggttatatgaaaaaaagatatcagaggtgcccaagctattctgctcccacaatggatgcataataggccacataatccattcatcttcatcgttaacaatattgtcctaaaatgtcttacttagggaatttattgtatctatttttttcctttgcctgacaagatcttacccagggccattggtttgattctacttgagttagtcaacatgataaaagaacagtttgatttagagccaatgaatgttcaactgaatagcattgcacaagtattgttttgatctaaatgcactcctaacaaattttgtggtcctcattttactattgtccaactacaaatcagtacacaacatcaatattaatctcctttagagatgttcatacaggtctacaatattatactattgaaaatcttcttcagagatgttcccacagtattacctatggtctcgaagcaccgtttctatataacatcatgaggacaaaaacatccaaaataatttttatcctaattcacttttataagttaccagttattaagaatcgtctatgatgcaaagtctaattgaggagactggtataattcagcttacggtcacaagcatgcatacccgtcaaacgccttattccttttatcaaaccaagctcaggcccattcataaaggattgaaagggaattggagaaaaattattccacgtatattgaggtgtgaaattaatcctcttacccttataatccttttcttttagggattaaccaaagaagccttaatagggtaaaaacgactcatacagatggaaagcggctgttattacatgcctaggaaaatgtatatacataaacttacaagttaaacaagaattttgcgaacatttcaactcctcacgataggcaagccgcggcaccgtacagtacacagcatattctacgtccttatgtgtagataaccaatgtgttggcagcacatatactgtccacttacaaccccatctcaattcctctatataaaattgcaagagagtaataacatattccttttttttcctttacactgtatgcatacatgtacatcaaatataaacaggcagacagatactaatagaaaggtagtcggccataatgttaaacaaggttttggcgtagcaacggttgaacctcactacctgtacacccgtccccaacctgtgatttccagaggttctttagaaaactataccgctgttgaacctttggagtggtaacggagtcagctaggtcccctgatgcctgtggcgacagctttatggaacttgatgatgagctctgcaccttctggaggcatacttgcacagcgtcgtgcactcgcacgaagcaccacccagtaccaatcatgtctatgatgcccgatctcgaaagcagcaggtgtacctgccggtttgggttcgctattgcaatctgcaaccaatcagtagtactcaatgatttaatgccatacctgtacacatttgtttctacttttcactcgttcaattaattagaagaagtgccaacctggatatggcgatccctgtattcttgatacaagtccttgagagcctgaacagcacttgaatcgatgtatgtaacagctgcatgttcagtatttgtttatcttaactagtctagtaaatctacttgatgctcatgagtttcttaattgaaagaaacatttttatgcaaacatgatatgacaaaaaaattaatgtgcctcatatcatgtaacataagaaaaagatcttacgggacatctcgaggatcacaaagtacactcttccgacatcaggtccacggtttgaatttgggagattaagctcatattcacgcaacctgataagggacacaatcaacaaaacatccatcaggacatcagggtaagaaaaaaaattgataacacaaactgttcatacagataaaaaaaatatccacctgtcttttatgtaacttatgttggcaaagtagataggtgcatcaattcgaacaacaactatcccgttgtaggtataagcctcagggtattgcaatctatttcggtacactgtggtgccaggtaagcggcccaatacggctgcacacagaccataaaatctagttaaatcaactgttatactctaatactatgcagcagctctggatatttctgttatcctatagagaacaaaaataacggcgacaaaacaatccatggcgagagaaaagatatgtcaaagcggactacaaatttcttcaagcacaacctccaaacagtacaagggattattgaactctcaatatggttgtcttgacttatttagactatcagattcctatcccacacaaaaatctacggcacaaagaatcacagcctccaatcatctactgtgacctaattacttctagttacttcctttggatgagtccctcttgcaagtcctcttaagacagagcaggaatcctcatcctatgaagctatatttatgaatcatcgtagaactcctttcatggtcctacttactaggactagaattacctttttgccctgcaataatatatcagaacctgatacctaaaagttaaaattcttgaacataacagttagaaatagcaagtctatccaaatccatgttgcagaggggtcaaatcaggtgcatgacagggaaatcaccagaggcatgcataaataatacataagctgtcattcaccatgaggattggattgcaaagtgcagtcctggtttccgtcccaagtcgacggcaatatatcctggtttaggcaaggtcgcagtagggcacaaagagcaatatgtatggacgtagagcacatgagggggtcaggaagagaggagaagcatgcatacacatgctcctgcacccatggcatggcggcttcaaaatctttggataagattatttggttatgtattgattagttactttcctgatgtgaccatggctactatgaatacgaccattgctcacatcatgaatcaacaagaagacatcaagatcaagtcctccatgtgctgcaatctgattcggccacgtgttacattgctgacttcaaacggccgccaaatctacatacgtgctccgttttgggcccgtgagtacttgatggaaagctctcgaagtcctccttccaacggatccagcctcatctcggaaatctatctcgtttggccgcaatcacaaaagcaaggtgctgcgtctcctgtattgggccaatgggcttgtaactttgtttgggaccctggcccatgtggggcccatgtggggtgcgccccaatctggtggagcacgacccttggaccctcttggtcgtcctcccacctctataagtagttaggtaccccttcagggtttctggggtttttgttagattaaagtttagccattgctacttgcttgcagcgcgcgtgtcggctagaccgtccgtctgcttgttcttcggaaccccaacttatcatttgtattaaattcctatttgcaatatcagattgcttttatcttgttcttgcttgtttcttcgatttgcttgcaggaatagggttgatctgcaccggcaagatcaacaacccatggagaggtgtatcgatcgctaaggcgcaacacaacgtctcgtacggttgtagtcggatcgtcaacgtttctcccaaatcgtagttatcacaactcaccgaaagatcgggccaacaatagccttgagtgtcgagaggaactcagggttcatcaggtggtatcagagctttcgttgctcggtgagtttttatcttcctataaccagaaaatagccatacaaaaaaaattcgtatcatttacctagccatattgtgccattgcattgttcttttcagtttttgctttgttgaattttgtgttgcattgtcacgtcgtgttgctggtcttagcgtctagttcgtttagagtttcgagttctggtcacgttttgtaccacagtcgtcgctgccaccgtgtctctgttgttgtcgggacctacgaaaacggaatcggctcgctgccacggttctatttttgtagttttcagaagtttctgtcggttagttttggagttcttgagttgcatctagagtttgccgatccttgtgtgtgtttattttggccgtgcctgtgtcgtgcacgagaggaggaaggtgaattaccatatctgattttggaagtagtcaagtttgttttggaaagatatagtagattggattggttaaaaatcagtttcctttttatcccatacaccaaattcggctgccatccactccacctcctggccgagtcccactcgcccctttggccgagtccgactccctccctctcttccaccgttccgagttgtgtcaaacaccttggcaaatttttgtttggtgtcggtttcgagatctgtttggaaaaacggaaccggcataaattcagcattccattttttgtataattttaattttgggtttagacttttacatttgagtccctataaattttatatttatgtttgagtccctgtaatcttacattaaggtccttgagtcagtttttgttaaaaaaaataagaaaaaaagtgagaaaaaaaaaggcagaaaggtgcaaaaaataaaagaaaaaaaaagccgcaccaaaaaaaatcagaaaagaaaaggaaaaaaaaaagaaaagaagaaagaagaaagaaagaaaagagaaaatattgttttgtttgagctgaacttcatacatcagagtgtgcttgagttgtttctggtgctattttgtggtaccgtttgtgtctaggctcgcgtctctagtacgttctagcctaggaccagcacggtacttgactttgaacaattattcaactttgcgttctctgatttgagcatttgctattcctttgctacatatttaagcctacccagagctccacagatttgattgcagccgtacagcaagtgtttgccgaggcatcgatatatccaacctctattggggtgcttggttgagtcggtgtacatcaccattccacttgcattggtaagatcttgtaagagcttggttaaaagcttgagtgtgtgtgagatttgagctgccagtacctagtagttgataggagcgtgtatattcttgtgtatgtttcttgtttgctgctaaccatggcaggattgcgcaaggggaaacaagatggtcatgctcaacgtcaacatctacaccttcgacgagatatgacgacttcttcacgtgatgcatatgaggtacatgactataattttgcacaagttgcatgtaagttaccagtctatgatggaaagtatgattccgctgcatacattaattgggagctagcagtagaaaaacaatttgatgagtatgatttttctaatgctcaaatgattaaggctgctagtaataagtgtaccggttctgcatctttttggtggcatactgtggggaataagcttgaaacttgggatgaatgcaaaatactgatgagaaaaagatttgtgttttcatactatagacgtgctctccttgagaaatgggaacatctaaaacaaggtgacaaaactgttagggagtacttttatgattttaaaatttgtatcacttatagtggtttacaagaatctaatgagaacacaatgactagatttttcagagggcttaatttcaatattcaggctgggcttgttaatgtgacatataatcatataggccaattgttcatgcttgcttgcattgttgagcgcaaaattttggagaatccaatggagcaacaagatatgcttgtgcctcctatcactgatgttttgcaggaagttcagaaaagtctccaaaatgagaagaacgatatgtttgagatgtcacttccatcactcgcgaatgaggagaaggctgatgcagctacattatctgaagaaagttcgcaaggtaaattaaatggtgctgagagaaatgaaggtgagtattctcaaggtgagctacacttgtccacttttcatgctatagtagagcaaccattagtggaatcaattactgagttgcctttgtcacaagttgatttacttgctgttccttgtgataaagaagagttgtgtgataatgtttcacttatatccatgccacaactagtgaatgaacatgttagttctactatttctttgtgtgctgattctaagcatgttgttcacattgctaatgaagtagaggaacgcgaattgctatcttctttaaatactttgggctattttcagtttgatgattttggtgagctcgataatttgaaggagaaattatttgctaaatctgatttgccatgtccaactaatgctatttttcatatctttggcgaatataatgatagaggaatatttttggtgcatagagtttacatttgttcagatttagaacatcttgtagttccggataaaatatgcaagctagagagacatgttactgctaatcatattgtctcgagtttgtcttgttttgattgcaagaaacaggttgttttcagtggactgcgcgaagagcaccatatggaaaaaccgaggacggttttctgtgaagaaggggaggatgatgtgaccatggctactatggatacgaccattgctcacatcatgaatcaacaagaagacatcaagatcaagtccttcatgtgctgcaatctgattcggccacgtgttacattgctgacttcaaacggccgccaaatctacatacgtgctccgttttgggcccgtgagtacttgatggaaagctctcgaagtcctccttccaacggatccagcctcatctcggaaatctatctcgtttggccgcaatcacaaaagcaaggtgctgcgtctcctgtattgggccaatgggcttgtaactttgtttgggaccctggcccatgtggggcccatgtggggtgcgccccaatctggtggagcacgacccttggaccctcttggtcgtcctcccacctctataagtagttaggtaccccttcagggtttctggggttttgtttagatgaaagtttagccattgctacttcgcttgcagcgcgcgtgtcggctagaccgtccgtctgcttgtattcgaaaccccaacttatcatttgtattaaattcctatttgcaatatcagattgcttttatcttgttcttgcttgtttcttcgatttgcttgcaggaatagggttgatctgcaccggcaagatcaacaacccatggagaggtgtatcgatcgctaaggcgcaacacaacgtctcgtacggttgtagtcggatcgtcaacgtttctcccaaatcgtagttatcacaactcaccgaaagatcgggccaacaatagccttgagtgtcgagaggaactcaaggttcatcatttcctttaggggattgtttctgtcctttatctttttagatccattgttaagaagcccttttttgagaagagaggttatcctgttgaaagcaagaacaattaacagaaggatagtccaatccctctgccttatgtaaagaggggtaccatctacccacaggtaaagggagtaactatatttatgtcgccatatttttcatcaaaaaatagtcggtatatatttacatcgtaaatttctaaattacatatgtaattttagtgtatttacaatgtaagtcctaaaattacatatgtaagtctctaaattacatatgtaagtataatgtaattataatgtaagtgcaatgtaatttctatattttgcattgaaaattacatatattgattacttatgtgaaagaacgtgccaacgagctacggttaaagcagtgcttcgagccaatcaaatgcaattgatgagaccaatgccaccgaaaaaagcggcgctccagccaatcaaaggcttagaaaaatttcgactgagaattgagaaaaaatatgtcgccatatttatagcaataccgcaggtaaatgtaggaccctgctacctctcatttctaccaatctatcctcttttccaagctttaataataataaaggggcaaagcaccaatagaggagcagggtgggatagaatggtagtttcttagtttgataaatgatgttgtggtatctattaaagtgtgagtaccctcaggtctagtatagcataattactcaccgatatgaggatttgctgactcatggattacaaaggccaatgagaatccgacctacgaaggaagatgttaccatcaaaagaattcagaacattttggtatcttatccacatgtcagtaatcagcaataaatttacacttaccccaacaagaacaccaatctcaataccaaaaattaatgttgtaatgaatgtgattgcccatagaaagaaatccttcttatcaatactccacaagaagatagcctcctcgtagtctacctaaataacgaaaatgtccatgacaaatcagattgacatagtttacatcataaagtgagaaagctacaaaacaaattattgtgacatgtcagagaagaaagctcaaggtggagggtaaaataaattaactatacttattttttaggtaaaagcactaatatgtaaattgttacaatgtttttcaataaaatgtttaggttggcacaatttcgtcagtagcttcctttgaaaaaagcactacaaaggcatcaagattgacagagcatctttttcgataaaggtattttgatatatctgagaaataagatgtccttaccaggctagtgactgcagaaataacaattgcagccaaggcacactgaaggaagaaatatgaaatcaaattagtaatgtgtgtaattaccatagctaataaaatatctgagatggagttttctgcagtgcatgtttagcacaatagtacaatgtttccaacataacattgattcatttggttacaggcttaatgcaacaaatggggctgaaaagttgatttctgcaataaagttatgttttttatttgaagtatcaagagtacaaaactgtggttatttttagctgataatagaggatctcaagtaagactgcattttacataggccagtttctttgctaattaaacctccgtcccaaaatacaacaacttttagctctcaggatttgtcccaaaatataacaacttctccaccaacattctcttcccaaccaatcacaaccctccattcacttttcccacctacctccactactcatccaatcacaactctccaccattcacttttacctactttcttaataaccgtgtccaactctaaaacttcttatattctgggatggagtacagacaaaaaaaccaaattaatgcaggggaatgtagttattgttgcagtttcttagtaagtatctacaggcataatcatcaaccaaaatggaaaagcaaatgcatttcaaaaagcaaaactgtacctacgtttggtacttaactgtaaacaacttgaatatattaaaaggtgtgttatttattaacttttatacacaagagatactataaattagttgcagtagatctgctaaaagtacaacttcaaattaacttgaactgtgaaatataccacaaatacaacaaggacctgtttgcaacaccaaatttcacattattttcattaaaatgcagcaggaatatggaaaaacaaatacgacttccagagcagtaattacaaaaaacaagttgcaaaaaagattctcagatggcaatctacatggaaccaatacttaaaagggtgctgtcaaataaacaagacatgtggagtctaacctgaggtatatccgtaaacaagggtgtcataaacaagagagcaccaccaattattatgcccattatgattccagatagaccagtttttgctccactttcatgattcacagctgacctagaaaaggaacctgaaagaatagtacaaaataatcagctttttgaagcttagctctagtgaattaagaattttaattatgtaatatacagataaataagcacagaaatgatctctcattaatatggttagtattttacctgtagcaggatatgaagagaaaaatgaaccgcatatgtttgctataccaagcccaaataactgtgacgaacaaaacataaaaggaaggtatgagtttgagcaaatgaaaatatttgggaggaacgaaacacagttcctactgtataagagtgcctgacagttctgtgtaagcaacacacaatatttgttttcagatcttcacaaactcctaagtcttataagcattatacaaagatgtgccggaataatggattgagacattttccattatggaatcaaacaataactcagccatcagaaaaaaaaaaccccatcaagttaaactttgtgtagtttgcagttaagacagacgtgagggactcagggtcggtaattttttatattttaaacctttttaatataatattttaatactgaaccatctaaaattttatttccaactctgaaccttttggccacgccaagctagctagcgttgcctattaactttgccacgccacatgtattggcgtgacagtactgccacgttggattagatatgacacgtcatcagtgttgtcatgccgctgtaattggcgttgcaagcgtgttctgccataccattttctctggcgtgacaagctttgccaccggcagagactaatcacatgcatgcttaagtacaggctgttgcttgcttgctgcagtaccggggatgtaattattgttgttacacgattgagctgctcttcgtccgaagaaaaaaatgagctgctcattgctgctacatgtaacttgcgttagcatggtgctgctacatttttccgtaatcgctaaattataaatcagaaaaaataagagtactaattaattatggtgggattgaatactggtataactactagctctgctatcctactgtgttttatacatttaggatgtgttcttatccatactttcctaacttttattctctcttttttcgcatgcacgcttcccaaactactaaacaataagccattttttaaaaaaaaaacatatataggagtttttaaaaatatcatattaattcatttttatttttatagctgatactacctccgtcccagaatatagcaacctaggagcagaatatagcaacctaggatgggatgagacccatcctaggacaacgaatctggacattctgggacggagggagtatttaattaattgtgcgctaataaaccatcatataaattttgatgctatttaaaataccaataatttgataggataaaatttggcttcgaacaaaaaaggcccttcgcacttgcatgtataacaagctagatcaattcgacttgctaattttaacgagctaaaagtttggctcagatcgtgaaataactaactaatctcatcaacaagttttaacttatttatatcagcttaaaaatattaatatttaccaatttatcacatgttaacacgatattacacactaactcacttaaatacaagtggtggaaatgtagcaacttttagctttaaaaaagagtaattgcctaggtggtcaccgggagaagacagtacgcataaaaagatatactacctccattttttatcaagctaatgagctaaaagcccatatcagcttgggagtaagtttttgcaatattgctgtacacataatagccaaaggaaagcgacaagcagaatatataaaagcagctaatatgactgtatgggccaattgaacaaaagcagtgccaaggaaatgtagcagagggcacaagcagctcacgaagtcacgcaacagcaataagcaaggaacaacatgtggtacaggtacagtgaagcagcagccaagccgttcacgaagcttaagcatgcgccactccatcggcaagcttgtcacgccagagaaaatggcatggcagaacacaattgcaacaccaattacagtggcgtggtaacactgatgacgtgttatgtataacacaatgtggcagtactgccacgccaatatacatgtggcgtggcaaagttaataggcaacgccagctagcttggtgtggccaaaaggttcacatttgaaaataaaattttagatggtttagtattaaaatattatattaaaaaggtataaaatataaaaaaattcctcagggtcacagacacactgacttttacataacatcttttggcgttctccctccttttcatattataagatgttttgacttttttttcctagtcaatctttaagttttaccaagtttctttactattataaaaattgaagatgtttacaccaaaattttggtacatcatctttgagttggttcaatgtcacctatgtccaattcgacgtgactctagaataactattatacacccccttcccagcccaacccctccccctccccctccccctcccagtccaacccacaccatcccaccgccctgacccgcgcgcatccccgactagcgtctttttttctctcctttattttttctatttctccttttcttttctcacgatcattctgtcctcttcctctccttccaatctcctctcttttctcttccttttctccttttttccttttttttctcttccaaatttctctcataaatattttccttttgaaattatcattaaggtgtgcatgcggcaagtttgttactttgcaaatgctttccatctacaggtaaaaaactttcactaattgaacaatcaaaatttcaatctttggtcgatgacgtttagcaaaatacacgtgtcaacttatggaatagccacccgatcgatttgtgagactatggaaagatgtacataaaggattcttcgtgtgatgacacatgaagcgagtgtaaccgggttcaatactacatatgatttttgactttgttttgccattgttttgtttgacttgtttcggtttgtcgtttaaattgacagagtttatcaattgtgaaaaatgtcttcacctgttaaaacacacaagcatttttgctagtatagaaaaacatagcaacattttcaacaccaaacaaacatgtcatcaaaatatattcaatattaaatttagtgaaactaatttagcgttataaatgttactaaaattttgtataaagttaatcaaactgaaagaagtttggctaataaaaaagtcaaagcgtcttataatataaaacatagggagtaacttgtttgttgttcttaaatttcaaatgctctaaaaagatttaaatataaactataagatgataaaaaaggatttggtgcacaattactaccatagttattagaaccggaccggaccggctgtccgactagaaaaaaccgaaaccagggcgccggccggtccggttcacctaaaagatcgctgtgcaatcaaatcggcaagaactcggttgaaccgggcggttttccaaagaaccggacaaaaaccggagctggttgaactgctggaacggcgtcacgtggaggaaacagaagcgcgcaggttgcagccttgcaggtgcgtcacgtggagttagaaaatagggaaaaatgatgtagtacttgtgaatcgaacccaaaacctccatgtcaccgcataaagcatcaaccaccaggctatgagccaagatgtgataatagtataatacaaatctatttgaaccgcaataaaccgccggttggaccggtccaaccaataaaccagtgaaccgagtgtattaccggttcgagcaccggtccggtcttaataactatgattactactccatttctcggtgcactaactattcatataattaatatgcaatttacatactaaccgttagtctactaataactatccttagtctgcaaattgtcactctctaagataatgtgcatgaaaaatcattgtgtaattttataacatgatcaatatgtaaagaatatttaataaatttggttatgcatgtagaagaggtctactaattatgacctcctctaagatattgtgcatggaacctattatttataccacataacatgaatatataaagagattgtttttgtgacaataaatggggagcagcttgccccaacatgaattcaatgcattagttaatgatttacaactaacctccttattggggtccaactcatagccattcttcgcagccaaagctttagcaataccaacagattcctaaaattgtatgatacaaatggtgaataacactaaagcaagtaaaaaggactaatacatactagatttattgtttaccaaaatggcgacgccagtgataagtactgcagttggcattagggacatcagatgctcaaatcctcgaggaatggagaatttgggaagaccttgcggtatttcacctacctaagcactcaagaaatagaggattacataaagtatagtttttcctgacagacaaattatggtcaaccgacagaacaaaacaacctaattctgcgttcttctaaaatggaaatcatttaaatgttgaatatatatgtttatcaaaaaaggtaactaaatacaaagaacaactaaaatatatcttatacgcacatttgaatataagaagcatcaatgcatcatataacaaaaaaaaagagtcaaatgataatgaaaaacattcttttgtgggtgttgataatgtagcaaacactaccatgaactgcagtaatatgcttaggagtttaccttcaagaataatagtatctacttttttataatgaagaataataatacctattgcgtagttattcccaagacatatcgttagtttcgttgattggtatgagttcgattaattaggaacatatccgtttggttagcaactaaagaaatggtttgttaaggatgtagagattgtattattagggggtaagctgctcacggattcacgtgaatagtacccatgctactgtagctcagaaaccctccttataaaaaggtcccatgtaacccactaccaattaagcaataaataatcataaagctaggtctagcttgataagagtctatggacaactgggacaagctcggtgctgacaagagagatcccgcctttatcccgatcttcggacaataccttatccatgaatgaatgtctataacaattcaatttacgaacaaagtaaagctctaaactagagaaccatagctaagagactattgtaccacaattaataagatttacttatacttgttcattcaataacaacgaatcaagtaattccattggaaaaagcaaccacaactttttagtgtaaataatattctaagggataagggagaaaagattggtaagtgtagtataataacccacttcatagacataaattcatagaagtagataatgttgtgatcagagtaaatttcttattataaagtacttccattgctcatattttgtaacatctaagagtaagaaatataaagaataatgtaggtgtttcttaccactgatatggaagatggatggaaaattttcacaaaaattgttccaaacacaactgctgtaaggggaccagaagctcttaggaaacgcagtcttttattcgattttccctgaaaaaagtttcgcttctcaaggtaaaaaaaaaatagaagtctccccttgattgtaatgtttccagaaaaaaaaaataacagaagaaccatactgataaagaaagaaattaaaaactcactagatttttcattatgagaagaataacaaaaaaacttgatcccattacaaatggtggccaggagaactgcaaaatggaactgctatattaagttagtgaaaaatatgtagttcaaataccaaaaagcgtattatgatctgacagaaacatttcaaattatgtatgctttttacctgaagaattggattacattggaacatgcactgtgcatagaaaaatttaaatgggaaaataaacagtctataagctgatcgtacagatacagcaaagcccacctgatctattcctccaattatactctcaataagtggtataattttgctgcttctcgtaacgctgtagcccaagaaatacttgatctgtgacagaccaattacaatagctgaagcagtagtgaagccagatatgacagaatggctaataaatcgaataagccaaccgagcctgtaaataagaacacatatcattggcaacataactatagtaaaaattaagcatatctaaatgattttggttttgccccctaaaacttagaagatagtttgaagtgtgcaaacatggaagagcatgaatatgttactagctaatgccccatccaagtacctgtccgctatgtgaccaagaggaggaaaccattcaacatattttgataggttgtgtcttctcatgacaagtttagtatctcctctttcatcggcttggtcggacagatctttcaccacaaccagaggatggttgtttttgtgaatggtggctaaagatcatttctccggttcaaagcactggaagtgtgatctgaattcgctcattactttgggagtgtggctgatttggaagcaccgaaattattgtgtttaacagagtctctccatatgtgcagttgtttcttaggcaggttttggaggatgggctttgtggtgtttagcaggacctaggggcttggcccagttggaggtagcaggtggctagaatttttttggtgtttttggtcacgtcctcttggttttggaggattttggtgttattttcctttccttttccatcaccacagcagtgggtgtcttaaatatttaaatctaatgcagtgatacacaattctcttgcgtatttgagaaaaataacggtactagctaaatgtacataggttcgttaaatgttcacatacatttttgaaaattcattcacacactacatatatacagatgaaattttaaacgttgttaaagacaaatagaattacaccgtagcgtttagtatgggcatattactagtatatacacaacaattcaatcatcttagacctttttgtattaaattatgatcttgaaggacaaataagaaaagaaaaacaacatatggaaagtccagtgtgtaatcataatgaatccagggagcaatttgcagaaaatgaaattgatgaggtaatggtggtgccagtgccttcattttaggaagtatagaatctatagatgcatacgcacaaacttttaatgttcaatccaatcattttcttgagaatataaaatacaagaaatacatactaatgtttttcggtgcactacaacagcgatgaattgggccacagaattagcatgtgtgcataacataaggacacgacagttgttcagtgcatcatgaaatagtcatgaaatcctcaaaaatatctggttgtgatatatcagcttttcctatgaacgtttgctgcttttgtattggcacacatgactgttagacaacaaatttgtttatgtgagccccaaaaaaacagagccccacaagagcagaacacctttgtacccatgaaatgatcctagtatcactctaaaagtagcaggacctatatactgttgccctctacatgaacttcatgatcactttccatgaacatatgggataacaagttatagctatagctttagtaaaaaatcttgtaaaggatatatcatcagaacatggtgaaaagcataaggatatgcggctggtggtccaaaattttaagctatagtcatagctataatgctgagacaataaagcatttgtcttgaatattcataagtgtaaaattccaaaggaatatgtgtagatgtgtccatacttcttaaattatgtcctatctactgtaaaatgacttaaaaaagaacaccagctacccagagtagaatagaattaccttagcaatcccatcaagcattctaatacaccaaccatgaatgccaataatatggctaattctgtgtacagctcactagatgaatcaacaataccaccgaggacattagaaactagaagagagacaagagccactggacccactgccaactgtctcgatgagccaaaaattgcatagacaaatagcgggacaaagcctgtgtctgttcagccatggaaatagcatactaacgattaagctcaaagacatacaaatataaaaaactacaaagacaggagttgcaaaagatataaatacttacataacccatatattgggtgaagcccagccaactttgcatatgacattgcctacaatacaatgctaattattaatattttcatttctggcattttttggttattattttcaggactttgaccattgcatatttgtatcggaagacttttaaaaagtttcgacagacttaagataaaattcagatgactggactatcaagtgtcaactgtcaaagatgttgacattctcatgcaccaaagttcatgaatagaaatgaaattgttgaacaaatgcgtcccaaaataaggctaatttatgttctccatgttggcaaattcagcctatgtgaaggatatacaccagtttgcaacttattaagcagaaacaccagaaaagatgtccagaaaattcagtatttgtcagaaggcaaaccaacctaagtcctcaaactgcaatttgcaatggtgttaacagaaggggtagccgaatgatatgtaagcaagctacatgttcgatagagctttccatctatagctgaatgcattgctgaaaataactccatatatggaaattgggattatcttattccgggccagcatgaaaagatggttggatccactaaataatagcgccgtgtgcaatagaccatttttaggagacgaattgacactcatccattctatacttcaataatccagtcatactacagttgacataattagatcttagaactagcgaccaccaagcagtaaactgtaataacttcaaaaaacaattatgtaactgttcctggcgatatgatgacaaactaactagacaagcaagagaataacctggagattaacatgttcaatcagtagccaaaaaatcaggtaattacaaggacattctacatcatgtttcgaggcaatgagttttgaaattaacaaatataaccatatctttcccgtttgataaccaggattaggaacagttgaagccgtgcatagcaatacgaaatgttgcgaatcacgagggtaaagaatgtacttggggcacgagcatgacgccgacggtgatgccagcggcgaggtcggcctgcagatcctccttcaacctgtacgtccgcatccacgacaagcagggcagagccgcctccgcccaatcccgcggccccattccccgcgccttcaccatcaccacggaccaccacgacggcgaggacccagcgaccgcctcctgtggatgccgcagtggtataacccgcaccgacctgcccccaccacccgccacgacgccgagctcgccggagctcgccgacgcgtaggacttctccattaaatcggaggccgcctccttgcaaccaaacgattcgagttcagacgaacagtaaaccccaaataaaacaaaacgtttagtctcggtctcattgctcaccgggaccggcggccaccgcagcggcggaggtgcgagcaagacgactgtgggtagtcgaggaggcgggcggccgtggacgggatgcggcgacgcgcggcagcgggatgagtgcgtcggcgagccgcgcggcggaagtacgcaggaggggaatggacggaatggtctctctttctttctgcgctagcctactagtcgaatgctgaggggtaaactgatgatccgacggtcctggatgagcaatgattcccagcctgaggctgacgcatcacgttgatgtaactggacgggaattgcggatgagtgcacgctgaccggcaagatggcgatgtacatggatggaatgctggcaccggtccattggtttgcttgtggacagaagagaagtaaaggtctcatcttatgtgatgatgcagatcgtgtaaataaattattccctcgttttccaatagaattatatgcaccggtccgttgaattttctgtaatattataccctctccattcacttttgatcaacatatactactgtttacacctaaatttgatacctatgaacgaaatacggaaaaatactaaagttttgaaagcgtcgggtttccttcacgggctggtccgaccacaggtgtatgtccggtctgagccggtctgaccgcaggcatgtggccggtcagaccggtagagtccgcgtccgaggcgaatttcattggttctcgggttttcttgctcggtaagggatgtttcgggttttcattggtttctatactgagttgaacgtggaggaggacttgtaggaggcaagaccaacccctttataagggtcaaggctggttcaaccccaatccccaacaatctgtaaaatcaaatcgttcttttacttttacttttcaactatgtccatctttgtggtttgcgccataaaccgtccgtcgtcgctgcgagaatacgattacccctttgtaggtttgttccgtaaacctttcgtttgcccacgagacgggtagttatcctcgtatcgatctaaatcggcctattttgatctctaaatcgactctgctagccggtttagctttttctacggaacccatctcgatttggcctttggcgagatcgggatgattgacgactccatatcaccgcaaggcgtttaggtgttccaaatgtgtttatcttcttgccaaaaaaaaattgccaacaactacataatgaagcatctgtttcatttgctcttcctgaaacaacaacataccttcaccgatgcgcactaaatggaatattggatgctttttttcctcggtcttgattcacttctcttatatataagctgatcaaaagtgaatggagagagtataagtgtgttggtcgtctcattaaaaaatatgtaattactctttactctgttttattatgaagtataatttaagcatgatttatatttttcatatttaaaattttttggacaagtcaaacatactattaaaaaaatagaggggccatcttcgaaaaaacatagaaagtaatggggaatgcgtagcagaccacctgattcacatctaaaaactattccataatgaaagaaaaggttagtaggatcgttggaccatctcttcaaaaaaaaaaaaaggatcgttggaccagccatctatttttttcaatagttacttgtgcgagaaaattagaaatctctctcctataataagtggagtacgggtcgcaacctatccttctcattgtgccgatagtcgattaattattttcctttcaaccattaatgcctatcatataattagcttttcgctgataaagacaatattatcctttcgcataatccttttgctatgagtagttttcagtgacaactaccctcatgttggcacgtaataaggaaactatggtgcacagtagaggaaaatattattgtcttattccgttatcaccggttcccacttctgggtcgtcatttatatatactagttgataccccgcgcttttaccgtgggatatgtagatgaatgcatattatacattatagaatgatatatgtacatgtttaaataatgtgaaaatgatgtggagataatgatttgacattgattgtatgttgaattctaaaaatacaataaaattgtaaataatatgttatatttgtttgatattaaaaatgctctaggtaataattattagtgggtaatgatgtggtacacttgcaagtgatttaaatactctatgtaataattgctagtgggtgatgatgtatcacacttacattgagatttagaagttagtggacatcaattttatagtaagatatgattccctccattttatattataatgcactttgactttccttttaagtcaagcttctataaggcttgaccaagattatagaaaaatagagtaactcttataacaccgaatttgttccgttaaacctaatagtgaatatatttcaatagtatgtttgtttggcgttaaaaatgttgctacgattttatataaacttagtcaaacataaagatgttcgacttagaaaaatgtcatagtgtctcataatataaaatggagggagtattgtgtaaactgtaaccatcgtttgtctatgcaaaagaaaactgatggtgttatttgtacattataggatagaaaaggtttgtataatgtatgtgaagtgttacgcttaccaaggtaaatatacggtacaaatcccaacttgggtgaaaactcgtgtatgaaagtgaatctagccctaagttttgcatgaacgacattaatatccgcttgctcgttaaccatctcttcttcacactaaccatcatccttggtctcacttgcagatttccattcacccatctcattcacaagcatggttcttcgactagggcactcagcagcaatgtggccacgaccttagcatttgtgacacacaatatcgcggctacgggacgaggattttgctataggtgtaacaagccgacgagactcattgcgtgtagctggagaagatgccgaagatggttgtagcttggctatagcagctagtggagaggctcgtgtggaggctctctgagaacgagcgccaacaaaagtgatagtttgttgcgtgcgatgccataggactgcattggagcagccactagaggaccaattatgccgttcttattgaatgtacctttccatatgttgggcttgatcaagaagatcttgcaaaagtgttgaataaacatctccaaaaagtcagaaatttcatcattgagaccatgcaaaaatcttgtcattttcgactcatcttctttaatgtgagcacggatcaagagcaactccatttccttgtaatactcatccactgtacgagtcccttgacacaacaattgtagcctattgttgacgatccttaagtaccaattcgaccatcgattcctacataatagcaaatagaagaatataaaatggaataccaaacttagaggtagtgtttgctactaactatttccacaagtcttagtgaatatttgtatgcaggtgaaatatggatgaaaaccacccaccatgtgacaaaatacacctccgtacaatcggacgtgtttacacggaatggagaccccacatgtcaatcaaaaccacctaaaattgagcacaaccatggtacagcatattgagggcccaccagacagcctctcccagccgaaggagtggccgggaggtgggctagaagttcggccgaaccacaaggtcgcctgagccgacttcggcccctctcaccatctgcttccacgtgtaggctcctgagagatgtgtaacacatttggcatgttgagtctgaacaatatctgctttgctcattattcggcattgtgtattttatatcgattggtgtcaatttgtgaccatgggcacattgaggtgtgtgtggctatttatgcatgtatggatccgactcatccaaaattatgtggcggtcacaaattgcactggacagtataaatttcgagcgcccacaacccgcccttacggggccagggatagtgcatccatggattgaacggggcagagcccataagttatgcggggtgagggatcaatttccacccgcaaatgaccaatggggccctggttgtagaaagcccataaaaagtctagtcattgttggtatttcttaacctcacagatagaatctgcaagctcacggaaaataccaatgtagcacttcacccgggagtattctaaggtatcgatttccacaggaaacgtgtgtgtcagctcttcactagttcatccaaggacacgaagctacagataggcaaaaggatagagaggttttaccggtaagaaactatgtctacagaaagctaaactttaatcctaatgtggtacttcgggcactggccaactcgctgctcccagatatcgctctactgtgcacccggacagggatgacttcagtgatattgagtgctgtcaccacctctacgcctacctcacacctactgtgggatgcggagcaaacaccagaaattaactacctagacaccgtgtctaagcaattaataacttgatgtgaccatggctacaatggatacaaccgttcctcacatcatggatgaacaagaagatatcatgatcaagtcctacaagtgctggaatccgattcggccacctgctacactgctggtttcgaacggccgcctaatctgtatacgacctccgttttcagcccgtgagtacttgatggaaaactcttggagtcctctttccaatgaatccagcctcatctccgaattccatctcagtcggccgcaattgaagaaacaaggtgttgtgtcacctatattgggccaatgggcttgtaacttcgtttgggaccccggcccaagtggagcccatgtggggtgcaccccaacctggtggagcacgaccctagggcacccttggtcgccctcccacccctataaatagctaggtaccccttcagggtttctcgggttttgttagattaaagtttagccattgcttcatgcttgcagcgcgtgtgtcggctagaccatccgtatgcttgttcttcagaaccccaacttatcatttgtattcaactcttatttgcaatatcagattgcttttatattgttcttgcttgtttcttcgatttgcttgcaggaatagggttgatttgcaccggcaagatcaacaacctacaaagaggtgtatcgatcgctaaggcgcaatgcaacgtcttgtacagttgtagtatgatcgtcaaagttcgtcctaaatcgtagttatcatcaactcaccgaaagatcgggccaacaacagccttgagtgtcgagtggaactcagggttcatcataactactctagtgtttataactcactaaagtagtcactatattttactgaattatagtgaacgatgatcccgtactctgattaggaactaaccaagaaataattctcaccgagcaaaactaaattactcaaatgatatttcaattataatccgagtaataaacagagcagaatgaaataggaagacgattgccgataactccgaaattccttcaacttcttctaccttactctctccctattctaatatacaataaagtacactagagcctcttttaattcagctcatgcttcaagtgtgtgtgagaatgagagaggagaggggtatttatagcttgcttgggaatgtggagatcctccatggaatccaaaggacatctcttttctcctcttggcacgtgtccatgacagtttctgcaggtacaaccatcattgggaagtcgttatccaccgaacgcaacttgggcatgggccagcggcctccgtaatggttcggcagaactcagggttcggccgaacctaggacggctccattggctccgattttcggcctagacactcattttgggcccctcattctattggtgtggatggaaggcccatttgaaggtgtttaattggatttttgggtccaaaactcgatatgttcggatacgcgtttgattctcctcctccttcatgtatattttttctcaacataggtagtttgtcacctgcatacgaatatacaccaacactcgtggaaattgttagaaataaaccctaccactatgttggatgttttgtatttatggttttatgcaggtattgacggtgagaatttggtacttaatagccgtcaacagtcattattcacaagaaatggtccaatactagtaggcccaacgaaggctgaaatacaagcaagccagcttgacttgtatgaaggtacctttccaaattccaatttccttagccgccactaccagcctatctcactacctgcagaagtggaggtaagccactcacacttacgcgaaactatcacgcacttctttatgtcgtgggccagcatcgttatgcgctaagcccctcctccgctgcctggtctatgcctacttgacggcctcagcgttgcatgcataagtaccacaacgacccaactgaacgcttctgttgttgcactcactcaccggttccctgatcgcatcatgccacgcgctgagttctcttccaatctccctctttccaaaggccaacgccgcttgttgtccttaaaagatgcgatgacacataggtgcagggccccgagggtggtgcagggacccaacaggtatggggatgggagacattttccacccgatcatcagttcggaagtgggggcaggtgaggaagtcaaggaccgagggcagagacgttccagcccaacccatccccaaccactattgaaggtcgttaagtacaaaatttaatagtcaactcctgcatagaagaagtaaaatattatatcaacttagtggtggtagtttattactaaccattttcactagctttggtaaagataggcatgcaggtcatttaaggagaaaatatacccgccatgcgaaaaaatgaacctccgaccaatcaagtgcgaatacaaggattggagggcccacctgatactaaaaaccggcctaaagtgaggccaaaccatcctcaaccgccataggggcccacctgttagagacaaagggaagttggttgccagagacggtggaggtggtttggccgaactagcctcggcgctactaaccgctagcttccacgtgtcaactccccattggtcctcaatgacgattaagaggggggtgttactgacatttccaactacccacaaccatcattagcacactatataagaagtaggctttcatatttgcaacacacaccacttgagctcaagtagagtacaactcacatgtagtttcatctttagtatgtttttatagtgagaaagtgagaggaagctccggaaggagtgccccaaaatatcggagttctctcccagaattttcagaggagtgccgagttaatcgacattcttccaacggagttttggagaagcgcttgggggttgtcggccttcttctcgattgtacctcggcggaagcttccttttataaagtaactgttcgagatacttttatactatttaattagtttccttaagtgagatatattctcatcagtgtgggttcgtcgcttagtttataattaagtgctctagtactaggactctggataaagaagaaattttttgcgcaaggctagagtagtaatcaataacttacgcgtggtgtctaacttagatgttaccttcgtttgttgtgtggtctaagaaaagtggggtaggcggcaggtggtgacagccctatttgtcatttgcatccctccacattcaggtacatcatagaagacaaggctggactcagctaattggcataccaggggagggccggtggccaaagcacttgatagagtttccaatcctatcattagttgttgtcctttgttgaatcatgttcttagatagtactacaacagcatcaatgtgtttgcagatttatgtgtgtgcgtagcaaataccaattcccacacctaccccgttgccacccctagccatagctagtggtgtacggggaagtggtgctggcatgcagttaattagaagtccgtcaacattgtctagaaaaagaaaatgagaaggattccctaaagaaaaaaaagagaatgagaagtacttttaggtaacaagcaagctacatcgatgatttaagagatatatgacactgttaggtgcttgttacatgtaataacattggagatgtaggatatatatttttaaagcctatagaaattaaaataaaaatcatattatcctaaaaattgtcatggtattttatatccgtccccaaccaccagccataagggattggtatcttctatgaagctacaacccactgaacacttaaaagttcaacatgaaagtataaatatatattactccccccgtttcaaaatgtttgacaccgttgactttttagcacatgtttgaccgttcatcttattcacatttttttgtgaaatatgtaaaactatatgtgtacatgaaagtatatttaaccatgaatcaaatgatacgaaaagaataaataattacttaaattttttaaataggatgaatggtcaaacacgtacttaaaaagtcaacggtatcaaatattttaaaacggaggaagtagttaacatataagtaagccacgtcaacccactaagcactgtcaacacgcatagtacatactaaaacttaaaacttaaatgtaactgcatacatcaactacaaattattacattataaaaatcaatatgtaagcatgctaaggcggtatttggtggcacgctaaaccaagcgatggattaacgtataatcaattaagcgtataaaacttaaaaattagactaatataattctttataagtaacttttcaatagaaaacttatgaaaaatgcattgtttagcagttttaaaagcatacgtgcgaaaaacgagaaattagaagttgaaagtggggaaaagaacccaacctaaatcatcattcatcatataattttcacacatttctatcaaattcatcatttatcatattaatttctacattattttaataaatattcagtcatatatatttgctacgagagcctgtgaaaggtcatctgattcaggtaaactttgcacttgtctagaagcggtcgttttatcagctgagcaatatgccaatagccctttatcctatgggacccaagcgagcacgaccgggcctaccaggaaccactcgagagtcgagaccactagatagggatgcaagcggggcggacaagcaggtttttttttttccgcttatttcacttctagttcattttttcttctaaattttatactaccatacgaaaaatagactaacaagcgggtttttatgcgaatagcgggactatccacttgcatccctaccactagataaggtacaagtgctctcaccggctagaaaaccgccacgttttcacctagctgattcgcctgcttcgtctccctgcgcatttgtgcctacttgtcccactcgcatccacgacctcaagaaaccaaaccaaatcaaagcacaacaccacacgccatgctctttgtgtggttcaggtttgcgcatgtccgatcgaaaaacaagtaaagaagccacgtactactattactggaaaaataagaattgaacaattaataggagttgctagctaagctttgccattgctggaaacacgtcttcgcacaggcacccagccatgctgaagttggagccggagttccccggcctgccgcagcggtgcgactcgtgccggtcggcgccgtgcgcgttctattgcctcgccgattcggcggcgctctgtgccacgtgcgacgctgacgtgcactccgtcaacccgctggcacgccgccaccgccgcgtaccaatgggcgtggtggctgcccccggcgccgggggagccttcgtcgtccgccctgcaggcggtgtcaactcctcctggccaatccgagagggcaggaggtgcgactacgacgatgacgacgccgacgccgctggggaggaagacgaagaggcgacgtcgtggcttctgttcgacccgctcaaggactcctcggatcaggggctgccgccgttcggcgacgcgctggtggccgacttcctcaacctcggcgggggcgccggggagaaggaggacgcgtcgtcgagcaaggactgcagcagcagccacgggaagagcagcgagggcagccacgagttcgccgtgcccggcgagcccgtaccggagcgccagggcttcggggcggtgagtatggacattaccgactacgacgcctccaatttcaggcgcgggtacagctttggcgcatcgctcggccacagcgtaagtcttaatgttttttcttacaatcttacacgaattttcatcaatgaattatctacactagtaacttacccgtgctaactatacgataacattaaaccaaagactatcatatgttaacacaatcaaaaatataattagataaatttaaaactcacgtaaagattgaacaatagagagttgttatattttaaagacaaccatgtgcgcaaaatagcatggtaacctttatatcttcactcaaaaccatctattttttgatgcactgagaaattcttataagtaaataaatactatttgctcatgatatgcaaaataactacaagcaactcttattgaaaatttttccatgataattcactgacatattggtcatggatccacatgtcaatgagagaatggaggtcaactttcggagtcaaataaagattttatcccacaatttttggataattaaattatcaaaattacattatcattcataaataaaatgagttgggtaaaaggaaacgagaataccgaacacccatccatccaggtgtgacttcaagagttcaagaccaagaccaacagaaaaatgcattctcaagctcaaaccaaaaagataaagagaaacatagcactactagaaaaataatttttcatagcgttaccctattatttttctggcggttatacgcgaaaaccgcccacaaaaacgtaacaaggggtggggggctacagaccgccagcgaaaatagatttttgtcggcggccgagttaaaatccaccgtccacctattagaatccgctgccgcgaaaaatccacctattccacgcgcttctccaactctctcccttctctctccgcctatctacccaccgttctccctcctttctctgcctctccatccagccgccagcgacgacgaagctcgtggcgcgcgcatcggtcgacgggcggagcactggcggcttggttgacgggcggagcaccggcgactcgcggggcggcggatccggcggaggcgactcgcggggcggcggatccggcggcgacgactcacggggcggtggatccggcggaggcgactcgcggggcggcagatccaacggcggcgactcgcgggggggcgtcgcccagcggcggcgactcgcggggcggcgcggtgcggcgagtccggcgacggtgacaaggagaaggggcgactcgtggggcggcgtcgcccgacgaatccaacggcggcgactagctttgcgaggcggcaggtctgattcgcaccggtggatggcagctcggcgacgaggtgcagtggctgggctctacggcagtgacccacctcctcgtcgaccttgggcctccctgtcgccggcgatggaggatgggcacgccggtgattttgattttttttttcaaaatctggattccaattttcttcttttttaatcaaaaaatattttcactggcgggtgttttatcttccgacagcgaaaaccgaaatttgtgctagcggttgtcttagccagccgccagtgaagacaattttcgctggcggttgtgttaagccggccgccagcaaaaatcgatcttctctaacggtttgtcgctgctagcgtagatgctacatcttaactagcctttactttgtggcggctccgatatccgccagcaaaaacctaaaatggccgccacgaaagattgttttcgtagtagggtagaatacaatctaatgatccatcgcctgctaggctataagttatctattcgcctcttcacttctctttcagcaagcatacttatatggtgaagaaatgagacggtggagttatagattcagcaggaaaaaaaggattcaagagacaaccatactcataatttccataataggaggctcttgttttagccacgacgtacatcatactctgcttcgtcttcactccactttcacgatcctcaccgggctatttgttcatccaccacagcagagcatacctttgatctttcagttttgaaaaataatgttattcatgcatataagtagtaagtggatgattatggatgcttacactggaaatttgaaggactgggtgcttgccgtggtatatctgactggatgtagatgttgccaatatgaccggaggtccacacttgattgcccatgatgatacctaagagagcacggcggactgatcaaatgatcattacctgacatgaaagaaattatctgcacttaagaggaggcacaattcacactgactgattaaagttgttaatcagaggagttgtgttccaaattagaatgattctggtactaacagacgttacaaaattttgcaactctctctgatatcatgttaggactctgtctcaggtcaaaaacaattatgctactcacagattttgtacaaaatttagccctgacttagagttaatactccaattgtgccaaattaaactctaaatcaaattatcattacctaaaaagaaagaaattatttgcataaagaggagacataattcaaacctaactgatcaaagtttccaaccagaggagagtgcttgaatttaaaacaatgccagtactaactcagtgatcatgctctaaaccagaggtctctgtttcaaatcagaacaattctgttactcacagattttgtacaaaaatttagccctaaccaggaagtcccatagcaaacaggagaggttcgctgctttccttggaagtgccatagcaaacctgttacatttatatattctgaattcctcaaaggaattttgaaagcaagctgccagcatgctcaatattaaaaaattcaggttactttaaatgcttatctttatacaattcaaacttttataaaacatagaaaactcccagtttccattgtacaattcaaaaactattaaccatttagtaataaattcacttaaccactcatataagaagcaaagtcaagggacaataacaatgtatatttcagtgttctaaatttcagacggcccaatgcatattaaaaacaactatgccatttttctatttccatttcagcacagaaatatatacttaatataggagtacatagtagaaatacatagatatacatagttagatatggcaggtaccaatcaacaatcatccgataaacatgtagaaatgcactcctaactgcattgtggatgctgctggggaagtcaaccaagcatcaactatggacctttgtaagttcttccgaacaaaagatgcttcgtctgtacgaccataaccgtcaaacacctgtaaaatacccctaaaaatttgaaaccattaaccatctgctgtgaaaactcgtactgaacaaaaaaaaatgatgaacttaacatctcacatatgaatgttacttcagaaatttactgctggtgatgttgggtcccggtttgagcaaagtaatttattcccaaatgttcagtgttataattttattgcctagtttcaagtgctctaaactcacagattgtttacatgcatcaacagaatttgagttggaaattgtcagtgttgaacaaaaaaaaaactaaccttttgattgactggaaatgaaactcttgtgagtctcaatttccctcaatttattgcttctgattaactggaaactgaactctagtgagtgttaaattcccttaattgattgtaccactcaggaagactatctgcctacgtgcagtttgattcccaaatatgttcagaaccatacaaagacctaacccatcaatcctgccaagtctttccaatttcccacaagccctgtattgcatctgcacgccatctcatctaatctcacatcctctcacaaaataacagcaaaatagtccgggcaacagctgctgctgcggctgcttttgttgtgggcactaaaaacaaattggttattttcaagtctaagccattgagggagttgttttggttggtttgctcggtatttcacatgcactattttcgcaaatttgcatttgaactgtaatggttgaaggaacgggatcgagcgatgcttaccttgtccccagcgtggtcgagaggattccggtggtggcttaacagagagcacatggcgcaggatccttggcggcgcgagggagtcggcggtggcgtcgcgacgcagtcggcaagaggggatgccggcggcgtcgatttggaggcgtgtgagggggtgccaacagcgtcaaactggaggcgggaattgatggcgacgcgatgccgggcgtcggcgtcgtcgcacgcgaaggaggggcgtcggaatctatggcgcccggcggctgctgtgatgcggttggtgttgggatacgcgtaggctacgatagcataaatcaaaattttctatcacgtaaaccaggaaccatgcaagtattagatcatagatcgttaccactcgacgcgctgcgcagcggaaggcgctaagaaatcgaaggaattctcgcgaagtagcgcgtgtcgttatagaggaagtagtcgatcgcaccggctcgaccttctcctcgccgtattcccacgccgatcagcatcacaaatcagaggcgcctctaccggtattcacacgtacagggacggaatgccacgcgtagatgtgctagcacccgcgcgcggctagggttttgctcggggaggggagtgacggctagggtttcttacgtgatgcaatacctccgccggttacacccctcacgaatatataggatccatcactcgggcctccaaggcccataggactcctattcggatccctatctgaattaagctcatattagatccccatccaatccctttattccggcccattaagcgtgcgaccctgtaggttcatgtacactcggctgtaacccgaaaactccttttcggtccacgcgtcaacagcggctcctagcagaacgtattgactcaccgggcatacataaagatcatatcggctgaacctctagtgtatacttgtatgaacccctttgcctcacgatatcgattaagctcaaagttagatatgtgctatcctctaatagctcaatcatttactcgaacctgttgatagattatataacttgtgattgactcctcaatcacctttggcatggccatgcacttccataatctacaacatcgaggggcccagagatatctctccataggaggggcaaatcccatcttgattattcatatcccactacatgtttcatagcatacccgaaaactacttttataactacccaattacggagtagcgtttagcagtccctaagtaagctactacacatgttgagaaccatgataattttaagtctaaggattcaacaccaacactaaatgagatcactgatgacacaacatatatggctcttgcagtgtctcatgttgggtctatccaacaacatgttcaccaacatgtgtccacattattaatttggtatctctataccatgatccatgagacatgatcatcaattaatacatgtgttgatcatctaaacatatttgttccacatatgatatttgatcagggatcctttagaaatagcaacacacaacataaagagtctcatgaaagaatcacatattcattaactaataatgagttatctatttcaaggaacaaagtcggataaatatgtaaacatagtatatgatacaatcatctctatgattgcctttagggcatatcactaatagttggagcggcgacgactgttagggttaggcggcggctggcgttgcgtgagagatgtcggatgtcggtggcgccgcgcgcgaatgcggggtgtccgaattgacagtgggcagatatccggcttcagcggcggagaccacgacatagattctgtgtgagattggtggctcgacatcggcagcgaccgcaggcctggactggtctgccgcaaagaccgtctttgagccgctttctcgcccccaccgccggcaccgcctgtgtcagccgccacaatgccaggccagcccagactgtcgaagaaccatcgccgccgttgttgttgtcttcaccagctctcgcccttcattgaatcaaacacatttagccacaccacacacatgacgttcgtttcggcgggtggcggagccggtcagcggcggccgcggaggagatcgtcgctggctcagtggtctttggcttcgacgattggagtaaggggtgagacagcatcacgggtgccgcggcggggagcggggcgacgcttgcggtggcaggggatggaggaggtcacggtggtgaggggagggggatcgatctgggcgggaggagaggatttggggaaggagagcacgtgagggagtggcgagcggtgtgatttttgcgcaaggggagtggggtgatatgcgtgcgggctaaggaggggataggggaaacgtgggatgatctgaggcattggattgaatgattctgggccgttagatttgatgaatgagtaatgagtaatgtaggtgtaagagtgagttggtgaattattagagggtatataggtataggtatatatatagtagggacgatctgaggtattggattgaatgatcctgggtcgttagatttgatgaatgaggatttgatgaatgagtaatgtaggtgtaagagtgagttgatgaattatatggtagatgatatactttactagttttttttatttttttagagaagggtaaaaaataaaaagaaaacatatactctactagtgactttaaagtttcatattccaacgaatctttcaacacttgattaaaattatggaattagtggtgttctggcagcagaaggtgtttgcttttcttacgatttgtttatacacaaatcctactcagtaaaggggaacccaatgctttgctaatgaaagcgtttatcaaagcggtcctgagcacaatcttagtctactttctaatcaccatagatcctccaaaatgggtcttaattgccaaaggtctatgtgctcattggagtgtactggcttaggcatcgacaatctagagcttatgggtgttgcgcttaggtcctgatggatctcggcccaacgcacatctcaatttaagccctagcaaggtctccatatgccgtactctaggcaggaacgcgagtttgctgttgtttccatgacgtgcgtgctaggcgatggcaaatcaattctcttctgggaagatggttggttgcaaggtgcgagcatccatttctaggcgcctgcgctctatgagtgtgttctggagcgcatccactggagcctctcgatcgcagacgtattaagaaacaacagatgtatcaacgatcttcgcggttctctaggagtatggccaatcttctagtaccttttgatctggttgatggtacgtgccacaacactatctgtggaccaagtcggactccttcctctataagtgagaaagctcaggttcctactccgcttgctaaccctaccacgcactattcatgggcaggatcccattccatcactcgctgatctggaatccatggcctctcctcgctatagctactttttgtgattggtcgctcactggcattgctagactgttgatcgtctggagaaaagaggcctcccacaccccgcttgcagcatctatcatgaccaatgggaagaaacgactgattgcttgtggattgagggccctaattcattacagctttgatggatcatcctttcaggcctcgggttacactagtgcttcctcgccggagtctcctcattccatgattggttgtgtgctctagccaccacaagtccaaaaggaccagtgttgtggctttgacatgattgcaccccttggggcttggtccattcgaaaggagaggaacaatctggtgcttaatcaatttaatcgaacatggcttgaagtggtcgcggcaatggcgcgggaagccaccctctggaagctttcccggccttcgtcgcaggcgttgctaccttagttctttaggtcgctaggttgtttcctctgttatcatgagaataaacttaagcttcccctgtttttccttttcccctttttatttccctacctctgttctgtcttttggtttgttatttcttttgttttgctctttgtaagttttactcctcttgatgcaaaggtgcacaattcttttgcgtattcctcaaaaaatgctttgctaatgaagaggtcaaaaaatgcacatttttagtaaggagggaacaatgaagaggaaaacgaacaactttccttgagaaatcaaaatcaacatgtacagaatcactacaacaaaaccccccttcagtgctggctaggaaccctaattggtgccagattccgagatgaccccaaataaggggcataaatgaggcaggctcatcggtgcatgatttaaaacaaaaacccttattgatgaggtgcatgatttaaaacaaaaagtctgatcggctcgattcaagccaattgagcccatgcattgagtccaaaaatttcccaattggttcttcatctatcccaaattgtatttcaatatcaccattgaaaaagtgaatcacaaattttggctcaaatgcattacgtactactcgaattggaaaggtaaaagtacaaattgccggatctgacctcgagctcatggcgaccaatggcccatggcgaggtggaggtcgagagagcgagggaggcacaatgatcggtagggacgttgagaagggaagtagacctcgagctcgtgacggtggatctagctgccctcgagatcatggtggccggatctagccgtccccgagcttgtggcggcgtatccactggcctggaggaggaggcgctacatgtggcggcggtggagatgacaaggggcgtgcggcatctgtggcagataggaggggcatcagctgcagcagagaggaggtggtggtggcggcgagagatcaatggagtgggatcaactctgagagaaaagtgcgagagagaatgaggtggactctgagagagaagagaggtggaaagattaacttcaaggaataaataaaactagggctggctcggtttgtctgctagactctcttagaggtgttgtttttttaaaatgcctcatatgtgggcatccgctcatattggcttgactaccgatttttaattttagattagaccacatgtggagttggaatgaccagaaaatacttatgtgtgctggttttagggcatcccggccctatctggaccttttttaatacctaaaagatagaaacttatttaagaatattcgaataaaaaactgctataatagtcaatggaacagtcacttctctccttggctttaattttcctgtacctagttttaatatgaggtttgaattggtcctgtcatccctatcctagatatatacctataccgacatacagtatatttcctatactcgctttagtaaaataaaagtgttgttttggacttttctaattcaatgagttacaagttcaactacttataatttgtacaaataaaaaaaaggtaacacacgtatgagaaataatttggtacgacaattttatccacataattctagggctgtctgtgatatcatgctcagcggcggagccagaatgtgctcaagagtagggttgaactagtataatagaatgtgccctagctgccctactcctatatccgccccattcatgctgaaaaattgtgtgaaatcagttgaatttttagccatgcgataaaacatgtgtcaaaatcaccacccacccacccacccccgagcgcgccccgccgagcgcgagcgcccttctcacgattgcttctccattaaaacaatactcattgttgggtcaggactgagaaaacatattttatcttttgttatttattgggcttgttttcatattgaacaaccttaacattgttgctttgggctattcaaaagaagctcaaaatctgtctgacatcaacacacaaattctttccattaagtcataacaaacccaacatgagaaggtccatttgtagccaggaaacaacaccagagcgagattgaatccattttgttatcacacaacttttgcgtgacaaagctcagctagcaagattcattagcaaaatccttacaaacaaagaaatcttgacatatcctgtatgcataaatagattaattccaaatgatattaccatctctaatcaattttagcaacaaacttaaatgtatgcatcgcaattaatttgtgacataaatatctgacattatagtgaaggatctgtgttccctctttttcctagacagcaattacgtactgattcatcatactaacatttgtctcatgttaacaaaactaattgtgtccgattttctccatgataagcatggactgttaaatctcactgacatggaaaacccattaaggctcagttttcccaactcatctctctcgttttccacgcgcacgattttcaaactaccaaatggtgtatttttttcaaaaaaattatatacaaaagttgtttaaaaaaatcatattgatctatttttgaaaaaaaaaatctaatacttaattaatcacgcgctaatggattgctccgttttccgtgccggaggggagtgttcccaaccaggaggagcgaacactccctaagactgcagagactaatagagcaaatgggaataaatgcatgaaacatggaccagaagttttgtatgataaggcgggaggaaggacagagattacaggtattcgttgagataaagtgcaaagtcaccaccacctcccattgccaaataatcagtggagcaaaatgtgaaatctatgcaaatcctatgaaagaaattgtataaatgacctgttggatgatataaagcagttgttggtctcctgaaagattaataaatataaagtacgatcagtgtaaagatcgaaatagatatccaaaaaaattgctagaagataatcaagcctagtagtcactaaataaattactctcgaaattttttatgcttcagtgcaaacaatcaagctcagtgcactagcactactaagtagatgcttgatgccttgattgtctaaatttaagctcagtgtactgattttgtaattactaagatatagatagcacacaaggttgacaaaattaggttacgatagttcatattaaaattacattgataaagaaaagtagcataaaccctttttacatagcagtagatctatggaaaacaatcatggagtactaaaatatgcaaatgtcatgataattttttagcatactcagacaaactactgtatatatgaagtcaacatctacagtgcatgcatggcaaatgcaacccatatgatacatgtactacctatactaactcagccctaaacaaaaaaaaaatatcaccaaaaatatatgggttaattgatcaacaattccaaactggtgattttctagccaggggataaatgaggtcgagtcaccaaattcttacattaccaacttgtcatttattaatagcatcttttaggataccttccatttgtcaaggtatagaaaagaaattatccactaatctaataaggcatggagaatgactcgatgcatgccgctttcatatttccaccctgaaaaatgaagcaactaaactataatttgggtatcaaaactagtaagtacaatgactcacatagggcctaactacctctatgacatacgtctgaattcattcagcaaactatgttgcagacaaacctacaaattcatcaagtcaacgatcaggttaacaatcatgtgaatattacacacactttgaacaaaaaatcttctaggtgatagcttatgccctatagagtgggctaatgtagggaatattgcaatttgaattggctaacagataatggttgtcccagtcttacctcttggtggttggtcggcaaagttgataaaacatgtagttagataaccgctagttaaggaacattgtcatatgttatatgcaactactaaatgctaacaaaacaatactattcggatgtacaaaattaattgctcagctagtcaaggattgacaaaactgatttccagatatttggtctagaaaacaaaactaacttttgcagaaatatcaaatggctgacaaaacacaaaactagaaatgttagtagttgagaaaactagacatgagaacttgttttgtacttattattgatgaggtattcagatgcacatagtcatgcataaaattctaatgagtaaagtccatcaccggtccctaaacttgtaccgctgtgtcatcccggtccctaaactcacaaatcaaccgttcaggtactcaaacttgttcgactgtatcatcccagtccctaaacatgcggatcactcgtttaggtcctccaacttgttcagttgtgtcacctcggtccctaaacaggacggtctaaaaactttatatcaaaaaataattcataactttttcatgttaactctaatgaagacaaactttatatcaaaattgtagccctcaacgcgacctacaactttgtagttgaaaagtttttaaattaaaactgtttagggtcccaaaatattgttgcatatttatagattttgtaattttaattttaaaattacattttgggacaaaaatgacttaaaataaaaaaaaattcaactacaaagttgtagatcgcgtcgcgggctacaagtttgatatatagagtttatcttcattagagttcacatgaaaaagttatgaattatttttaaatataaagtatttagaccatcctatttgacccatatgatattcaaatccaagtttagggaccggggtgacacagctgaacaagttggaggatctaaacgagtgatctgcaagtttagggatcgggatgacacagtcgaacaagtttgaggacctgaacggttgatttgcgagtttagggactgggatgacacaacgatataagtttagggaccggtgatagactttactcaattctaattaaagactacctttggagctcttgacactagtctagaactagcacaactactcagtacacctaaaaatgtactagaaaaattacaaatgggacacaaaaaacaatttattttggcaaaatttagaaggttaacaaaaacacagaaaagacaaaaccaaaaccaaaaacataaacagaaacagaaacacagagcaaacaagaatacaatattttgctaatgattggtctttgtgtaggtactgaaaatgacattgagatagtatgcccgatttcttttcagaatccacaacaaacaaaactgatactaatcttttaaaatttacccaatattaatagcccccaagttcagatttttgaacacaaatatcagtgaatttgcaggacaaaacctgctaattttcagtaaataatagacaaatcaatacctgaacataggaaattagcccatggacgatatgttgcttaatttcttcagaatccacatccaccttcatggataagaactgacatcctccatgcatagctaaaactctccttgaaaagaattagagtaaacaaatcaagctaatcaaattcttttaccacaaacttgaaccatatagaagttctaatacttttgaacatgtaaagaaatcaaaacttctgcacacagtgacagaaatgctgaccaaaatcaaagaagtatccaaacatatgaacacattgcatgtcccacacacaatattctgactaacaaccacacacacaaatgaactctgtgtgaaggacccgagaagaacatgcaacaccatcaccaaagaagaatagcaagttactaactactatctcctgcagagaagactgtgacaaacaacaacaaatcagtttgtagcatggcctatagtactattctgtgaattgtacaaaagtactacaagttgtggtaaaaatcttaaaaataaaaatgtataggtacatatgtatgtatgtgctcgcgagaacttttacggtgtttgcattccaaaaaaggtaaaaatccaacgctcctcaataataggtaccatgtgaaaagtatttaagtattagtataggtacttagatatcaagggtaaaaacataaatatacttgttgagagaaatggtagaattgtccctaaatttatcggtaccgcataggtaccggttaagtgatttgcttggtactagctgttctcatttgcatgattttctatagatttatgttgtgttctttgagattctcatctgcatgattttctttatatttacatacgttttgttccgaagaaaacgttattggtgtaaaagttttcatttgtgttcccttgtctagatttacgttatgttctcaagaacatgtcaaaatccctccgtttaattcttttgagatttatatcttttttactagaagagatttgtattgtgtttcaaaaacatgaccggttaaaatatcaccgaagatttgcgtcgatttaaattatataatattttatcaatttatccctataaaacatgaaacttcttccttgactacataaacaactaattaactgcgtaaataagtcatggatatctctaaaggtagctagagaagaaaggaaatgtgatctttgattttttttctctctctccgatacagattgaatcaatcgctaaattaacagggtagccatgatttacgttttcatttactcatctcctatcatgttacaataattttattccgtacctgacccctccgttgatccacctttaagtacctctaagtacctcgcaaacaccgtaaaagatctctaggaattattgtgtagagtattttaaatcacatacaagtgtgtcacatcatcacgtactaggaattattttatagagtatcttaaatttcatgtaaacatgatatatcatttataattttgttgtatttttagaatttaatatgcgagcaatgtgaaattatcatctccatatcattatcacattatttaaacatatatatctatcttttatattatataaaatatgcattcatccacatatcctcagcaaaacgcggaatatcaaaactagtatagtatgcatttcaaccttgttcgacgatcgctcaggtttcgatgtcatcgctggagaacatgagcacggtcccagactgcggtgtgccagacatcaccacctcctacttgaggtcatccaagagcaccatcgacctcttcacggcagcagctggctcccctgtggcggcgcacagcataatgtcgccaccgcagttcatgggcgccattgacagggaggccagggtgcaccggtacagggagaagaggaagacgaggcggttcgagaagaccatcaggtacgcgtcgcggaaggcgtatgccgagacccggccgaggatcaagggacgcttcgccaagcgcagcgacaccgaccttgaggtcgaccagtacttctccaccaccgccgactccagctgcggcgtcgtgcccacgttctagcgagcagcttggccgcacgcctggaagacaatcaaagaagctcaggaatgaatatattctcccactgtatagtacatcttggttgcttagctatatatatatatatatatatatatatatatgtataattcgccgaatcgcctctaaatttgtgggaggtatgaggcttcagctgtaggtatatatagatgctagaaagatgctccttgtaaaattgtgcaggagtaaatgtaatcatgtagtcatccctccttctccaatcctttacaatacatttctgtttttttattcagcttaaaaactacgttttgttttttctcccgataacgctattgatctgatggtaaattttgatcaataataattctcgttcagaaaacaagacagttttgagtcccttttcgcacactatagttactgcgtgtgcattgcttggaaattccatgaataatgtttgaagaattgcgttgatgcttcaactttgggccactttggttctcaaccctaccaattctttagtactgagagttgacttgattacatttggttcgttacttatagagagccagtggtggatgtaggtttaaaatatagatgggacgacggagctagccctaattagatgatggcacaatacatacaatccatagtcaccggctgatggcggcagagctaactctaattaggtgatggtacaatgcacacaaaccatagtcgccggctcatgacactggcgcagcagtgcacgacacggatatcgagaaagttaacaacgaaaattggtagtcgaacaaatatatatgatttatatgtagagagagaaaaagagaaatgttgttagataataataaggggaaccactttcaattggggttataaaacaagatgaaaaattatttaggggtttaagtgcttcgccaaaatagttcaagtgagtaaaatatatttttttatatatttaccaatttaactatttactgtgaattgtatagaaatagaaaaaaattatatatagtcaaaatcaggaacagtcaaaatggtactacttacacagaaataatacttataagtcacgaattttcataaatatttttgtctctacttaaaatatttgatttatctgattattcaatagtagacggatgaataatgtgttaaaaataggtctacaaataaggtttaggggcgtagctgcgtggggcgacacggatcatagctggaccggccgaccctccctgcctaatgggtgcgtccaccactgtagagagctaatgttgccaaactaacctttgtgttcaatctaaaccacaaaatagagcctaccaaaaggttggtagggcacaaattgcacatcaatatttaaaatgtccctttctcttcttaaatagaggtacggtgtgtgcaatggcgtcaggagtgcacctagcacaatacgcacgtgtccccacgcctccaccactaagcactaagcataatttgttataataaaataataaataaatagatgcgttgaaagttttaatatataagttcaaagtttcaaaagttaaattgaaggtttcagttttgagttgaaaagtttcaaaaattcgagtagtgttttctaaaatttcgagttgaaagttcaaattgttagcagaaacttccaaatttgggttgaaattttgaagttgtcagggttacgaataaggcataccctctatcctatgacttatggaacatcccgataaggtataccttcacatgtacgggttgtttccgtatacatgtaacaccctgaaaattcgacgacaacaatctaaactctaaaaatatgggccttcaaaaactttttaaataaattgcatcatgccaattttctccgcctatttcattggaatttggtttcgaagtttatcaataacgaataaggaataattaattaggaataaaacctaaaattaaattggcaaaagaaataattaagatataatttaaaataaagatgaggtgaggatagaaatgaataaaatattattgcgaccatatttgtatcaattaaatttaaatgcgattgaataggaatttactctaattaaattcaagtaaaattttataaaaataaaatatcggtaaaataaatctagagtggatccattggttggaataacacaaatattgaataaaccatatttatgcaaaatttaggatttatagaatcaaatttaaataataaataggctaaaatcgggttaaataagaaaagacactgttcattgcactctaggtgctcgacgtggtcccttaacccagcccctcctctttcccctctctctgtcgccaccgtcaccacgcgccgccgcccgtcgcgcctggccgcctcgcgcctcaagccgccgcgcgctgtcgccatcgtcgcctgccgccgtgccgccgtcgccatcgccgcctatcgccgtcgccatcccatcgccgctgccgcgccgcgcgccgtcgccccgcgcctcgagccgtgccgttgccgcgccgcgcgccgtctcgtcgcctcgcgccgcgcgcccgccgcctcgctccccgcgccactgccacgtgcctggccgcctcgcgccccgagccgcgccacgccgtcgccatcgccgcccgcgtgccgcgcgccgtcacatcgccgcccgtcgtgtcgccgcgcgtcaccaacgccccgagccccgcgccgcgccgcccgccgtcgtgtcgccgcgccgccgttgcgtcatccccctttctctccctctttcccctcttccctataaacacccccacccctctccattgttccccactccattttcctcttcctcccctctttccctccaccgcgccgccgtcctcgcaccgccgcgccgccgccctcggtgtgccgccgcgccgcaccgtgtgccgcgccgggtgtcgccgtcggcttgcgctgccgtcgccgttgtcgccgccgaccgccgctgtcggtaagccgccgccttttcccccccttgcgtccaccgctttcgccgccgggagggcaaagagccgagagagagaggaagggagaaaggagctgggagagaagaaagaaaagaagagagaaagaggagagaaaagaaaagaaaaaaataaatagaaattaggggagatcagggaagtttagaaaatttaaaataattagaatttaattatagattaattatagttgtagaattacaaaatttaatataaattatggattattcttggcaatttctataagaaatcaattcgcggtaataatttagatgtagttaatgactaaacaaatagatgaattcttatagattattatagattatttttgggtaatccctataagtaatcgattcacggtagaaattcggatttaattactagggattttagccatgtattatatttaatcatttagtcatagactaaattaaatcgtataatatttctaggatttcgtccgatatttagctcgcgatagaaatttctaacctattatatggatataatgctcgggtagattaaattaaaaacttatgacaacaaaatatttatacccgcaaaatagtttgaatcgaaattgggtttgccttagttcgcgaatagtaaagttaatataaaggaatcgactttcatttggatttatttggatttttatttgaattctgaattcaaatcaattttcgcacgtaactatagagcccgagggagttgcggatccaagcgatggtcaagacccgcaagactttgagcaaggcaagtcatcactattctttgaacatgttgatcccaattacgaaattatttttatttacaaataaaaattgcatgcaatgatgaacattctacttgtgattatgccatgccttgattattgtttacccttaaatccttgtaaccatgatttacgtataagtccctagtcaactatgacaaatgcttagaaatgctactctagatttatgcatactcatatttatcaaatgctatatgcttgggcaattacctttgggaaggtaattgagatgcggcatgtggagacatgagcgccacattgccatgatgttgatgatatgatttgtgaaaggagaaataaaattaaacaactgttttcgactggggcggacggaggatttgggtggtatctggaaaaggctagtaccgtccccggtcaattaaggaccgagccatgaagttaagcatgaaacgacccccgtacaatcgtacttctcgtatgggtatagacctagcggattagatagccgagcggaggcagtatccctgcatagatggttcacccctgagtgaggcaggtgcgctacggtgggacagccgttgaggtagggccgagaggcgtgccctacatcggtgtcgctataggtaggactgccataagtgtgtgagagagagaacttaacttgaaccataattcaatatgtgtgtgagacttctctttcccgggagcgccagaactcctctcactgctagaaacatggacgcctagagtgcatgaggatttaagttcatggagcgggtactgccaatgcgaggttatcgaaaagctttgccgtgacgcgtcccatgtgttgggacgaggcttatgtgttgggcagtcacggagtgcgggtaaagtgtacatccactgcagtgtaagtaaatcaaatctattcgaatagccgtgctcgcggttattgagcatcgggacatgtattacacttggctagactctaaattcttaacttgtgtggaatgggatattgcatgatgatttctatgctaatggagccacttcctaagaggcgggaaggtgaacgtcctcagaaaaccatgacgactcaatggcgggaagctatccttgggatcacaatggatggtggacagaatcgtcattgtttaatatgaacactggtaataaaatttgatcagtctgtgctaggtcttaggtttgtgaaaggaattacaaaacttgctttgcgcaaaagaaccatagtcatcctttgaatacccctgtcatatgcattgttgctgtggtggcttgttgagtacggttggtactcacccttgcaatatacaaacttaatcagaggccggagatgaagcttcggaggatccctatgcctattaccaggagggtgacgaagacgatggtgctcagtaggtcttagttacggtcgttgcctgtggcaatggcgtgccgctgccttaactccgctgccttaccttcttctgtttttggaatgtattccagaccgctcggtccgatgatttaagactatgcctgcgggcttatgatgtaataattcgtactagacactcgtgtatgtgcacttggtatttcagctatgaattcgtgtgtaccagactactcgatccagggaaatggtactgtttacacgattgattcctgttataaaaaaaacgggggtccacaatacgccattaggaatctatcttaaattatgaaaaatatctctatgagttaagaaattgccggagtcctactcggaaagggtaaaatctctggttatatcgtgccagtttacatatccctaagtcttacttgggagtcaaggtattccacggtataaaagggacccctagggggaggcgaagggcatcgaatctcatcgccaacacacccaccaaagtttacgaagcaggagtacgtggagccgacttgccgggaggtcttgtcgaatccctcgactacgatctcgtcggtatcgcctgtttcagttactctctttgtaatctgttttcatcatcatcaatcccatataaactggattagggctattacttgacaaggggcctgaaccagtataatccttgtcttttgtctgctttgatgttgtactacgtagacccctgctccaacgtaccccaatactctattcatccggtccatgagtatcactcgtcgacagtggcgcgccaggtaggcagacttggtgctcaaggatctaccagtatgacttcaagactttccgacaacaatgtcaccgccagcatcgatcaaggagcttctacctcgacaccgctggtgtggactcaagtcggatccattgtctttccggtctataccattacaccaatgtcgactggcccaatcatcatcgggaacgagagaggtacaacaacgactgagagaaacgacaacccgccgacaattcctcccacttaggtggagaacggaacatcgatggccccaatacctgggaggaaccctcaggcagctgaatttcacctccatgtgaaagataaaagccgacaaggatgaccaccctaaaaccgagaacttggtgtcctgtgcataagacaaccaagcatactctcgagggctgcccggtgatactccacgtgcaagctaaactctacacctgttgggaacgagggatttagtgtacttcaccgacgggagccacctactgtccgatccacacatctagatctcatgatcttacaagctgcagaatcttcctcaaaaccctcaaaccaccgcatcatcgcgtccaacaaccacgagttccaaccccatgtgttgccaaggaaccagatgcggcgccaatcccagatcggtttgtggggttcgttggcactgttgacggtcgttatcgatcagtttcgaccgtcaatattatcagaatagaggagaactagtgatgcttgcaatgcataaatatgttagaataataatattcccctagtagtaggtatactaacctttctgtagagaatgacaataaagtggaggagaatcgacatcaactcagacgataaatcaatcggacgatgtcgagaactagacttatgtatgaatgggccaagaactcagaattgacacgatgaattgggtcaaaattcacaagtctacaaagtgaagcaatagaggaggccgccagccgaagatgggccaggaaggcccagcccatggttcggtcgaacccatcctggcaccgttggatgcagggttcggcgtggacgtccaagattgcatcccaatgatggttggagggcacttcggacaattccccttccacaaccgtcataaccacctctatataaggacttcactctcttcacttcaacacacacctcaagcaatagctctctcatttctctcaagtttagtttagtaatatctagctagtggaataggaatagagtagaaatcatgagtccggaagccttcggaagagttcggatatagctctagtaggttttctcttctcttttgtaagctttgtacttttattagaatactcttctaaatacatttatggtattgaaatactttccaagtatatgagtacctactttacattatgttcatgttatactgaatatatggctagcttatctgggatatgctttggtgtgggtataatgtttgcttatgcaattactctatgtcatgacgatgatattagagtagtatctggtagtttagacgtggtgtctagattacgggatatcattatttggggttatatattgcggatgagaggtgggccgctgatggtgacagctcagtacgggtattgctccgcgccagtatataatccgaagttaattcgatggggagggtattcctccgtatttagacccggttatatggtcatgacgggttgtcgtaaggaacttggcagtcaggggtggcttctcgaagtaccaggagggcatcggatagagggtattagctagtatatcagttaactagaatgtatggatactatgtatattagaagtataggaatagatttttttttctctttcctttccacttagctcagataatatattatgagaatgagtagtaatgcttgtgtgtcactctacccttggattatcttaacccatgcttagaatttgattatcacaagtaatatataaattattagttgagttctctctacatgatcttcccacgggataaaataaatacgatacacttggaataccctcgggtaaaattctacaatggtatatccatgcgcttgtggatgaactctgtaaccataatataccaggagtttttctgcgccattgctgggaattatatttctagtaatgttgttaagaaatgccaacaagcatttctggcgccgttgccggggaagattcataatagagattacttgaactaatactttatatttacctctgtataatcattttactttttgcaggctaaccttggttgttttcactgtttgctgtggaaacagggtagtgcatgactggtttcatcctgccggaaaacttcaaagaaaatccagaagctttcttccggatcgtcatgccgcgagtcgttgctccgcagaaaactctaccgacagagaaaccagccgtaccagcgccaccgaccttcaagactatggccagcaagactcttcgcgagttcactgctccctctgctgacaatgtggccataaggcaacaggtcaacataggggacgtggattttgacttgaagtccagcctcatcatgatggcgcaggctagcccgttctgtggcaggcctaataaggatgccaatgctcatctgcaacagttcctgaagatctgtagcacatacaccatcaagggcgtcagtcccaacgccgtcaggttgtgactgtttccgttctcccttcttgggagagcgaagcagtggttttatgccaaccgtgctgccgttaacaccagggacaagtgctctacggcattcctctcaaaattcttcccgatgggcaaaacgaatgcccttcgtggacgaatttccagtttccaacagacaagggacgagtccattccagaagcatgggaacgactgcaggagtacgtggccgcctgtcctcatcatgggatggacgactggctgatcctgcagaacttttacaatgggctcaccccaatgtcccgcgatcacctggacgcgtttgttggaggagccttcttctctaaaacggttcaaggagccgttgaactcatagggaagatggtctccaatgtgggttggagtgaggaacgactccagacccgttagcgaggcatgcacaccgtcgaggagacggagttacttgctaccaagctggacctcctcatgaaacgcttggacgaccacgagaaacaaccacaaggcaccgtcaaggccttagactaacacgtcacgtgtgaagtctgcagcggcacgggtcattctaggaacgactgcccggaaacccgtgaggaggcgatgtacatgggcaacaacaacgggtatcgtccacaaggaggtcaggggtgtaaccaaccacgcccatattatctaggaggtaataataacggtaacttctctaaccaaccctccttgaaggatcttgtttttgcgcaagctaaaaccactgatgtgctaagcaaaaagcttgctgctaatgataagatcttagagaacataaatgtcaagctagatggctttgcttccgcatttcaaaaccagctgagctttaataagatgatagtaacccagtttgcttagttggcatctttagtccctgcaaatgaatccgggaggatttcggggcaacccgacgcctccactgaaaatgtcaaggcgatcacgacaaggggaggtaagtccactcgtggtccgccatatcctaaccctgcagaaactaatgagatatcaaaaggagcgccatctagtgactcggttgacatggaggttctgccagaaaagactatgccgcaggagtattgagacacacggttgctgccgtttcctcaatggggtaggaaaccatcagtggacgagcaattcgctcgttttattaaagtaatccagaagatccacatcaacgtgccgttgttggacgctatgcaagtgccaacatacgcccgttatcttaaagacatactcaagaacaagagaccgctcccaacaacagaggtggtcaagctgacgaaacaatgtagcaatgtggtactccacaagctcccggagaaggaatcacctgctcgatcggggcacaacaattcgactaggccttgtgcgaccttggagccaatgttagcgtcatgccaaaagacgtgttcgacaaactcaacttcacggtattggcaccaacaccgatgcgccttcaactggctgattcatcagtccgttacccggtagggatagcagaggatgtgcctgtcaagatacgggatttcttcatcccggttgattttgtggtgctaaacatggacacggggaaggagacgccactcatccttgggcgcccgttccttagcaccacaggagccaacattgacgtgggaacggagagtatccgtttccacatcaacgggaaggaagagaagtttgagttccaaccaaggatggacaatgctccatggtcagggtaaagtacgggccgaacccacagaatatttaagtggtcgaagtggagccacccaagacggacagcctggtgaagtttatgcagaatttcctggagaaggaaacaacgatgcccaggaaccgttattggaggatgccggccaagaagttagagcagccgactcagaagaagccgtcttccgcaccaaaaccaagaaaggcatggaaggaaaagccaaagaggcccgctccatcacctccggagacaggtggaaaatccgtgaactaaatcagaaggaggtacggtcttgcacgtcggactttaaacgacgcgacctttgccaacaggtaaattggtttgtatccgcatatttgctttcaacaatttgaatttttgcatcatcacatgtttgaatttcaaatttgcatttaggatttttgaattttgaggaaattcttcaaatgaattttttaagagcaaacaaaaaaaaatttcaacgaaaattaactgtgccacgaccacactgaccgtttgaatccaacggccgaaagtggggccggttgggcccaccaggggttcggccgaacaccctggtttggccgaaccggccaggcaactgctaccagccgcttttggcagggtaacagctagtgggtcccacatgtcatttctgtccgttatgggtaccctataagagccagccggccgagagagggaattccaccccatttcaacacattttcattccctctccaaagtttgctctcaagttcattcaagctttgatagtttccctcaaattgaattatttagttgcatatatacaagttgctttggtgaaactaactggcgggtgaaattcttgtcattcctaacccccgccgagttagtccgttcttgctctattgtgcagtatgaggaggcaactgtcttgtctgttcaaggggtttggctcttcatcaagtcatcatggcgaatctagcactcattcattagctgatgtctcgatggaagacgccgaagctccgcgatgactcctgaacgacaccgacctcgaccttgtcagtgatcgggagagacaagcctactacatgctgagcgaccgggaatatgctcacactcaagaatactctctggagctgctgaaaaagataggtttggatgttgaatttcgttctatttggaaagctgttggttggcagagatttgttgtggtagatgagcctggttctcgtttgcttactttgcaatttctatgcactttgaaagaaatagaagataatatttcttttcgctttttctgtaaggagttcacactcacatggaaagggttaagtacacttcttggttttcacgattcctgtaaaatcgatctccagaaaggaatttttgggtacgagaaaaataggttttgggaagacatttctggtgctccaatttgcaagaaacctagaacgaatgatatccataatcctacacttaggctcatgcacaaatggattgctatgactttgtttcctagaggtgatctgagacccattaggggagatgaattaattatcatgtttgccatggttagaaagatcaaaattgctcaggtgaaatgtatgataaggcaatggttagaaagtataaagttctatgctcctgttgagtgtacttctatgattactcggatagcaaaagggctaagtgtcgttagcgaccaaattgcttttatctcagccgctcgtccgcgtattgatgaggcttattaagtgcaagggcatattatggaacatggagtagatggatctttgatttactttttcctcggttgtacaaatgaaatcccgttgccaaatgcgggatatcatttgtacaactgccatgaactaaccattcccctgcaaaccatagaagaatctcgtgcaggtggaacatatagggagacgcgcaacatgacaaggaacgaacgagaaagttcatcatcctcaacacccgtacagatgtatgaggcaggatgggcaccaactggggatgcactcggatggtcctaagctccatgccatagcatcggactctcaacttgggcaagcgccagtgaggaccggtggcatgcgcctcatgacatccaatggggggacaatcaacctccccgatcgagtggtgtgcctcaatctccaagtgaatggttctcgagttcctctcgttgggacttgggtgaaatcactaggagaatggacacccttgatccagtacaacctcacgaaacacatagctcaaacgctagaatggtaacaatctgctgatcctcaattcaccaacatcaacaacatgatgcagcaacagcacgatgaccttcaggcgtactttcgttttcaggggttcaatccttatcaaggaccctgagcgaaagccaagcttgggggggggagacatcgctccccctactgaggtaacttgtatcacatttcatatttccctttccaattgcatatttgttttccaattgaatcctataaaagttgaaaaaacaacataaaagtttgcaaaatagaaaataccaaaaagataggataggtttgagtcatgctaggtaagacaagctagttctctttgttgaaatgatgaatagttgctctgttttatatctctgatatatgggttcttggtaagtgctctctcaaaggttaaatataagtagccaacaattatccgggaacctgaggtaaataggctgcacttgctgatctaagtctaagttgttgcgagatatgagatagtaatatgagttactatgatcctgatactagtttcacttgaattccagatgttttgtttttcaaaatgataaaattggaagttcctcatttgatataaattcctaccagaaaaaaatgctataatggttaaaccatatacattttggttacttgtcattccattgaactttgtcaaactcttgtgacttctgtagatacttctcatgctctatgatcaagatcatatacccacatttatgcacatgctaaactcctacactgggagctatacaaaattccattccatttccatattaccaccaaaataaattctccatgctttcatgtgctttcttctcctaaaaagaaaagaaaaaaaatccttttgaaaaaaaaaagaagggagggaaaggcatggttatgaaaaataaagttatgctccatcaagcataagcatgatgtagaaaaaaaaattgtagccatgccctcttctaatcaataaaaaaaaatgatttttaggagaagaaagtaagcacaaaggagaaccatttttcttttattttttttcctcatataccatttccaccagataccacacacaaattttgcatgaacttgatcttgagtatgtttagttatctgctctaatcgaagtttttgactcagtaataaatgtgaatgcaagtatgccatgtttgatccctaccgagctccacatatcaaaccttagagtaggaatcaaaaaaggcaatatttggtgaggaattcatattgatacacttacagagattgagtgaatcaattgaggaacttggctttcttttgcaaaatcgtttgaaaacttccggaataagaattgaagaaagattgggttattggtactctaaattgatgttctgtctttcaactgcccaaggcaaggagaagcagtgtctcgtgggaatcaagggtaagggtaagctaccgtgccaaagattatttaatctgagagagagtacatataccttgcacctgtatccttgagatatgcagcatagtagcaactcctgatcaacaatcaagtctttgtttcctttcgtccttcactcgggacgagcaaaggttaaagcttggggggttttgttgacggtcgttatcgatcagtttcgaccgtcaatattaccaaaatagaggagaactagtgatgcttgcaatgcataaatatgttagaataataatattccactagtagtaggtatactaacctttctgtagagaatgacaataaagtggaggagaatcgacatcaactcagacgataaatcaatcggacgatgtcgagaactagacttatgtatgaatgggccaagaactcagaattgacacgatgaattgggccaaaattcacaagtgtacaaattgaagcaatagaggaggccgccagccgaagatgggccgagaaggcccagcccatggttcggccgaacccatcctggcaccgttggatgcagggttcggcgtggacgtccaggattgcatgccaatgacggttggagggcacttcggacaattccccttccacaaccgtcataaccacctctatataaggacttcactctcttcacttcaacacacacctcaagcaatagctctctcatttctctcaagtttagtttagtaatatctagctggtggaataggaatagagtagaaatcaggagtccagaagccttcggaagtgttcgggtatggctctagtagcttttctcttctcttttgtaacctttgtacttttattagaatactgttctaaatacatttatggtattgaaatactttatattatgttcatattatattgaatatatggtaagcttatctgggagatgctttggtgcgggtataatatttgcttatgcaattactctatgtcatgacgatgatattagagtagtatctggtagtttagacgtggtctagattacgggatatcattatttggggttatatattgcagatgagaggtgggccgctgatggtgacagctcagtacgggtattcctccgcgccggtatataatcctaagttaattcctcggggagggtattcctccgtatttagccccggttgtatggttatgacgggctgtcgcaaggaactcggcagtcaggggtgtcttctcgaagtgccaggagggcatcggatagaggttattagctagtatattagttaagtagaatgtatgtatactatgtatattaaaagtataggaatagattttctttctcttttctttccacttagctcagataatatattatgagaatgagtagtaacgcttgtgtgtcactctacccttggattatcttaaccccttcttagaatttgattatcacaagtagtatataaattattagttgaggtctctctacatgatcttcccacaggataaaataaatattatacccttggaatactctcgggtgaaatgctacaatggtatatccgtgcgcttgcggatgaactttgtaaccataatataccaggagtatttcaacgccattgctgggaattatatttctagttatgtcgtaaagaaataccaacaggcacaaacaagccatccgtgttacacctcatggaaggctacgaatcctcttcgcagtcacccagagatgtgaacgtggtcgacaatactgagacaagtgcgtctgcagttgcgggaacgctagctcacgaattgcggaacctggatacgatattgagggagagtccttttgatccagcagcaaacccaggcgccaaccaatgggcagagcgactacgggagactgtgacgaacctcaatgccgcatttgctgaagcagcaggtggcccagagccgcgcagggacgaagagcgacctaccaaggacgcagatggagaagacctcgtcggaagacatgcctccggcgaccattcacctcgatgaagacgagatcctacaccgccgcgccgtgaaggtttagatcttcgtgaacatctaaaccggcgccggcggaataggagggatcgaaacgagaatgaccgtcgtcgtcgtgaggacggtactccgcatcgacaacaccgtcatcgctctccctcgcggcgagaaagagatgatggccgagggaatacccccaacgaagatcgagaccgttggccccataatgaccgacgcgacaacgacaacaatcgagatcaggagaataatcgccgaagacaggagagggacagtgacaaccgacgagatcgaaactcccaatctcctcacccgagtcgagatcgaggacacgatcatcgctcgagaagccgagctcctgatccccaagcgacccctcatcctcgtcttcgtcgtcctcttcggatcggcttcaacgacaacgtcgcgaccacgggccacaccctatcccaggcaacggacgtagggcattcacacccacacttcgcaatgtgcgatggcccgagaagttccgaccgggatcgattgagaaatatgatggaagtacccagaagaatttctgcaagtctactccacagttctctatgctgccagtgcagacgtcaacgccctggctaattatctgccagccgtgttgaaaggctctgctcgttcatggtttgtccatctcccgctgaacccgatttcttcgtgggaagacttatggcagcagtttgtcccccacttccaagggacatacaagcgccacacgatggaagatgacctacacgctctaactcagaacccgggcgagtcattgcgggagtatattcggctctttaacgagtgtagaaatacgatccccgagatcatcgatacttctatcatacgagcattcaaatcaggcgtccgagatcggtacaccagccaggagctggcaacgcgccgaatcacatctgctcgaagctattcgagatcatcgattggtgcgctcatgcagacgatgctgtgaggcgcaaggagggaaaaagcaaggcaagagatgagaagaagaagtcgaccgacagggatgcaccagagttgagcaaaaagagatgtcgcaagagtgggaagcgcaagtcctcgggagaggtccttgccatggagtaagtggcaccttccaggcgctccaacccccagagcgacgactcgcgcaaggcatggtgcccaatccacaagacaagcaatcacgccatggaggactgttatgtcacgcccggaaattcactaataatttccgaagtaatttgtgcataaaatcctcgtccaggaatcagccgaggtacacaaactgacaatttaatatacaaatccatcataataataacgttacatacttacaaaagaaaagaaaaacaacagcagcggaataacggtttagcgatggcttcagctccactcccacagggaactcaactggggtataagccaaacgtcttacatactcaacaagccacacagcaaatatgcaagtgcacaaggataccaaaggatggcataatataggctcatttacaaaagcagcatttagcaaacatttaagagtaataaaatagtagagtactttaatcattaattttaatcaacactgaacaacacgcccatgctgctcaggcccaaccattctgaacaaccatacccggctgtacagatctatctccaaaccaggagctaagcaaattattaccaattatagcatcaataattattgtgagaggtgtgagactaatcacgaaaaacattgctcaactcgcccataaccgcgggcacggctattcgaatagttttactctagccagaggtgtaccactatacccacaagacacagcctcaacatcatgtctaccatgcgtcgcgatactggaaagtacccgaatagaggctgtgacaataccccatgcacaacataactcaccacagtgcaccattcctggatcataatcaccccctctataaatataacaagaggcatggactccccagcgacccccatggacttctcgccgcttctcagtctggtgccccgcaatgaatcatgctatacaaaaggtaaagccgttgcccacgctggcttgtggttggcacggttaatgtttcacaacagtagctcgcgaaccggtccttaattgtcatgagcacgaccttcaaaaccatgtgctcacaacccacctttaatcaagttttaattatcaattaattataataacacaattaaccatcgtgagctaccattaaatataaccataagtaataatatagtataattcaccccattaatgatgctaatgtttctaagcatggctaagcaattatatatatatatcatttagctgaaccaaaccaatatataaggttctagctaatcaaattataacccataggaaaataaagtcatcttcggccattaattaattgggaaaggctcaccacccgatgacattcgaaaataatgcataagttgaaataaaacattagctttaaacgggttcaacatgctcaaagggttgtttgggatctgtgtgacttgccttgatcttccgcaaacacttctgaacctttctcaatgaaaacgctctcctccggaacatcggaaactaaagcgaaagaacaaaatcaacaaaacagtacaaaaacaagcaaaaacagtacatgtggatatttttaacatgtagatcatgattttagatgaatttagagacttgaacggcctcattccgacttcatatgaattagttatgaatttttacaagattaaactgattttaagatttaattttagaagggaaaagggctttatgacatcacgatgacgtcatcaccggcgagaggctcgggacatcacggtcaccggcgatctaggtcacggcggcgagaacagagggcaccaacgtgacgagcacgacgcggtgaactcaccggtgcaagaaacaacaacggacgacgacgaacgacgaccggcgacgagctccgaatggcggcgaaggctctccggtgaccggtggcgacggcgaaggggcggccgagcttcccctcttccacgcgcacccgacggcgacgtgaggaggcggcggcggcggctaaaacgacggcgcgaggcggctgttcgccggccggcgacggcggcggtttgggtggcgcggcggcggcactacggggcacgagagagctcgggagatggggcaaacgaaagagaacgactaggggatgctatttataggcttggattgaagagatcagactccaaccgagaggaatcgaagccggaaaatccgagggttagttggagagataaacacgaatcgagctcgattccgcgttgatttcttcgggataaagtccgattcttgggggaaaagatagaggaggataagaggaatatttcccctcaactaatttcgcaaacggagcacgggatgcggcggatttggtggaggaagcggcggcagcacaggtacaggacggctggctcgggctctgtccaagcttgaagacgacactgtagcagggaggcgaattagactttcgtattgggctggctgaaaaaaaaggaaagaaagaaagagaagagggagctcggctggaccgacttgggctgcacagccgtgcacacaaaagagggagatgggctggaaagggcccaagactaggaagaggattattattacttttccaattaaattaatcactgaaatgatatttgaattgttaaaaatactttcaatgctcgaataatttcaagaaaaatcctgaaaatacttgaacactataagtatttaataaaattataagaagaccatttaatgattaatttaatatgtgaataatttctgaaatgctctttgtattaggaattgagctccgaaaaatccgagaaaatttcagagagtataattaaccatggagaatttaataaaaaataaatccatccatgctttatatttaggaaattttatttcccacatttaacttcacttgtaaattaatgaacatttaatataaattctaataataatttattaaataatttataaatcctaaaacgaaaatcaggatgtggcatgttatgtcatcaaaaaggagctcacgagacaactagcgatcgagagagggaagcgagtatgagtcgtcgaaacgacaaaagaagccgccggcgacaactctgattccgcctttccagaatacgacctacatgtctcccacatcttcggtggatccacatcatacacctcaaagagagagtacaagaaagcggaacacgaagtctgctccacctcacagacgactactaccaagatgaagtggtctcaacacaagatcaagttatcggaagcggatcaccccaaaattgcgactacacctggcagatatccgatcgtggttgaagccactattcggaacataaaggtggcaagagttctcatcaacggcgggagctcgatcaacctgttcttcgccagcaccttagacgcgattgtaatacctcaaagcgagctgacgcccatagatcagcccttccattgaatcaccccggagtcgtcgtctaaaccgttgggaaaaaacacgctacccgtcaccttcggacacgccaaaaacttctgaaaacttctcaaagctggcttcataagagaagtcctctatccagagtggctcgcaaacccagtaatggtacgcaaagccaacgggaagtggaggatgtgcgtcgacttcaccgatctcaacaaggcgtgcctcaaagaccagttccctcttcctcgaatagaccagttggtgaattcaacggctggttgtgagttgttaagcttccttgacgcttactccagctaccaccaaatcagcatggcaaaagagggtgaggagaagacagtgtttatcacgtctttaggtgtattctgttataccaagatgccttttggattaataagcgcacgcaacacatatcagcgcgggatccatggagcactcggtactcagctcggacaaaacgtcgaggcataggtggacgacatcgtcgttaagatcaagaagagcgactcattgatcgatgacctcagggaaacattcgacaacctccgaacatatcaaatgaagctcaacccggacaagtgtacgttcggaggaccgttagggaagcaccttggtttcttggtttcaggacgaggaatcgaggcaaatcctgagaagatcaaggcgatcgaaaacatgaagtcgcccacaaggcttaaggaggtccagcggtgacaagatgcatggcttcgttaagccgattcgtcgcaaggatgggagaacgaggacaacctttcttcgccctgcccaagtgttggtatttcttaacgacattactggaaatataattcacagcaatggcgcagaaatacttctggtatattatggttacagagttcatctgcaagcgcatggatataccattgtagcatttcacccgagagtattccaagggtatcgtatttattttatcccgtgggaagatcatgtagagagacctcaactaataatttatatattacttgccataatcatattctaagctggggttaagataatccaagggtagagtgacacacaagcatttaactactcatcctcataataaataatctaagctaggtggaaagaaaagagaaaggaaatctattcctatacttctaatatacatagtatacatacattctagttaactgatatactagctaataacctctatccgaagccctcttggtacttcgagaagccacccctgactgccgagttccttacgacagcccgtcatgactatccaaccggggctaaatacggagaaataccctccccaggaaattaacttaggattataaaagaggaatgggaagctactagagccatacccgaactcttccgaagacttccggactcctgattcctattctaattctattccaccaactagatactactaaactaaacttgagaggaatgagagagctcttgcttgaggtgtgtgttgaagtgaagagagtgaactccttaaatagagattcactccctat

SEQ ID NO: 7995 - DNA, 23619 bp, Oryza sativa
  unsure (1)..(23619): unsure at all n locations
ttctatgtgtactctaaactcatctttcaatattctttaatttttaatttcaaatttcagattgtattcctatattgactttaaactcttcttcccatgttattcttaatttttaattttagttatttgtaaattgtatttttatacagactctaaacactacttttaattttattatctttattccgaattttaattagttttaaattcctatatgaactctatactctacttctaatatttcttttttttaattccgaatttctattttttcctaattgtatttctatatgaactctatactctacttctaatattctttatttttaattccgaatttctattatttcctaattatatttctatatggactctatactctacttctaatattccttatttttaattctaaatttcagttattttctaattgtatttctatatgaactctagtctcctcttctaatattccttattttctaattccgaatttcaactatttctaaattgtatttcaatatagactctagtctcatcttctaatatttcttattttttaattctgaatttcatctatttctaaattgtatttctatataaactcatctttcaatattctttaatttttaatttcaaatttctgttacttctaaattgtattcctatattgactttaaactcttcttcccatgtttttcttaatttcgaattttagttatttgtaaattatatttttatacggactctaaactctacttttaattttattatgtttattccgaattttagttagttttaaattcctatatggactctatactctacttctaatattcctaatattttaattccgaatttctattttttttcttaattgtatttctatatgaacactatactctacttctgatattctttatttttaatttcgaattctagttatttcctaattgtatttctatatggactctagtcttctcttctaatattccttatttattaattccgaatttcaactatttctaaattgtatttctatatggactatagtttcctcttataatattccttattttttaattccgaatttcagttgtttctaaattgtgtttctatatgaactctgcattttttttctccgattaatgtgggaatttctaggccatgagagcgaacgtggaggctcctttttctattcctttaataatataactagcatggtggcccgcgcagattgcgcggctagcatcattatattttctttcatataatagcatatatattttctcaatgtattattcaaatatattaaaatgacaacataattttaaattttgaactaactttacgaaactactgatgtgtaatattcatattgtattttatatacatgttagntattaattatttttaatattaaattttagttatttgtaaattatattcctatattgactctagactcgtcttttaatatttcttttttttaaatccgaattttcgctaactgtaaattgtacttctatgtagactctagcctcttcttccaatattatttatttttaattctgaatttttattattttttattgcatttttatgtggactctaaactaatctttcaatattctttaatgtttaatttcgaatttcagttacttctaaattgtattcctatattaatttagacacttcttcccatattttttttaattttgaattttagttatttgtaaataggatttttatatgaactctaaactctacttttaattttattatgtttattctgaattttagttagttttaaattcctatatggactatatactctacttctaatatttcttatttttaatttcgaatttctattatttcttaattgtatttatatatggactctatagtctacttctaatattccttatttttaattccgaatttctattatttcataattgtatttatatatatggactctatagtctacttctaatattccttatttttaattccgaatttctattatttcctaattgtatttctatatggactctatactctacttctaatattccttatttttaatttcaaatttcagttatttcctaattgtatttctatatggactctagtcacctcttctaatattctttatttttttattccgaatttcaactatttctaaattgtatttctatatggactctagtctcctcttttaatatttcttatcttttaattccgaatttcagctatttctaaatgtatttctatatggactatgtttttttctttttctccgattaatatgagaatttctagttatttcctaattgtatttctatatggactctatactctacttctaatattccttatttttaattccgaaattcatttattttctaattgtatttctatatgaactctatactctacttctaatattccttatttttaattccgaatttcagttatttcctaattgtatttctatatgtactctagtctcctcttctaatattccttattttttaattccgaatttcaactatttctaaattgtatttctatatggactctatgctctccttccaatattatttatttttatttctgaatttttattatttctaattgtatttctatgtggactctaaactcatctttcgatattctttaatttttattttcgaatttcagttacttctaaattgtattcctatattgactttaaactcttcttcctatgtttttcttaatttcgaattttagttatttgtaaattgtatttttatacggactctaaactctacttttaattttattatgtttgttctaaattttagttagttttaaattcctatatggactctatactatacttctaatattccttattttttaattccgaattttttttcttaattgtatttctatatggactctgtactatacttctaatattccttattttttaattccgattttttttcttaattgtatttctatatggactctatactctacttctaacattccttatttttaattccgaatttcagttatttcctaattgtctatatggactctagtctactcttctaatattccttatttttaattccgaatttcagtaattttctaattgtatttctatatggactctagtcttctcttctaatattccttattttttaattccgaattttaactatttctaaattgtatttctatatggactctagtctcctcttctaatattccttattttttaattccgaatttcatctatttctaaattgtatttctatatggactctgccttttctttttctctgattaatgtgagaatttctaggccatgagagcgaacgtggaggctcctttttctattcctttaataatataatagatagatagatagattcctctattttgttttgaagtgaaacttatcttgtgttccagatgcagccttatgataggttatggccatgggctttatgtcgtctgaatgggcagtatgcaatttggaaccaagaaagccgctgctggtgctgggtaagaaatgaatatggccctatttggaagcaggatatcagagaaattcacagtacttccacacatggctcaatatctgccaggaaacggcagcttataaacgaacttaccgcacatgaacccggaggacgttatgccttcggggcattggcagtctagcccatcgtaggtgacattcacccgacaccagcggccgctcctcgagcaatcttcgcagtcgtccggccctgccgtgtagtcgagaagaaacccacccttgatgagccgctcgtagtccttggccgctgcaccgtcgtaccccagcaccgggatcatcgacaccgtgcagttccccggctgttgtctcaaatcgtcgtcaggcttgtacctccccgcaagccaggcatacgagttgggcgattcattttccgcacaactcacgggcgcccaagaaggtggaagctgctgcaaccgactctggttgcagttgtagaggaagatgagctcccggtttatggggctaatcttgaacggcgtgaggccgaggtcggaggaggcgttgacaaagctctcgatgacgcactggccgtccgtcaactgctcgtttgtgaccatgaaggagctgttgtggtagaagatgtgctggatttggtacgtccagaacccgttcttgagggaagcatttctgtggtcgcacgtgacctgaaaagctcggtagccacactccggcggatgcttgccggcgagccagaacggatagccgatggtaaggttcccacacctcgccggctcgcagaacggcgatgtggtgttggtcgtgtttatggcatcaacagtggagctagctattgggagagtgagcagtagcatggctaagcagagcacgacagatgcaggggcaggaaacagatgcatctcctgtagtgcaagtgatcaagaccacggtgtactactcctcgatcgacgcggagcagatttgggcgacgctagtcgagaagataattgatgccacgagtatactgaagatgtgcagctgattgagcgtggctgctactggctagtactatatgcggagatggtgccttatgcagtagaacagctagtccgagttgaaagctctgttattgtttgacgtgtggaaacttccgcgtgcatatcggttcattttagcgaaataacactattgcgcgtgtggattgccacttatttggctcaacttgcaccgcctgaaaaaactcggaatttggtctctaaatttgtgtgttcaggccatgaacaaaggctgtgtttagattcaaagtttggatccaaacttcagtccttttctatcacatcaacctgtcatacacacacaacttttcagttatatcatcttcaatttcaaccaaaatctaaactttacgctgaactaaacacagccaaaactagagtagaccgtgtcgtctgtagactatagcagtattgacagtttgacaccacttggaaggaggccgccaacacactggtccacaagcggtgaccgcatttagagctacggcaagtcacgcactagctcagatcaagacgttagcagctctgccttttaggaaagacaaaaaacaattcactagtgcgtaatactactattttctcttcctgtcttccattaccttatcatgcttgactgtgctgcatatactttctccgtcctataaaaaacgaatctagaaccggatatgatatattctatgacatatgtccagattcattctactaaaatatgtcatattcgatactagattggttttttatgaaacggagaaagtaccttggaagttccgacgtggagcaaggcgagctgccaaagtccggtgttggttggtaaaactttttttttccatatttgtttcaaacttttttaatagatgcttcgattttcattattagtactgactggtttaccacttggttccaagttgccaccatattatttggaggttcatgtagactaagcgcgtgcactgttggatacttgctcaaatggatgagctcatgaatgaagatacttgatcaaatggataagctcacgaacgaacttaccagacttctgcggcggcggcggctgccatgtcaagaggaaaccatatcactgatgagctgctcgtagttgctcgcgtttgcctcgccatctctgcccctcaccggcacgatcacggcgtcgcagccctctagtaagtgtacagactcgttgtaactctcctcgaggcgagcgaacgtgttgttgcttcatttcgtctcgacgagaccgaggagacgccgcaccgccgccgtcggaggcttggtgcagttgtagaagataagattatggttgacacggctaatcgagaatggccaaccgaagcttggaggaggtattggacctcgggacatggcagccactggagttgtcgaagtcgtccatctttcggacatcggtgacaagcaaggagctgttgctgtagaagatgtcgatgatctggaacttgaactgccggttcttctgagggtaaccgagataagggcgaagagggacggggttgtgaatagagtatataatgaattaatatcatgtgcttaaagaagctaactcatcttcttattgtgacttgttactgatctattcgctcgtctataggacatggccggttagctggtctccaaccgctgtggttttcttgtttgaaatggcaggaggaaagaatcgaagagatgccaataaacgtgttcgtaatagtttcagtaatagtttcagcctttcagggaggctgggagggtgaacttaccagaagatgtcactggcagctctggcggtggaggcactggcggtggcaggttcccccatgttatgaggaagcctccacgcacgagctccacatacctgctggcgttcgccttgccatcaggcggcttcagcaccggcgagaagacggtgctgtttctgctgcagccttccaaatagtacttgtcgtagtcgccctccccgtcgtaacgccctcccagccgagcaaacgtgttgttaccgcatctcgtctccacgagccccagtttttgctgctgctccgccggcggcgccttggtgcagttgtagaagacgaggttgtgattggaagggctgattgtaaacgtgacgggcagcttggcgaaggtgttaaacactgggatactgcagccggtggagctattcaggcgagctagcttatggacatcaaagacgagcatagtacggtccccatatgatatgttgatgatatcaaacccggtgtccgtagagctttgaagagttgcgacgccggtggagtagttgcaatatacctggaaatccagacgaccacacggcttatccgcctggccctgggtgatccagaacggagaggagatattcaggtggccgcatttctggctgcccaggcagcctcctcctccttcctcctcggctcccctcgccgccgcggcgagcatcagcggtaaccagtataaggcgaaaaagcaagtaggggccattggactattggaggttggagcatgagatgagattcggaagatttgtactggtaacgaacagggagttcataaattattgaatcgatcgatgacgcgttgtgtactggtgacgcaagtctgaccttttcttcgatcacgttggtttaggccgtgtttagattcaggcgcgaaaagttcgggcgtgccatactagatatgcgaatactttgaagtattaaacgtagactaataagaaaacaaattacagattccgcctgtaaactaggagacgaatttattaaatctaattaatccattataagtaaatatctactgtaacaccatattgtcaaattatggaacaattaggtttaaaagattcgtctcgcaatttacacgcaatctgtgtaattagttttttttctatatttaatacttcatacatgtatccaaacattcgatgtaggaactaaaaagggccttagtttgcgccatgggaattggaaatatctcatgttttctttctttctttctttttttaaaggaaatctcaaatgtcttctaaacgaggaacggagaccttgagatggggtgcctgaatttaaacaagatcactgcatgtactaatcttttttttgcaaaactcttacaaacaataatctcaatcggttgatttaaatagatgaaagttatagataacttagctgtactcacagcgtgacatttagtattaataagagtttataataagggagtagctatatttatagcgccatatttttcaccaaaaaatagtcggcatgtatttacattgtaagtccctacattacatatgtaattttagtttatttacgatgtaagtctcaaaattacatatgtaagtgggatgtaactactgtgtaaatttatataaatatatgatgaaaagtggggaacgcctacggatcggtcgccccggaccgatccggggctagggaaatcgggcgctagcacccgatttacgtgcaaaactactttaaactgattttttctcctaaattacttatccaaatcataatccgattgcaccattaaattcattgcaattaaatcttcaaaacaagaccacatatggatatattacgacgaaaaaaaatagcttattattgaattatttttaaatgttgcacgatgttccaccagatatatcggaattgtttcactaagtagatcgaaaatgtttcactcgtttaaatcggggtgttgtttcaccttatataaaaacaatgtttcagcaaatagtgaaagaatgtttcagttcactgcaacattagatctatacatagtgaaacattgtgagtacacaatgtgaaacatttttcggtggaacaaaaaataaaccaaattttcttaatagggggtttccaaaatatgtgcgttttttttgttgcaatggaatgttttgttcactgcaacgttagatctatacatagtgaaatattgtgagtacactaggtgaaacatttttagtggaacaaaaaataaaccaaattcccttaatagagagtttccaaaatatgtgggttttttgttgcaaaagaatattttaatttaatgcaatattagatctataaatagtaaaacattgtaagtatactagatgaaacatctttggtagaaaaaaagagagagaagtaggtgggtccagcagatacgcacgtgggggaaggggcgcgcggggggagcgcccgatccggctcccccccgcaccggtcgcccggagtagagcattatcgtgaaaagtggtattttttttcaagaaaactatcgactaagacataacaattccgtatataaaaccaatcagaagatcaggtggatgcagctgccgcagcgtttgcatgtgaacaaatccaatggacacggaaaccgactaagatttgtgaaaaaaaaattgtcgccatctttatagcaattccgttataataattttgccccgttcgatctctcaattgatagaaaaattttcggtgcacgtaaaacgagaaatctcattagcacataactaattaaatattaattattataaaattaaaaaatgtagttatttgaatattttaaacaacttttacacaaattttttttatcaaaaacgtataatttaagagtttgaaaaacatgctaacgaagaacaagaaagttaaagtttggagttgagaaaaaaataatatacaatattaattataaattaattatataccataatatacaatattccttatattatggtgatctgattcaaattaatgtatttttgcccatgataagcccttttttatatgctaaaccgtatttttcttagatacgtctatatataatttctcaaatatttggtgtatagtcaactgctacaatggtcaaatcaggggcaaaagagtcatttgaagtcccctttagtgctggtaaagctgacatggcccttcccttagataaaattggtaatttgtaaaaattcattctctcctgtggtatttctgtaaatttggaagagtggcgatgtcaagagtaccgcttcgtaagagtggcaaatagttaaaaaccccctcgatggatggcggctgattcatgcatcgccgccgccgccgccgcgggcggcctctcccgtcggcgaactccctcgaggttttggtggctctcgtctcacctcttgcttggtttacacgctcttgagggtatattgttgcatcaagacggcggccgccggccggtaggttttattttatccatccgccgcctccgtctcttcagcgcgacactgctgccgtcgtctagggaatcagggcatcggatttcagcggcgttggctcagatcgacctcgctgatgagaccaataccgatagtgtcgtgctgttgcaggtaggggctgtgagggaagcaggacaaccgccgtctcctcgcgtgacaagaaggggcggatgaaggtggtgtgcttctgcaacaaacttccagactgggctggctgcagatgaccccaggtatgtgattaattcttgatgaggacacctatctatctatcgaactgaattgtgcacctctgctaaaacaactttgccgaacaggttgttaagcttttggggcaactttgccaaacaggctgttgagcttttgggggtgagtttagttgttgcgataagtaataaatttaatggcttaacaaaaacatacttccattcatttactttagctgagtggcggaacatatatagaatgaatcatcccaaaagaaaattcttagttaagaataagatgaaaaatacgatggcgctgcatgacatgaaaggatcggcttcgggggcatctccaattcgttgatgttcttctccagcatttctatgaccttactcattgaaggacgatttcctgggggcagtttgtatgcaccacaggccaactagtgtgatcttcctcgcaatctcttcattctcgcatgtgacttcatggctttgcaaatctttcgctaaatgatcataaatccagttggggaaatatgcactagaattatcagtatttgttttaacatttttccttccttctaccatctctaacagcatcattccataactgtaaacatctgacttagttgacacaactccgaagcctcttgaaaatacttctggtgcaatgaaaccgatggtacctcttgcttcagccattgagatggcactatccttgaggtggcaaagttttgccaatccaaaatctgcaattttaggacataagtcttcatcaagaaggacgttgtgaggcttgatatcgaaatggatgatccgggtgctgcaaccctgatgcaaatactccaatcctcgtgcaacgccaattgctattttctgtaaactttccaatccaatagctaacctcaaactctcagaataaatatacttccccaaagaaccgttagccatgtactcataaacgagggctcgcttagatctctctaaacaaaagccaagtaaattaacaatgttgacatgagatgtcctaccaatactagtaacctcatttaggaattcctctccattgcctttagccccttttagaagtttcacagcaaccatacggccatcttttagattacccttgaatgccgtaccaaacccaccttctcctaatttttccttgaaacatttcgttattttcttcaggtctgagtacctgtaccttttgggagacagagactggtatctctttaattcctcttctgtatttgactcatttccagtgtacttgtggtgaatgataaaaccaagtgtttgcttccgtcggtgcattatccaaacgagacacataaaaaccacgccagctgtagcggacaaggaagctggagagttatacaaaaaatgagtgaatccttgtcatacaagatgtgcttgtgttatgtacattatcctttgtaaatgtgaaaaatcttgaaaaatatcaggacaccaaaaaatttagttagcggtgttccaaaatatgacatttagcaatctgaggcaaaaataaatagcactagaattagtcattttagtatcacaataatagagcatggaatggagctggggtgccagcggaatcatgtgattctctgtatgttcacatagcttattcaccaacaaaagacatacctatcaaaattgccctgacattcagcttccgattactccaatctgcaacaaattacggttaaatcaatgaaaaatttcagctgttaaaacatgcaaaggaataccgattgaagaaaagctcacattcttttttatatcaattcgatttttatgtaagctagctaggcttaattgtgagatatataacggttctccgtactgctctaatgtctgacggttcgtggagtcgtgtagatgatgtgtgttgggctcacttcttattcatgaataaaagcacttttttttttctaaaaaaggccacgaacagtttatatacataactgcatctaaattaacaacggctactatctgacacagagagaaactcagcaacaccaaggcaacaagctgtctgacattggaaattcagaacagtagtggatctctggattgcatatttgcattgatgaaaaagagagagaaggaatttgagggcatctctttggagaaattgaagcaccttcctgactaagtgtcattggctgccaagccagcttccggagacatccttcatcaactggtggatgaatgcaagaaaatagttccctcagaagtagagaaaaggctttgacacagtcgtcatcttggtcgcctggtcaatttggaaagagcgcaataacagggtgttcaaacatcgacagcgctcgtggagggaagtggccaaggacgcagttgatgagtgctgtgcgcccccccccccccccccggggcggtcgtttaagtaatatcgcaagagataggcttcttgttaatttccattttcctttttttaagtgttgaccgttgttatctcaaacttctctaaatcttaatacaaaagatgcacaagccttttgtgcattctcgggaaaaaaaaaacaccttcctgacttcggtaagcctagcggtacagttttgtaatttgaactttgaagcactatatttttgcctggtctattttgttactagattggtaagagttgtagatgttggactgctactaatgaattcaaacagaacatgtactagaagcaagtgtgggagagtactgaaattagtttcattgtcttgaaaacgaaaattgggagagcgttcttacatggagatgtcgaattcgagcagatcaacccgtggcagctgacgcactggaacataagttgttggaacctgcactccccgccgtttcttctgcatgcgtcgcagtctggatctcttgttaccgccctctgccactccaagacgaacccatcactgatcaatcgctcgtactgttgaattgacccattaccatttccaccaatggacccaccaccatcaccatgaatgatagttctaccaccgatcgtatcagcgatcaattgctcgtagtgttgatctaacagcttcattccatctccaccacgcaccggcaagctcacggagatgcagttccctggaatccccgacggcggcgtgctgttccaccgatcggagatgtaagctcccatcgtcgtctggtttgcatatggccgttgcagccgagtgtcatcaggaagcgtgcagttgtagacgacagatgttgctgatgatgaatgggtacggagtgaggctggatgtcacgttgaaatccgggatggggcagtcggcgtcgccggcgaaggtggtctgcacggctgccaccagcgaactattctcgtagaatatattgtcgatgcggaacaggtgctcccggaacgtcctgctgaggaaggcgtggccggttcggttgtcgcaggtgaggtccaacaccgggtagccgcagtagagcggctgcacgccgctgagcgagaaggggtacgtgatggtcaggttcccgcatctcgccggcgcgcagcttgtgttgttgttgctgctggtctcgttgccaactgctgctgcgacatgcagcaaggaagctgctatgatcatggctggtaacaactggaaggccatctcaagtgtttggtagggactagggactggatcactggagattggagtgatcagttgttacttattcttgctggtgagatgagaagaggatcggtttacatttctccaacgcggacccgtttgggcgctattcattccatggaattactacatttcaagtccggctctgctggaactcttgatcaccaaatactagtgccaacgcatactgacccatctttggttgaattaactatcctgcgcgtggaatttgctgactaatgtactttctccatcctagaaaaagtgaatctaatattgaatacgacatatttagtataacgaatctaaatataggtattgtcgaaacatgaattcggcaataataaaaggggtagcgcacgaaacctaaaagtggatggatgcggagacaaaggatttagacaggttcaggccctctcaatgagaggtaataccctactcctgtttggggatttgaatccgccgagtgtatatagatctgacgatctagttgtctcatgccccctagagggcttcctgcccaccttatataggatggggggcagaattacaagatagaaaccttaaccaatacggtataggtttcctaaatctaatttacaatattatcaaactaggactttaggccgttccataatatacagggaaacgtaatacccaagtcatgatccgttacatattccatagatataagttatcccctataaccagtcgaataaccatgccatgtgggtatggggtacccataatctccacagtagcccctgagaccttcacagtcgaaaagataatcttctctcgaactagattattccaaagccgagtgcttcaatcatcttcgccttgatctctcgagtactttaatcaaatcagaagactgtggagggctgaaaaataaagtcaggtgcatcgactagatgcacctaataggtgtagccctcgactgtgtggttaattgaacaaacaaagcatatagtcaaggaataaataatccaaccaaccgagtggcttcgataattatagtcaaccaagcgactcgatattaatatgtagcatatgcggtgtgaatccctgaataacatgatccgagtgatataccgactgctttgtaaaatatgataagtgtaacctaaagttggctacatcattgaaaattcacatagcaaaacagctataaagaagcttgtatgttgtgaataaagaaatttccaaagtattgggcatacgccatgcgcacactactttaacagatgtgcttaagtccctaaaagacacatggtttcaccacacctgaaaatatatggcatatgtggtataaaatccgagtaaataaactcataaaggatttaacaaccgcctggaaaatgaccaaaatatataatcagcctaagccataatattggtcaataaaagtgcacacttacgtggcaaaaagcaatgatattgtatcgaatcaattgctttacgaacccaaacaacgccttgacttatataaaaaagtcagcgaacagctatataaagcattactgtttggcaccttttaaaatgcattgtaccaactcctaaaaagttgagtaactgcggtataaaaggattttaaggtattgggcacttgatcacgcgcactttggcctaagcaaaaagtgcctaagtccctaaaagaacgtgacaggccacacctgaaaatatgagctgcagacatattaggcctaagccaaaaaaaaatatgctttcgacaccctttaaaggatgacgcatgtaacatgctcccgagtgataaatcttccgggtgatatagaccaagtacagctcatatgaatagcttctgatctgagtgattatcccttatgggatactcccaaatagatatagtaattgaatcccgactggcgcaagtattcggttgataaccctgacggggaataataaatagtccagtctttgagcatagaaaataaactcatgatcataaattcatgttgcatgtatccggaataagtccaaattgaaggtatgatacttgtgtttgagctagtaaacccctgagcatatagtttgtccttctatcgtagtcacaattgtccattgaaggtagctgacgcagttagcatagagacaagacgaccaatatagagataatattgcccaccagaggtggcaaaaatattggtggtagtgaagatagtgataccaatcaaaagtgatgaagttgcacagccgtggaggcgaagaaaccagtcgacaacagtcaggtcagccagcaatgaataggaaggcgcccagtgataaagtgacatgatgaagatgacgatgtcggcgatccagtcaatagtagtgtcgcaaccaatgataatgacgaagacgctcatcagcatttgcatagtaggtcaaccgtgaaggtgaaataataagtcggtgaagacataatcatccattagcaacagcggagatgtcagggccgatgaagcagaggtgatggtgatgatgtcagtgacaataatctatcaaactgttgagaagatatcaaagcttgagaagtttccttgatgtgagcgtgtgcataaagaagactgatgcaacgccccttgattaatgaagatgacagtagaacttggtgttatagctgctgcaaatgcttcacttggaggaaagtagatgttgttgtccaactcgtcaaaactgagttgattggttgataactccaaactctggtgtaataatcggagtcgctgaaattaaatgtcggctctgaagtgaagacgaagataataactccccgagttgactcgtattgattgattgcttcatcttgacataaagcttgtcgaattttgagccgtgtatttgtgtagccccccgactctttggttagttgggaaacacctgaacatagaatcgaaaactatagtttcttgtcgtcaagtaaccattgcttgagtgaagatgcatgttgaagatgtccgagtagaattctcttgtagtcgtcgtggttggtgaagtagcaaggcttgcgaagtagaggcaatagagtttgccggtgccgaagataataaagatgaaatcgctctaccatggtgacaaagcaatcaacgacggaagaagtagaatgatgacgaaaacgcgcagccgtggaggtgaacaagccagtcggcagcagacgtagacagcttgcgttgaatgtgatgacgcttatttgcggggcggcgacgcgcagccgtgaagacgcccaacaacggcggcataataggccagccgtgcaggcggaaacaccagtcggcggcggacgaggcggccggtcggtgaagacgtggacgcccaacaacggcggcataataggccagccgtgcaggcggaaacaccagtcggcggcggacgaggcggccggtcggtgaagacgtggacacccaacaacggtggcataaaggccagccgtgcaggcgaaaacactagtcggcggcggacggaggcaagccggtggtgatgttctgactgatccattcctgaagcgtgggagataagcttaaagccattaatccctattatgcatatctggatctggatcctgcagaacaaatatataggatgagtagtatctgatgtaaatataatacttgaggaaaattcaagtattttaaaatgtttataagtatgtatttctcctctcgtcaattttgatttccccgagcagatgactcattacgtttaaacactctgcccgactagtcataaccatcaagcaccgggagtcggcctaggcacttcccaaacatgcatatgagtgatatgagttcgtcattaatggaacaaagtttcacggatcggagtttactactcgggtacttttgcaattataaagagcagaaaataaatttatcttatctctatgcttttgatttattccaaataatacttagcaccttgtgttactcggtccatccaacgagcccccgggtgctaggaatcggcccaaaggcaactatccattggcaaaccaaacggaaagcataggaaaatggaactccataactcgataggcacttttgtactcagattatgtcgcaagcaatcaagatgaatattatggaaattattaaaaaatatgatataacatctgtagccccccgactccctagtcaacggtgaaccagttgatgtagtgaggcagagggaaaggaaaatatcatataaggaaaaatgatgatgacttagctttgtaatattccccttgatgatggcagaggtggccaatgtggaatcaaagtcgtccatcaatgacaatgaagaaatcaatcggcggcgacggaggcggtcgacggtgaaagcgatgcccaccaacagcggcataataggccagccgtgtaggcaaagacaccagtcggcggcggcaaaggccagccggtcggtgaagacgtggacgcccaacaatggcggcataataggccagccgtgtaggcggtgacaccagtcggcggcggcgaaggcaggccggtcggtgaagacgtggacgcccatgaacggtggtgtgaccaaccaaccgtataggcgaggacaccagtcggcggcgacggaggcaggccggcggtgaagtcgtagacgtccaatagcggtggcataataggccagccgtgcaggcgaaaacaccagtcgacggtggcaaaggccagccggtcggtgaagacttggatgcccatgaacggtggtgtgaccaaccaatcgtataggcgaggacaccagtcggcggcgacggaggcaggccggcggtgaagtcgtagacgcccaacagcggcggcataataggccagccgtgcaggcgaaaacaccagtcagcggcggcaaaggccagccggtcggtgaagacgtggatgcccatgaacggtagtgtgaccaaccaatcgtataggcaaggacaccagtcagcggcgacggaggcaggccagcggtgaagtcatagacgcccaacagcggtggcataataggccagccatgcaggtggaaacactagtcggcggcggcgaaggccagccggtcggtaaagagatggacgtctatgaacggtggtgtgaccaaccaaccgtataggcgaggacactagtcggcggcgatggaggcaggccggcggtgaagtcgtagacgcccaacagcggcggcataataggccagctatgcagacgaaaacaccagtcggcggcggcaaaggccagctggtcggtgaagacgtggacgcccatgaacggtggtgtgaccaaccaaccgtataggcgaggacaccagtccgcggcgacggaggcaggccggcggtgaagtcgtagacgcccaacagcggcggcataataggccagccgtgcaggcggaaacaccagtcggcggcggcgaaggccagctggtcggtgaagacatggacgcccatgaacggtggtgtgaccaaccaaccgtataggcgaggacaccagtcggcggcgacggaggcaggccggcggtgaagtcgtagacgcccaacagcggcggcataataggccagccgtataggtggagacaccagtcggcggcggcgaaggccagccggtcggtgaagacatgaacgcccatgaacggtggtgtgaccaaccaaccgtatagacgaggacactagtcggcggcgacagaggcaggccggcggtaaagtcgtagacacccaacagcggcggcataataggccagccgtgtaggcagagacaccagtcggcggcggcggaggcaagccggtcggtgaagacgtagacgcccaacaacggcggcttgatatgccagccgtgtagacggagacaccagtcggcggcggcgaaggcaaaccggtcggtgacgatggctccagcagtacatgtaaagagaaaagcaatctctaattagcatcaagaaaattaatcttgtgtacgtatgtctgcatatatgaagcatgcatatattttttgattggccgattgatctcctgtagcatgaacagtacacgcatccacacatgcacgtcaccagacagattgcaggctgccatccgtgcgtacagatcacgggtccgagtccggatcaaatccaacttggaggctttacgtgatgggaatcagactcaggtgaccatggcgcatgcaaaataaggaatcacagatcaaactgagattagaaaattaatctaatctaatctagttagtacacactagaagattaattagaagtatatgcatgcatgattaggtagatcgtgcatgtatgttgatctgctgaatcaactcatgcatgcatgaaatttctccgagcaagctataggcggctgctcccatgtgcccgtggtggcgtggtggccgcaacgcatccgtcggcgctgctcctggcgatcgccgtcaacagctccgttttaacctcagccgaccagccccatagaaagcaaggaaaacaccagaagagcaaatcacaattagaaattaatctaataacagttagatcaaaacgccgaacccgactgaagatttgagccatcgagattaatctcgccgtttcttctgtagttgattccatcacacttttcgatgggtaattcgacgcagcccctacctgacgcgccaactatcgaaatatgaattcggcaataataaaagggggtagcgcacgaaacctaaaagtggatggatgcggagacaaaggatttagacaggttcaggccctctcaatgagaggtaataccctactcctgtttggggatttgaatccgccgagtgtatatagatctgacgatctagttgtctcatgccccctagagggtttcctgcccaccttatataggatggggggcaggattacaagatagaaaccttaaccaatacggtataggtttcctaaatctaatttacaatattatcaaatcaggactttagtccgttccataatatacagggaaacgtaatacccaagtcatgatccgttacatattccatagatataagttatcccatataaccagtcgaataaccatgccatgtgggtatggggtacctataatctccacaggtatgtccaaattattagtactagaatatgttatatctagtcctaaattgattttatatgagacggagggagtatggttcaagctttagagaagtgccctcggacgagggcaacccataattgaccaagtctaattctccaagtctactctaagtctaattctccaaagaagaatgaacccataactgtgactagaaaatcacattccgcgatcgagactactcgtcatatattactgccttaactacattagacacgtggttcaggcggtaattctgaaaaaaaaatcattacaaatgcacggctgcagagagaagacaacatactagtgcttctttttgagctaggaagacataatactccctccgtattttaacgtatagggcagctaccgtacgggattccgttgcaacgtagcagccacgggataagatctccattaccttatctccttcctttcccctccacaaactctctctcacacaggagaagaaaacgagagcgcggagatgaagctggacaggaggaaggggtcgtcatcgtctccggcggccatggatgacgacgtcacggcgtcggtgaggtaggggcggcgtcgagggtgatctcgccgcacctccacgacgtcgtcctccgcccgctgcggcgccgcctccacacgctgtggcgctgcttcttccactagcgctctcgtcgctgccggcgccggggcctctcccctcctccctcgcgctcctcgccaaggtcgccgtcgtccttgtccgctactcccgccgcctccttgccggtgagcgcaggtggctcctcctccgccgccacagaagcagaagaagccggcggtctcctcctctccactctgatacctggtaccttgggtataaggtatctggtacctttggtacctggtacctctggtaccgactgatacctttggtacctggtaccaggctagtacctagtatctagtaccgtgatacttggtacccgtgatacctggtacctgatacccgtgatacctggtacctggtaccctggtgcttggtgcctggtacctgatacccgtgatacctggtacctagtagcctggtacctggtaccctggtgcctggagcaggaagagagagagaaggaggcagccgcgtggagcaggagaaggaggaggcgcgcgaatccggtggtcggcgaggcgaagcgtggaggaggcagcggcgaatccggtggtcggcgaggcggggcagccgatgagaagaccgacaagggcggggagccagagcggcgctgcaagggaggcgagcttgaggacgacccttgccgaggccgcgccgtcgtcgtcctcctcggcggccggggtcctgagccagcagcggcttccccggcgccggcagcggcctccgcgccaccgctcccgctctccctcttgttcaccgcacccgtcgccaagctcctcgtcgtcgccgcctcccccgcggcggtggccgccggctccgacgaggggtggggcgagggcaacggggacgacggcggccaccggctccgacgagtggtggggcgacagcgatggggacgacggtggccactggctctgatgatttgggggagaagagtgaggtaggaggaggggatcgatccggattactatcccgtctccacaggatgccgtggaatagattttctgtttaatgtatgacgtcgttgacttttcgatcaacgtttgaccattcgttttatttaaaacgtttgtgcaaatatgaaaatatttatgtatgtttaaagaacatttgatgacgaatcaagttacaacaaaataaatgatagttacataaattttttcaataagacgaatggtcaaacgttagataaaaagtcaacggcgtcatacattaaaatatggagggagtagcttggagttacggtccctacttataactgacttaactgaggttgtgtttggcagcggcagttggaaactaatccctagtgcacgcgcaaaatagagagactcattaacacatgattaattaggtattagctattttttaaaataatgaattatatgactttttaaagtaactttcctatagcaaactttaaaaaaacacatcgtttatcagtttgaaaaacatgaaagaggaaggtgaattggaaaagaagggaaagaacgccgccttagaccttgtttggagataacaataggtatagaataaagggacaattgcttatttgaccctattttgaactgtaattgtcgatttggccctactttttaaactttgcttatttgaccctctttttcgagtacgaagcttccgtctgaccttcttttgatgactccgttagggttcgatttttttttaaaaaaagaaaatgtttcaagagttcctaatgacgaaaataccctccaaaccctattttgactctctctctctctctctcactcgtgcctcacggtctcagctctctctcactcgtgcgtgcagcggcggcgacgacctacgcgtgtggcggcggctagctaagggggcggcggcggcgagctgagggggcggcggcggcggcgtcaagcactgccccgccagcgcccactcgttgtggtggagggcggcggcggcggcgatctgagggggtccgagtcggcgccgatctgagggggcggcggcaacgatctgtgggggcggcggcggcgagctgaggaggcggcggcggcggtctgatggggcgcggggcggcgccgatttgtgggagcggcaacgccgagctgtgggggcggtggcgccgagctgtcgtggcggcgacggtgagctcgatgacgaggaggagcaacggtggtggtggagctcaggccatggcggtgtgcaagcggtggatccggtggctgctgggtatatgagccgcagatctggcggc

SEQ ID NO: 7996 - DNA, 1011 bp, Oryza sativa
ctgctcttaacaattgcaaaagtacccgagtagtaaactctgatccgtgaaactttgttccattaatgacaaactcatgtcactcatatgcatgtttgggaagcgcctaggccgactcccgatgcttggtggttatgactagtcgggcagagtgtttaaacgtacagagtcatctgctcggggaaatcaaaattgacaagaggagaaatacatatttataaatattttaaaatacttgattttttctcgagtattatatttatatcagatactactcatcctatatgtttgttctgcaggatccagatccagatatgcataaaagggattcatggctttaagcttatctcttacgctccaggaatggatcagtcagaacatcaccaccggctcgcctcgaccgccgccgactggtgtttccgcctgcacggctggcctattatgccgccgttgttgggcgtctacgtcttcaccgaccggcttgccttcgccgccgccgactggtgtttccgcctgcacggctggcctttatgccgccgttgttgggcgtctacgtcttcaccgaccggccgcctcgaccgccgccgactggtgtttccgcctgaacggctggcctttatgccgccgttgttgggcgtctacgtcttcaccgaccggccgcctcgaccgccgccgactggtgtttccgcctgcacggctggcctattatgccgccgttgttgggcgtctacgtcttcaccgaccggccgcctcgaccgccgccgactggtgtttccgcctgaacggctggcctttatgccgccgttgttgggcgtctacgtcttcaccgaccggccgcctcgaccgccgccgactggtgtttccgcctgcacggctggcctattatgccgccgttgttgggcgtctacgtcttcaccgaccggcttgccttcgccgctgccgactggtgtttccgcctgcacggctggccttatgccgccgttgttgggcgtctacgtcttcaccgaccgg

SEQ ID NO: 7997 - DNA, 868 bp, Oryza sativa
cccgtcaaggtgtgagtttctaagcactcgtccccagctggagctagcgtgttacatccagagatggcacgttaactccgatcgatatataccaggcttcatcctaaccattacaggcaaggtgttacacaaggaagggcaaacatgcatgttgttaaactgacgcgtggtggacaagaatgaccggtctggcactggtcgcgtcagcaacgggcagccacgatcccacgttgcgcctgtcgtcgccgggagtggaggtaggtgtgggctgtcccatcggagtgtcattcggacagcaaccataccaatctccgtccataaagagaagaaaagtccagtttggaaaggggaggggtgcatgtggtatccccttgaagtataaaaggaggaccttgcccatagagagggggttgggtggattcttttccagatttagagcttagaacggggggggggggagttggctcacactttgtagctcattcatacacaaatccacaaaaacacaatcgggtcacccataaccctcggtcaccacgttcccggcctggccagtctcgacatgcggatctccccaggcactagccccgacccgcgcttttcgaggactgggacttgggcacgggcccttatttcaagctaagacacaaaaagaccacggcacagatcatcctcatctcatatatagcaaaataaaactaatacaaaatttttttcatcatttctcattgcagattaagttaaattgtacaaaaaagaggcatgaaggccttagaagaaagaacaagaaaaaagttaagattggcgggggcctgggggctcattcaaatgcgcccgggtcgccggcctcgttgccaccgtcgtcctc

SEQ ID NO: 7998 - DNA, 15898 bp, Oryza sativa
agaccggcgacccgggcgcatttgaatgagcccccaggcccccgccaatcttaacttctatcttgttctttcttctaaggccttcatgcctcttttttgtacaatttaacttaatctgcaatgagaaatgatgaaaaaatttttgtattagttttattttgctatatatgagatgaggatgatctgtgccgtggtctttttgtgtcttagcttgaaataagggcccgtgcccaagtcccagtcctcgaaaagcgcgggtcggggctagtgcctggggagatccgcatgtcgagactggccaggccgggaacgtggtgaccgagggttatgggtgacccgattgtgggtttttgccgattcccccccggagttcaccacgccccggggcacggctcggttctgggccccgtttggcgattttagctgaccgaaccgagcccccgagggcaaggttgagcacgagtgacattatttcaagtcaagattcttcaaaaggaaaaaacggcacagacacaacctttagaaaattgaaactgcttttattgaaatgctgaaataaaggaaaaagggatatatgtgcatgtgtggtagcccccggccaatcctgcacacccgaggggggtgcggggttggcccgagccaaaacctgatacccgacccccccccctttcaggggtagagtagaagcgacgaaggtgttcgatgttccacgggtttggcagctccgtgccgtcgcccatggccagccgtaccgagcccggccgggggacaccgatcactcgatacggaccctcccacattggtgagagcttgctcaatccagcacgcgtttggacgcggcgtaggatgaggtcgtcgacgcagagtgatcgggcccggacgtggcgctgatggtagcgccgcaggctctgctggtagcgcgcagctcggagggccgcgcgccgccttcgttcttccaagtagtcgaggtcatctctacgaagctgatcttgatcagcctcgcagtacatggtggcccgaggagacctcagggtgagctcagatgggagaaccgcttctgcgccgtagacgaggaagaaaggcgtttccccggtcgctcggcttggtgtggttcggttcgcccagagcaccgctggcaactcctcgatccatgaatcgccgtgcttcttgagaatgttgaaggtcttggttttgaggcctttaaggatttctgcattggcgcgctccacttggccattgcttctggggtgggcaggtgaggcgaagcagagcttgatgcccatgtcttcgcagtagtcgccgaagagttcactagtgaattgggtgccattatccgtaataatacggttaggcactccaaaacgggccgtgatgcccttaatgaatttaagagcagagtgcttatcgatcttgacaaccggataagcctcgggccacttagtgaacttgtcgatcgcaacatacagatactcaaacccgcccggggctcgtttgaacggtcccaggatatcaagcccccagacagcaaatggccatgacagtggtatgatctgcagggcctgggccggctgatggatttgcttggcgtgaaactgacacgctctgcatcgccggaccagatcgactgcgtcattgagagctgtcggccaataaaatccttgacgaaaggccttgccaaccagggtacgcgaggcggaatgggctccgcactcgccctcatggatgtcagcaagaagctcaacgccttgttcctgaggaaggcacttcaggaggattccgtttgccgcgcgccgatagagggtcccttctaccaacacgtagcgtttggaaatgcgttgtacgcgttcactcccttcgcggtcctcaggtagagtcttatctgcgaggtatgtttggatctcagagatccaagcaatcaatctaaaggagcttggagcgctcccttcgggtcccgaggcctggactccgacgggcctcgggggccggtcaggcgcatccgtctcccctaaggggtcgggtcgcgccgacggctgagtaagcctttcttcaaaggcgcccggtggggtctgggctcgcgaggacgcgagccttgagagttcatcggcaatcatattatcccgtctgggcacatgccgaagctctatcccgtcaaaatggcgctccatacgccgtacttggcgcacgtaggcgtccatctgcggatcagagcaccggtactccttacagacttggttaacaaccagctgagagtcacctaacaccaggaggcggcggatccccagcccggccgccactctgagtccggcaaggagtccctcgtactctgccatattattggtcgctcgaaagtcgaggcggaccaagtatctgaggacgtctccgttcggagaggtcaacgtgacccctgcaccggcgccctggagagacaaagaaccgtcgaactgcatcacccagtgggcggtgtgaggcagctgagaggggttcgtgctggcctcgggtattgagacagtctctggagccggggtccactctgccacaaaatcggcgagggcctggctcttgatagcgtggcgtggttcaaagtgcagatcgaactcagaaagctcgattgcccactttaccactcgtcctgtaccctctcgattatgcaagatttgaccgagggggtaagacgtaaccacagtgatccgatgcgcctggaaataatggcgcagtttcctcgaggccatcagaatagcgtaaagcatcttctgggcctgtgggtatcgggtcttggcgtcccggagggcctcactaacaaagtagacaggccgctgcacctttcggcggggccgatcctcttcgctagggaccgtacccccggggcgttcttcgtccgagtggcccctcggggcgcactcgtcttctgtgccgatgacctcggggtcggaggacgacaggagcggccttcccacagtggcctcggggccgtcctgggggtcgggggctcctggcgtcatcggacaagcgggcaaagggccaactccggtcgtcaggggccttaggccaccgttcggcttgggggcctcttctccctgctctctcccgggtcgaatcggtacagggttagcctcggggtcagagggcgataggtgcggcctccccgcagtggcctcggggccttcctgagggtcgggggcgcccagcaccgtctgacgagcggggagagggccgactccggtcgtcaggggccttaggccaccgttcggctcgggggcctctcctccctgcttgctcccgggccaagtcagcacagggtgggggtgcgcggaatgaggattgtcttcatcgcgctccacagccaacgctgcactaactacttggggggtcgccgctaagtaaagtagcaggggctcatttggctccggggcgactagaaccgggggagagctgagatatgcctttaactgagtaagggcatgttcagcttcctccgtccaagtgaacggccccgagcgcttgaggagcttaaacaagggaagcgccttctctcccagccttgatatgaaacgacttagggcggccatgcaaccagtgacgcactgcacatccctaagtttgctgggggggcggatccgctctatagctcgtatcttctcggggttggcctcaatgcctcgggcagagaccaaaaacccgagaagcttgcccgcaggtacaccaaacacgcacttatcggggttcagttttatgcgggcggagcggaggttctcaaaagtttccgctagatctgagagtaaggtctcttggttgcgcgtttttacaaccaagtcatcgacatacgcctcaacattacgtcctatttggctacccaaagaaattcgagtagtacgctgaaaagtaggacctgcattctttaatccgaagggcattgatgtataacaataggttcctacgggggtaatgaacgcagttttttcctcatcctccctagccatgcgaatctgatggtaaccagagtatgcatctagaaaacacaaaaggtcgcaccccgcagtggagtcgacgatctgatctatgcgaggcagggggtaaggatccttaggacatgccttgttaaggtcggtgtagtcgatgcacatccgaagcttgccgttcgccttgggaacgaccaccgggttcgccagccactccggatggatgacctcacggatgaacccggcctccaaaagtttagccacctcctcgcggatgaaggcttgacgttccggggcttgccgccgcactttctgccggaccggccttgcgcccggccgcacggcgagacggtgctcaatcacctccctggggaccccgggcatgtccgctggtctccatgcgaagacgtcagcgtttgcccgcaggaaggagacgagcgcgtcttcctatttgccatccagaagaccaccgatccgtgtggtcttggatgggccgtcgcccaaggcaacctccttgaccgggacctcgtcgcatgtggccatccgctgcctcggggcggtgggggcagaggggccaagcctctcgtcaccaccctcgggcttggacgcagcagcgaggcggtccgcgcgctgctccatgcaagcaagcgcggctttaaggtcgccacggacagagatggggccaccggggcccggcatcttcatctggaggtaggcgtagtggaccgccgccatgaacttcaccaacgcgggtctccctaggaccgcgttgtagggcagactgaggtccgccacatcgaagctcacccgctccgtgcggaagttggcgggtccaccgaaggtgaccggtaggtcgatgtgacctaatggccacgtgtgccccggcgtcacaccgatgatcggttgagacggctggagcaccatccccggggccttgatagcatcaaaggccgcgggggaaaggatgttgagagccgctcctccatctatgaggacacgtcccaacttcacgttgcagatggtgggggaaaccaccatcgcagcctgccctccccgggcaatgcacggtgggtggtcggtctggtcgaaagtgagggcaacctccgaccaccgcgcccgacgcatcgcctcatgggtaggggccatggccagaagctctcgcttcatagccttgaagctccggcgagagacgtgagcacatgctcctccatcgacggtggcaatggtggccccaggttcttggaaacctaggtcatcatcaccatcatcgatgtcaacagcgggggccttctgcttggcctcacttcgccgtttgccggaaggaaccgccggggacttgccctcacggcgttcctgcctcctgtcctcctcccatttcctcgttcgctcggccaggtttttgaccgcacgacagtccgcgagatcgtggagggaggtgttgtggacagagcaccacctgccggcgaggcgctccctgctgggtgtaccagcctcgttctttttgtcgctcgcaggcctcccctttcgagtggcccgcggagcgccctcgacggcgaggacatgaccctcgtcgccggaacggtccggcctcttcttcctcctcctgtcacgccgccctgtctgagcggcggatccgggggcggccgaagctgccactccggaaccggaggagttccaggtccaggcctcctccttacgagccactcggtccgcgagctgaaaaagctctgcggtagtctggggctctttggaggcaatcttttcgagcatgcggttgtgccgcacaccccccctgaacgcgtagatcaccgcgtgtgcagggatgcatggtatagtattgcggacttggcaaaaccgctgaatgtacgagcgaagcgactcatcatcgcctcgctgtactgcatgcaagtccgcttcttcgcctgggcgcggatatgtgccttggaagttcatggtgaactgttggcacaaatcttcccaggagtggaccgacgcgggtggcaggttcgggccgctgccatgcgtaataccctactcgtgtgtcttgcgggcagacgatctttccagatacagagggagagcgagagcttgagatctcaccctaagcccccggccgaactggcaaaggggggcctgcgcggtctcccggtgaggagccacgagctccgtcatctggcgcgccaggtagggggctcagcgtgtgttttctgagctctcagactcttccgtgtgcgccaagtttttcttgttcagcctaatggccgagcaaggaaaagcgcacgacctctctccgagtgtgagcggcgacgacggggagccgaatccacgccgtcgagctcgtactcccccacctcctccgcgccaaagccctaagcagggggaggcgcttgagagggtcgacaaatccgtggcatcaccagtcgcaggtgatgcaggagaacggcgagatggggagcgtcgcctcctcgtctacggcgacggcagcacgcctcagggtgcgcttcaggctgctggcgcgctcctacgacacccgcctgtcgtccctgacccggagtctccagcccaacgatggctggaagacgtggccaacttggtcatgacggcacagcagcgcctgggtgctggtggacggtccgccaccaccaagacctccggcgccgctaccaccggctccgtgtcatcaaggcggagggcgcggcgagcggcggcggctgcacgtcatccagggagagaaattggagtcccgggcctggtaactcgctagcacgagttcaaccgccccccgggcgaggtccctcgaggatgacttgatggtcttctcgagctcctcggggagtcgttcgaggacccaggccatcctgttgaggtgcggagcgaggccttccagattggtggggggcaccgtcgtctggcctctccagaggcctgcttgccgaccggcgcgcttcatgcgggagaccgcatcccaaagcatgtcgggcccaatctcgcccgccaagcgaagggcctcggcctccccggtggaggagtccagcgctcgctgcatttccgcgacggtgtgttcggcagctgcgaggcgggcggctaagtcgctttcgcccgcggccgccccgccgataggcgcccttgcgtccagctccttttcccgcgcctcgaggtcagcagcccgctgctccagtgcggctctctcggcgcggacgcattcgagattgcggcgcgcctgctcctcctgcgccgcctcgcgaagggacaggctgtccgccagccgtttggtcctggcctcagcctcctcgagagctcgctcccgctcagcgagtgcgtcctcgcggaggcggagcgcgcactcctcctcggcgcaggcggcctcatgcgccgccagcgtcgcctctcggagaccagcggcggccttgcggtccgtcaagcccctctccacggcgccggcgtgttcttccagcgccatggcacgggcctcaagggcctcctcgcgccgccgaaacgccgcttcagtctccgttacccgccgctctcgggcagcggcggagtcaaggaccccttgggcggcgtcgagctttttcttcagctccgcctcccagcttgcgtgctgaaggcggagagtgtcttgcgcctcgatcatcgcggtggtagagatgagggcggccgcccgctcctcctccacctcacgggcgatctccgccagcgccgctttccgggcttcaagctccgagacatgacggcggtgagccttacggcccacctccaccatggcgtccaccgagcgccgcccctcctcaacacgcgcccatgcggcctcgagctccgctcgttctgcacgcagggcctccacttgggtgttgaacccatccagcactgcggtgtttgcggcggccagggcctgcagaaggggctcggcgctcagcggggcgacagaagatgaggagaagagccgccttggagaaaaggcgacgtggcttggccccccggaggatgcactgggctcggggatgtcccccgggcccgtttggtcctgggcgtcgcccggtgaggtaggcccaggcgatgcgcccgcggcctcgtcgcaagccgcctcggaggatgtcgcctgagggccgcccgagggagtaggcccaagtgacgcgccagcagcagctgtcgcctcagcctggcgagaccgggcggcctcctcccgagcagcttcttcggcttggcgagcccgggcggcctcctcccgagcagcttcctccgcttggcgaacccgggcggcctcccgggcggcctcttcagcttcccgaaggcgggctgcggcttcacgccggtcagactctcgcctccgctcctctgcggccgctggatcttcggcctcggactggccggatttggggtggcgggaggaatgcgacgggacatcgctgaagcagaagaaaaaaccaaaagacgaacaaaatgagtaagaaaaaacttctctttgggagaaaggtggttgcaatgagagtgagacgaacctgcgagggggtcggttgaatgaccaccttggaggagaaatcaggttcccccggcatggttccgtctcccccgtcttgcggagccgtttcttcttgcgctccccctcgggctgcgacgtcggcgcggccccctccgggcgccgactgttggcacgcgccgccccgccccctcggggaggagatgggggaggtgttcctcccagcttcctcttcccctgggcgtcggcagggcggctgctccccgagcccccggcgcggggcccagaagcacgaccccctcctggggcagattgttcccctcggcggcgctcgcccgcgccgtcgtggcccttaggggctctctcctctgaggccccgacctccatcataatggttagaatggaggcgcggtcgggatcgctgcagagggggaggatctcctgaggaatgcgagatgcctccgcggagctaagattcagcaccctttggaccacgatcttgaagtcctcgggagcccaatcccatctggctccctggtgggtccgcatgtagtcttcaggcccagtgtactcccaggcgttccgggcgcgccgttggagcggcgcaatccggcgacggaggtaatcgccgtacaccatggccccggtgagcccctgggatcgcaggcccgccaggcggtcgaggacggcgtcgtagtcctcccccagatctaccggtgcccgccagctggagacctgcgccgggggctggcttggaagtcggaggcgcgcttcgttggcgaggggggtgtagaaccagtcgctcttccagtcgtcccacttcttgcgaaggccgcaggggatgtagcggttcaacaccggcccccgcggctggaagtagcagccgccaaccaccgacggcggtgacaccgactgcacggtgaagaaccaccggaacagctgaagagaggggcgcaccccgatgaacatctcgcacagatgcgcgaagatggccaatgtcatcaccgcattgggggtgaggtgcgccatctggaggtcatagaactccaggacatccatgaagaaatgaggaaatggcgggaccagcccagccatcgcgaaggggaggaagaagatggaccgccccgggtagtctggtgccgggcgcccctcgcccagcatcactatctcccgaccggtggcggactccggcatgaagcggcgcggcagtccggcgtgcctctcattcacgatgcgggaaggcggtagtacactgccgtcgagcagagcagagccccgtgccatggcggcggaggaagagatgattgagaacgagcgcgtgtggcgaaagtagggcgtagcagagaaagagttagagctcaggtggcgaaggcaagaggaacaatggcgaaaggaaggaagcaaatccttttctcgatgcttttatacccttgccatcgctgggcctgactcctcgtttctcgcgcccactacctcgctccctcgtatctcgctatctcgctccctcgtttcccgtgcccacgcttccactaatcccattcgcccgcttacggcgcattgagtggatatgcggttgtggcaatcgaaatggattgtatcgtgcgcgcgttaattacgctcgccgaccgaagcggcgttaccatatctccgggcgagacgaatctgctcatccagattcgcgcgctgctcaagtggtgtggcagtcttgaatagaccgcccattatggacaaccaaagttaccaataccaatgtgcatggattgagaccgttcggtattttgcccaactacggagaccggtcccacctgtcacagggtggcgtcacacctgaccgcttcccttgggaagggaaattgctctggcataacgccgggggctactgtcggtgatatgggaccgggagtatcatgactagaggcttgaggcagacacaatcgcccacgtggcctggcaccttcggggacgtcgggcccgagggtgaggtgtccgccctcctcctgatttcccccgagggggggtcgggttgcgtttgccccggccccgagggccgaggcaccccgacccccttaaggaagtctgcgccacatatatgggataagtgagcacagctgtgctcacctaacagcatttattgcagtctggtcaagcgtgtcacactgcatgcagcgcagtacggcgcgttcctttatccggtctgtgaccagtcacagaccggtcagatcacgggttaggtggcgactggcggtctgacgcacgccttaccccatcccgtcaaggtgtgagtttctaagcactcgtccccagctggagctagcgtgttacatcccagagatggcacgttaactccgatcgatatataccaggcttcatcctaaccattacaggcaaggtgttacacaaggaagggcaaacatgcatgttgttaaactgacgcgtggtggacaagaatgaccggtctggcactggtcgcgtcagcaacgggcagccacgatcccacgttgcgcctgtcgtcgccgggagtggaggtaggtgtgggctgtcccatcggagtgtcattcggacagcaaccataccaatctccgtccataaagagaagaaaagtccagtttggaaaggggaggggtgcatgtggtatccccttgaagtataaaaggaggaccttgcccatagagagggggttgggtggattcttttccagatttagagcttagaacggggggggggagttggctcacactttgtagctcattcatacacaaatccacaaaaacacaggagtagggtattacgcatggcagcggcccgaacctgtatacatcgccgtgtctcgtgtgtcttgcgggcagacgatctttccagatacagagggagagcgagagcttgagatctcaccctaagcccccggccgaactggcaaaggggggcctgcgcggtctcccggtgaggagccacgagctccgtcagagtgatataccaactgctttgtaaaatatgatgagtgatatagcaaaatagctataaagaagcttgtatattgtgaataaagaaatttccaaagtattgggcatacgccatgcgcacactgctttaacagatgtgcttaagtccctagaagacacacggtttcaccacacctggaaatatatggcatatgtggtgtaaaatccgagtaaataaactcataaaggatttaccaaccgcctagaaaatgaccacaatatataatcagcctaagccataatattggtcaataaaaatgcacacttacgtggcaaaaagcaatgatattgtatccaatcaattgcttaaaaacccaaacagcaccttgacttatataaaaaagtcagcgggacagctatataaagctttactgtttgacaccttttaagatgcattgtaccaactcctaaaaagttgagtaactgcggtataaaaggattttaaggtattgggcacttgatcacgcgcactttggcctaagcaaaaagtgcctaagtccctaaaagaacgtaacaggccacacctgaaaatatgggctgcagacatattaggcctaggccaaaaaatatgccttcgacaccctttaaaggatgacgcatgtaacatgctcccgagtaataaatcttccgggtaatatagaccaagtgtagctcatatgaatagcttctgatctgaatgattatcccttatgggatactccaaaataaatataataattgaatcccgactggcgcaagtattcggttgtaacccttatggggaataataaatagtccagtctttaaacatagaaaatagacccatgatcatgaatccatattgcatgtatccagagcaagtccaaattgaaggtatgatacttgtgtttgaactagtaagcccctgagcacgtagtcacaattgttcattgatggtagctgacgcaattggcatagagacaagacgaccaatacagagataatattgcccagcagaggtggcaaaaatattggtggtagtgaagatagtgataccaatcaaaagtgatgaagttgcacagccgtggaggcgaagaaaccagtcggcagcagtcagatcagccaacaatgaatatgaaggcgctcagcaataaagttgtgtaactatggcagcgaaataatcagtcggtgacagacgaggcaaatcaaaggcgatgacgaaatccaccaatcatgaagatgaagaaaatacttgacgacgacaaacgcaaccgacatgatgaagatgacgatgtcggtgatccagccaacagcagtgtagcaaccaatgataatgacaaagacgctcatcagcattgcatagtaggtcaaccgtgaaggtgaaataataagtcggcgaaaacataatcatccattagcaacagcagagatgtcagggtcgatgaagcagaggtgctggtgatgatgtcagtgacaataatccatcaaattaatgttataactgttgtagatgcttcacttggaggagagttgatgttgttgcccaactcgtctaaaccgaaatatttgaagttgttgaagtagaatgtctgctccgaagcaaagatgaagataatgactcctggagttgactcgtgggttgatgaattgacataaaatttgtcaaattttgagccttgtatttgtgtagcccccgactctttgattagttgggaaacaactgaacatagagtcgagaactgtagcttcttgtcgtcgaatagtcattgcttgattgaagatatgtgttgaagatgtccaagtagaaatcctgaatattggagagccacttgttgtagtaaaataacatggcattgcatgccgagatgtcgaggttcacaaagacgtcgtggttggtgaagtagtaaaacttgcgaagtagcaacaatagagtttcccggtgccgaagataataaagatgaagtcgctccaccatgatgacaaagttgtattgccgtaatgaagtgaacacaagtcggcggcaacagaagcaaaccggtagtgaagacgcgcagttgtgaagataaaagcaccagtcggcgacagcataaccagtcggcgacggaaaacgatgatgtttatcagtagtggtagctgtctaaaccagacgtagaggtgagggcactagtcagcagcagacgagacgaccggcgatgaagatggtaaggccaatcaacactggcagaatcatgcagccatggaagtgaagaaaccagtcggcagtcatggcaaacgtaggcagcttgtgttgaagatactgatgcctattagtagtgacagcgatgtagccggccgtgaagaagatagcatcagttggcgttataacaggccagccgtgcaggcggtgacaccagtcagcggcggatgcggcggccggtcggtgaagacgtagacgcccaacaacggcggcataaaggccagccgtgcaggtggaaacaccagtcggcggcggcgaaggcaagccggtcggtgaagacgtagacgcccaacaacggcggcataaaggccagccgtgcaggcgaggacatcggtcggcggcgacaaaggcaagccggtcggtgaagacgtaggcgcccaacaacggcggcataataggccagccgtgcaggcgaggacaccagtcggcggcgacgaaggcaagccggtcggtgaagacgtagacgcccaactacggcggcataaaggccagccgtgcaagcggaaacaccagtcggcggcggcgaaggcaagccggtcggtgaagacgtagacgcccaacaacggcggcataaaggccagccgtgcaggcggaaacaccagtcggcggcggcgaaggcaagccggtcggtgaagacgtagacgcccaacaacggcggcataataggccagccgtgcaggcggaaacaccagtcggcggcggcgaaggcaagccggtggtgatgttctgactgatccattcctggagcgtaagagataagcttaaagccatgaatcccttttatgcatatctggatctggatcctgcagaacaaacatataggatgagtagtatctgatataaatataatactcgagaaaaaatcaagtattttaaaatatttataaatatgtatttctcctcttgtcaattttgatttccccgagcagatgactctgtacgtttaaacactctgcccgactagtcataaccaccaagcatcgggagtcggcctaggcgcttcccaaacatgcatatgagtgacatgagtttgtcattaatggaacaaagtttcacggatcagagtttactactcgggtacttttgcaattgttaagagcagaaaataaatttatctcatctctatacttttgatttattccgaataatacttagcaccttgcgttactcggtccatccaacgagcccccgggtgctaggaatcggcccaaaggcaaccatccattggcaaaccaaacggaaagcataggaagatagaactccataactcgataggtacttttgtactcagattatgtcgcaagcaatcaagataaatattatgaaatttgtttaaaaaatatgatataacatcaatagcccccgactcactaatcaacggcgaaccagttgatgtagtgaggcagaggaagagcaaaatatcatataaagaatcaatgatgacttagctttgtcgtattccctcggtgacagcagaagtagccgatgtgggaacgaagcagtccatcaatggtgacaaaaacaccagtcggcgccagtggaaccaagccagtggtgtagataatgaagcccattaacggaggcgaagtccaccaaccgtataggcaaaaacaccagtcggcgccagtggaaccaagccagtggtgtagataatgaagcccattaacggcggcgaagtccaccaaccgtataggcaaaaacaccagtcggcggcggcgaaggccagccggtcggcgaagacgtggacgcccatgaacggtggtgtgaccaaccaaccgtataggcgaggacaccagtcggcggcgacggaggcgggccggcggtgaggtcgtagacgcccaacagcggcggcataataggccagccgtgtaggcggaggcaccactcggcggcgacggaggcgggccggcggtgacgtcgtagacgcccaacagcggcggcataataggccagccatgtaggcggaggcaccactcggcggcgacggaggcgggccggcggtgaagtcgtagacgcccaacagcggcggcataataggccagccatgtaggcggaggcaccactcggcggcgacggaggcaggccggcggtgaagtcgtagacgcccaacagcggcggcataataggccagccgtgtaggcggaggcaccagtcggcggcgacggaggcaggccggcggtgaagtcgtagacgcccaacagcggcggcataataggccagccgtgtaggcggaggcaccagtcggcggcgacggaggcaggccggcggtgaa

SEQ ID NO: 7999 - DNA, 11406 bp, Oryza sativa
ttttctaaccctttgtgttgatatcaaaatggatttgagtttagagcattatatggtagtagtaataatgtagtattaccggaccaatgaacattttacacagccacttccaatgcatagctatatggtagtagtaataatgtagtattaccggaccaatgaacattttacacagccacttccaatgcatactaaaagaaagttcatgagacagtcctgtaacagttgacggtctatcatgtatgcattgataattcaatttcgctagcagttccaaagtaataaaaaagttaggtcttttctaatcctaccactagagttctgtagctaaccacacaagcagtttgtattcactgttgaccacacaattcctcaaagattcagttacttgcgatacctatctagcaacaccacatctgatcattgtgtgattaatactgggagtggctacagtccaacgattatttatgtggtttctcatgccacagcttaattcatgtttacaatgatgtgcagacatctgtgaaagagaaactgcagtattccttttcttctacctgattgctccatgatgttgccaatgatcaatatcaatgtataccatattcatttgtattgttcgtgcaatatattttattatgtttcatttaatgtgtttgctttatgcagtatatcttcatcagaccttgtttcaaaatggatgggagagagtgaaaaacttgttgcaaaccttttccaaatggctcgagaaaacgctccttccattatcttcattgatgaaattgattcattgtgtggtcaacgaggagaaggaaatgagagtgaagcttctaggagaatcaaaactgaacttcttgtgcaaatgcaggtgaattttagcttatattattaacttttcttaatcaggtgcctgctacctgaatactttaaatgtgtacttggacgtgttattcttagaatgataatgatcctgaaagttcagagcttcaattggagacgcacaaaatgctgttatatttgaaacttatatagttcgttaaggatcaagttattgaaacagtgcttctaacttgtatatttgaggggcaaaaaggaacatggtatattttcatttcacattttagttctaagatttgttgccacaccgttttagctaatactggcgtactggaccggctacttcctctaataccagtaggtttctagtaccaagtccaaacagagttgtactagtatcaggtgtcttagttagggatattagccaggccagatctgaagctattccatccagatttggaatcataaaagtgaaaacgtgctaaatttccaagtagatcagatgcgaattggctgattagttgctttctagatacatggatattgatgcatggcttgaccgcttgaccataataatcgaataccacatttgatgggcttcaaatactgtccatcttttcttagagcatgtatcatgttattccttgttatctgaagcattccatggtttgttaaactatttagatgccctttttgttacaccaacttacttaccttttgctttgtttcgctggtgaatgtccagggtgttggccataatgatgacaaagtactggttcttgctgctacaaacacgccatatgctctagaccaggtttaagaagatctataaaactgtgttgcaccattcagaactgtcaaaattctcttgttccattgaacaatttagtacttacttaaatccattatctcaggctgtgcgccggcgctttgataaacgtatttacattccactacccgacctgaaagcaaggcaacatatgtttaaggtgcagaattgtccaattcagtttcaagaaaatgtcatgttctgttgttacaatctttggctgagggcaaacctttaatttatccaggtccatctcggggatacaccacacaacttaaatgaaagtgattttgagaacttggctcgtcgaacagacgggttttctggttcggatattgctgtttgtgtaagttgttttctgcaacattctcatgtatccatgctctgttagcatatactgaaatctcgttgctcttttttctttcaacaggtaaaggatgtgttatttgaacctgtccgcaaaacacaggatgccatgttcttctttaaggctgatggtgatatgtggatgccttgtggaccaaagcaatctggtgccgtacaaacaaccatgcaggagctcgcatccaagggccttgcagcaaaggtaagattgattgacatttcctccactgcgcatgttagaagaggcttctgatgattagcaagatttatttcctgttatgtagatccttccaccaccaatctcaaggacagatttcgagaaagtcctcgccaggcagagaccgacagtgagcaagaaagacttggaggtgcacgaaaggtttacaaaagaatttggcgaggagggttgacaagattatgcgcactcacttatgcatagctgctccacagaaatgtatattttatgacttcgattgttctggttggaagttggattcacagatttgtacaattgatagcctaactatgattaattacaacctgtttattgcgttaggctatcattgctcctctgtcgtcaacttatttcatttttactgtcacttatacttgaaattttccacaagtgtattaattaaggaataatacttaacgtggagcccttgtggtgcagcttgtatagtttgttctcctctggtttccgattcctgtcatttttcggttctattcagtgcttgttctttgcccaagttttatttggcccccaatcgatcaggtctggtattcaaccctcaaacgatctccttttgttcatgtgagtttggtaagtacttgtagaggcttgtagcaatgattccttcaattttaccagacagtctctgttgaatgcaacacgctggttctgaatgttttggcccttttcatctgatcaataaaagctgttgtaacttgtatctcaacatttggaatcaactgtcgttatcatttcatctgacgtgctttgtactgaacacgtctgatacggttggtttggcctcatcagggtctgcccatagtactattttttgtccaaacttgcttggtaaaattcattcggtttctcgctgaaatgtactgaacctgaactttttgacaggccggtttgctggagtggaggcccgtgattctgcagtgcaaaacccatcttatcatctgcgtgcactcctaggtactacctgcactgtcaagcatgtgaggcagcaatatgattcagccaatcaagctgggacatcagtcgatgacgtacaacgtagtactggcactgctcataatcgagcaaactagaggccaaactgttctttcaaatgggccaaactgttgttccaaatgattcagtgctgatcgatcaatggatcatagactgatcatcagtgaagcgatgacagccatgccatgccatgccatgcatgcatatatatggttgcagccgtcagaaaattcagaacacatatagatacaaatggacatatactgcatcttgtgtccaaagcaataggacgattactagagcctttctttttctctgaacatggccagaaattgagagatgtactgtactccaaatttgcatatatgaaccaattattgcttctaaaatctattggccggtgcagctgaatttggggtggtggcgtagtacgctcagtactacaaacgtacgcactcttctgaaggctcttgctcgtcgttgtaccgcagaagtacagtgaacacttgcatgcatataataggtcaggaggaaatggccaatctctctggagtattcatcaagatcaatgcttgctttgctttgcttgcccggtctcctagctattagtctccatttgattgatgcttttgtactaattaactaccactagtaatgctattatactaattaagtatatgtgcatcaacatagttaattaattcctagcagcctctatcatatcctgacgatttaagcttgtagcattatattagctaagcttttgcagtcaggagtacgtggacaatgactgacctaggagactcttgcttatgggtgatttatatgcatgtgtctcatgagatattatcaaaactgtcatggcagattaaagtatgtttatttatgcttctggttaatatgttatggctgcttgagaggcacagttgtagaagaacctaccacaatcttcccatcttgtgatttttgtcgcttctcgtaggccaattagggatgcaaggaatcggggacttaatctcattaattaatgaaatgacaggacagtagtagacccttgctaatcccggccttctggcaattatatacattgataattttgataatgacacaatccctaaaatttagctttgacctgatcgaatgccatgatcatagtattatggaaatgttttagacaaatctaccagcaccattatattttcacatatatcatcgtctttgcatgttcgtatatatatcacaaattaaaatgaatactatttgcttgtggttaattagcacctcaactcatggttcattttatcgcttgagataaaaattcgggataaattaaccgatcgagattttctaccaagattaagcaaaatatcgtcaacaatttttaaatggaaaaatcgtcaaatattgcgaaaataccaatggatcaacttgtatgtcctaattatgagcactcttaaaactccaagaaaaaaaagacaaaaatgctgaagtgtgatgcatgcatttgtacatattgctcctcccaaatggccgggagtattaatgaagaatcgaaagaaatcatttctttttctgtcttgcattattcatttaaatccaacgatttcagttggtgaattgaacttggtcacctggagcacctttccaaaaagtttcatctctgtacagactctcaagaaaactagttggcaagtggaattctttagtcttctctctaccccggaaaatatcaagaccagcagctagctagcaacttatgaatattttttaattaattatccccattgatcaagtgctgattttaattataacgtgccaaaaagtttcagccgccaatgacacatgcatagacaaattgatttactacaaaaatgcatctgctaattgattaacaagtcggcaacatgcatgaacaaaccacgcacacacatatataatatatatacttgatcctagcttccttccaggaagaagtaaggatcatctcatataaaatgtgtgcacttttcatcatcaatcaaaacacttctagcataacaagtgtacaactaaacaaataatttggagtccatgaatgcatgaacagctaaacacatgtgcacacaagatcacagcatcagctaaccccaggaaaaggtagtttgattccaagacggaaatcaattaacaaccgactaatccttgtcaaagcaacgtttaattacttactagtatactccaaatggatccattgcccttgaccaatactgaatccacaaagcatgcatattacgcatggactcttgaaactaacaaggcatattgcatcggtttctctctgacaaaggcttgcatgctagtagcttggaataaaaaacccaaggatatagcacttacatagtaggagtactatagtacaaagagatagtagcaaagtaataataaattaacacacaaatgcttaattaggtgggtggcaacatgttaattaaaatcagctccttgcatgcagcctttgacgccatccacagaattgacatgcatggcgacgtggccggacagcatccaagaagcagatcctttgaactaagccaagtagctagtccatgttgcatatgatcacccagctgaaacccaagtggatcaccaatccattctttgaaccatcatctactattagctctctctctttaaagttgaagcagaggatgacaagccagcagcacagctagtagcagcaacttgcaaaaaaaaaatttcaggctagctagctctactagcctcttcttacacacacacacacaagagaggaggaggaagaaggattggattgggttggcctggttggattggatggcaatggaaacttgagccggtcactgcagctgctaggatccagttgccaacttggcacgcacacggtatgaaactgtgtgctgtacgtctcaaactgcctctctagtagccaaacaagctgtgtggtttttccactggaaagctacactccccttgcaacttgctgctgctagctgctgttgctgcattcttgcctggtgagctaaaaggcattttgtgctcatccacattgtcttggattcattcattcattcatgcaatgactacctcttgatagtagtagtatatgaagaattcatgtatctgaatgcatgctgtgcagcctgcagaaatgtatagtaatctgaatttctggtggtttttattatacaggtgcgtataaatattatttatatgtatatatacaggagggctttgggatcgtgcagatatatatgtgctgagccatcgacgagaaaatccggtcggccggtcggtcatacttggggtgctgcgtacctagactttgatgtgtttttcacgtctttgtcgcaactaggaagtgtcgtgctcggttgataaaaccatgaaaaaaattgattggttgttagtaatttggtggtcttcgacttctatgcgtcctagctacattaaacaagaggatgattaaatttaattaaattttgaactagctagtttgagttttttccccctccggcaggtctaaaatcgtatcaacactttttgaacataataaagaatattttttaatttatgttggatgggaatgatgtctgaatttatcttgaaaaaaattctatagtgttctaattttgttaggtttgtaaattattttctgacagaaattacagtgcaataaaatgatatgcactttgaaaatcatatcaatctgcacgcaaaaaaaagagagaagaaaattgtatcaattttcaggacaaatatgttttcatgacaaggaagcatgatttcatttgtgacagaaagtttttaatggaatgaacatggtttctgccagccttttcaagagactgagggagggagagagagagaaaaaggagaataacaagttgctcctcaattatagggttgcaatgatatatattacctttaaactaaaggtctcttagccattgccacatatgtaatgtaatttaaattcaaatggatattaaaggccattccaagtcacattccgcgttctcgtggtcataccgcgtgaacctagtgatggagaagagatcgaacccggtcatacttgggcgctagcttgatgtaagtcattgtcacaactaggcgagtcgtgttctataacaatgtagaatcgaagtaaatcaattcttgaattgtctcgcaaaaaaaaggggtgatcttgagttgaattttatcaattttaggcaaaattgggtgaacaaggaaaatagaagagatcgataaaaaagactgaaaatggagccaaaattttctaaggtgagtacatagtaaacactaagcaaaattctcgagtactatatatgatatgccaattgtactatacaattaaacgaaaacaacacgcgcacagataaaagttaaatatggattggagtgtcttccaaatttaatttttatgcatttaaaatttatgttgcaagtcaaataatcatctcttgtagtcatgttccttgttgtgttggttgaatttgatgcttgattgagtagctagtctctctatttctagaacactttctgctaacatattttcccttttctggcctcatcctcctttttctgatgcagcaccttttttcacactggcaagaacttattagagagaccatgcaagcagcaagctgaaaaagctgcagattcaaatgtagtaatggttcaggataaatctccacttattcaaatgtagtctgttttctttcatattgttgatcacagtacagtattatatagccagctagagggaaatcaacacatcaagttgctgtctgtacacatgccatccctacaagatcaatgcaaagacttgattcgttttcctgctcatacaacgcgcgtgagcatgtattgaccactgaccattgcttagaaagctactgactgactgaattgaagcatatgcatatggctttgtcgcactggatcaacagctagaaagaagaaagcaagagaggagtggatgaaacacacaagagggaaataaatctccattaatctgttagacacatcgttcagagtcatcgtttgagttacggctgatatttattatatatataaagcgtgaaaaaaaatgaacgaagaaactaaaataattataagtaaaagttttatatatttctatccttagtgatttaaaagtcaatattaaaaataaactaaaaataaaaaggaaaaatatctcaaaatcaactctaaaattaagtttcgacattcaaaatttgtggatatgtagcttctgatgatctaaaaggcaaacgatatgttgccttgattaagctacttctgatattctacatcacgcaatgcaaagtacaacatatatatagtcagcatccgtacgttaggaaattaggtatacatatctacaaaatacttttcagttttgatcaaagctgattaaacagcacaagagcagttaacataactttgaatatggatactgataagttaagcattttttataacaaatctagtagctagtgtcacacttatgatacacaccaattagatactgtatgtatttccagaaattaatattacttataacatattagtagtacgtagtacctcgataactgaaagtttgaaagtattcgatcgcaaactctacattcgaatcattttgtggtactatactccaaggtcacctttgtacattgaagtcttgaagcaacaacacgtacgtaggactactatacgctagctaggtcgccctagctagctgcatctgccttctttttctcaaagaaaacctaataccactactgtatcaaattaatctgatcttacagtacacacaagtagctagtatctgcatacagcggttccgcatacagctactaacagcctcagcgtttgaaatatgctgtaatttatataaagcgaaatggtttatcaacaataaaagttacttcctccgtttcacaatgtaagtcattctagcattttccacattcatattaatgttaatgaatataaatagatatatatgtctagatttattaacatcaatatgaatgtgggaaaagctaaaatgacttacattctgaaacggagaaagtaagatatatatgtgtctcccttgtcttaggagtttttttctcttttaagtagttatatatacgtgtcattagaaatttagaacataccaatgcccaaaaataaacaacgataaaaagttcgaagtaaacttttaaaatttaaatcatgattaacggcttaatcatgataaaagctaagatatatatgtgtctcccttgtcttaggagttctttttctcttttaagtagttttccttttagattcttttatttttccaaggctccccccccccgcgcacccacccggcaatagcgctttaatttgtgtaagctaaactctgctttcgtttaatatattttcgcgaaaaaaacttttatatacgtgtcattagaaatttagaaaccaaaaaataaacaacgataaattaaaaactcgaagtgaacttttcaaaatttaaatcatgataacggcttaattataagctagtagtagtaaaagacaaaacgatgtgatgaggctgtaaaagatgttaattaattaatgcataacactgtataatcacgcaatacgattagcacatggattaatcaggcattaagctgtgctcgatcgatcgctaaaagtggagctatggcgaacgttctgcgatggtctccaagaatcttctagaaactatatctcggacgacttttcaaagtctttggagtcgtcgggaccgggccggtcgaatgccacaacgatttagtgatatcactgcaaaagtttataagattaagatgagtacgtaagctaaccacatggccaacgtgctcgttgtacgtaattaattaaattaaactgatacattaattgcaacaagctggggttattctccccttgaggttggaaaagaaccgaatctacacaaaatcaatcacttacgacaacaaattaataatattcgtaaatgcaacatttgtcataaaatataagtatattctaacatttgtcataagaggaattttacagtactctttgttagaacctgtgggattctcctctgtttctaacagagaaaacttacagtaatgttaccctgatttacaaggttgccatcctatatgtgtgtcgagaacgacaagctctactagtagtattattattttcagtctctgcatcatgaatgcacatagctagacagagctactacttggtttataggtcaagaaagagagagatttatgtcaatcgacaaccagtactcagactaacagaatcgcacaagcgtagttatgtcgttttgatgcaacttgcaggtagatcgtacagagcacagcaactcgaaaaaaaaaataaagatgtgaaagatcgatcgatcggttaatgtgatccatgaaaattgcaagctgcaggcagatgagtgagtgaaacagcaaatgttgtgttcagtgcactgaaccttgctatcctttccatcgtgctcatggtgcaacttgcctgatgtacttcatccaagttgcccaagtagctataggcctatagctgcagctcgatctccagcaaacaatgcaattaaggagcactgttatttttaagtaccccaaaaaaaacatacaatttttagggactagttcagtttcatcctcagaagttggttttttaggtaacagaggaatacgttatcactactgttgctatatttaaatatatttagttaactgatcaatcacaagaaagcttgagaattaagatggattattgtaaatattgcaagttcgatcaaggagtggttttttaatctctatctgagaaattgttttagaatataaatgatcaccctgcatgctaacttaaatgtctgaaagtttagtttgctgactgagtgacgctctagatcgaaaatctgacccgcaatagttctgataaaaaaaaactatatgcacatatttatgagcaaatttgtcgaaaagatactacaatggttcttcacactttataactttattctgaacatgtcaagttaaatctagtggacaagtggacatgagag

SEQ ID NO: 8000 - DNA, 22161 bp, Oryza sativa
cctcttttttgtacaatttaacttaatctgcaatgagaaatgatgaaaaaatttttgtattagttttattttgctatatatgagatgaggatgatctgtgccgtggtctttttgtgtcttagcttgaaataagggcccgtgcccaagtcccagtcctcgaaaagcgcgggtcggggctagtgcctggggagatccgcatgtcgagactggccaggccgggaacgtggtgaccgagggttatgggtgacccgattgtgggtttttgccgattcccccccggagttcaccacgccccggggcacggctcggttctgggccccgtttggcgattttagctgaccgaaccgagcccccgagggcaaggttgagcacgagtgacattatttcaagtcaagattcttcaaaaggaaaaaacggcacagacacaacctttagaaaattgaaactgcttttattgaaatgctgaaataaaggaaaaagggatatatgtgcatgtgtggtagcccccggccaatcctgcacacccgaggggggtgcggggttggcccgagccaaaacctgatacccgacccccccccctttcaggggtagagtagaagcgacgaaggtgttcgatgttccacgggtttggcagctccgtgccgtcgcccatggccagccgtaccgagcccggccgggggacaccgatcactcgatacggaccctcccacattggtgagagcttgctcaatccagcacgcgtttggacgcggcgtaggatgaggtcgtcgacgcagagtgatcgggcccggacgtggcgctgatggtagcgccgcaggctctgctggtagcgcgcagctcggagggccgcgcgccgccttcgttcttccaagtagtcgaggtcatctctacgaagctgatcttgatcagcctcgcagtacatggtggcccgaggagacctcagggtgagctcagatgggagaaccgcttctgcgccgtagacgaggaagaaaggcgtttccccggtcgctcggcttggtgtggttcggttcgcccagagcaccgctggcaactcctcgatccatgaatcgccgtgcttcttgagaatgttgaaggtcttggttttgaggcctttaaggatttctgcattggcgcgctccacttggccattgcttctggggtgggcaggtgaggcgaagcagagcttgatgcccatgtcttcgcagtagtcgccgaagagttcactagtgaattgggtgccattatccgtaataatacggttaggcactccaaaacgggccgtgatgcccttaatgaatttaagagcagagtgcttatcgatcttgacaaccggataagcctcgggccacttagtgaacttgtcgatcgcaacatacagatactcaaacccgcccggggctcgtttgaacggtcccaggatatcaagcccccagacagcaaatggccatgacagtggtatgatctgcagggcctgggccggctgatggatttgcttggcgtgaaactgacacgctctgcatcgccggaccagatcgactgcgtcattgagagctgtcggccaataaaatccttgacgaaaggccttgccaaccagggtacgcgaggcggaatgggctccgcactcgccctcatggatgtcagcaagaagctcaacgccttgttcctgaggaaggcacttcaggaggattccgtttgccgcgcgccgatagagggtcccttctaccaacacgtagcgtttggaaatgcgttgtacgcgttcactcccttcgcggtcctcaggtagagtcttatctgcgaggtatgtttggatctcagagatccaagcaatcaatctaaaggagcttggagcgctcccttcgggtcccgaggcctggactccgacgggcctcgggggccggtcaggcgcatccgtctcccctaaggggtcgggtcgcgccgacggctgagtaagcctttcttcaaaggcgcccggtggggtctgggctcgcgaggacgcgagccttgagagttcatcggcaatcatattatcccgtctgggcacatgccgaagctctatcccgtcaaaatggcgctccatacgccgtacttggcgcacgtaggcgtccatctgcggatcagagcaccggtactccttacagacttggttaacaaccagctgagagtcacctaacaccaggaggcggcggatccccagcccggccgccactctgagtccggcaaggagtccctcgtactctgccatattattggtcgctcgaaagtcgaggcggaccaagtatctgaggacgtctccgttcggagaggtcaacgtgacccctgcaccggcgccctggagagacaaagaaccgtcgaactgcatcacccagtgggcggtgtgaggcagctgagaggggttcgtgctggcctcgggtattgagacagtctctggagccggggtccactctgccacaaaatcggcgagggcctggctcttgatagcgtggcgtggttcaaagtgcagatcgaactcagaaagctcgattgcccactttaccactcgtcctgtaccctctcgattatgcaagatttgaccgagggggtaagacgtaaccacagtgatccgatgcgcctggaaataatggcgcagtttcctcgaggccatcagaatagcgtaaagcatcttctgggcctgtgggtatcgggtcttggcgtcccggagggcctcactaacaaagtagacaggccgctgcacctttcggcggggccgatcctcttcgctagggaccgtacccccggggcgttcttcgtccgagtggcccctcggggcgcactcgtcttctgtgccgatgacctcggggtcggaggacgacaggagcggccttcccacagtggcctcggggccgtcctgggggtcgggggctcctggcgtcatcggacaagcgggcaaagggccaactccggtcgtcaggggccttaggccaccgttcggcttgggggcctcttctccctgctctctcccgggtcgaatcggtacagggttagcctcggggtcagagggcgataggtgcggcctccccgcagtggcctcggggccttcctgagggtcgggggcgcccagcaccgtctgacgagcggggagagggccgactccggtcgtcaggggccttaggccaccgttcggctcgggggcctctcctccctgcttgctcccgggccaagtcagcacagggtgggggtgcgcggaatgaggattgtcttcatcgcgctccacagccaacgctgcactaactacttggggggtcgccgctaagtaaagtagcaggggctcatttggctccggggcgactagaaccgggggagagctgagatatgcctttaactgagtaagggcatgttcagcttcctccgtccaagtgaacggccccgagcgcttgaggagcttaaacaagggaagcgccttctctcccagccttgatatgaaacgacttagggcggccatgcaaccagtgacgcactgcacatccctaagtttgctgggggggcggatccgctctatagctcgtatcttctcggggttggcctcaatgcctcgggcagagaccaaaaacccgagaagcttgcccgcaggtacaccaaacacgcacttatcggggttcagttttatgcgggcggagcggaggttctcaaaagtttccgctagatctgagagtaaggtctcttggttgcgcgtttttacaaccaagtcatcgacatacgcctcaacattacgtcctatttggctacccaaagaaattcgagtagtacgctgaaaagtaggacctgcattctttaatccgaagggcattgatgtataacaataggttcctacgggggtaatgaacgcagttttttcctcatcctccctagccatgcgaatctgatggtaaccagagtatgcatctagaaaacacaaaaggtcgcaccccgcagtggagtcgacgatctgatctatgcgaggcagggggtaaggatccttaggacatgccttgttaaggtcggtgtagtcgatgcacatccgaagcttgccgttcgccttgggaacgaccaccgggttcgccagccactccggatggatgacctcacggatgaacccggcctccaaaagtttagccacctcctcgcggatgaaggcttgacgttccggggcttgccgccgcactttctgccggaccggccttgcgcccggccgcacggcgagacggtgctcaatcacctccctggggaccccgggcatgtccgctggtctccatgcgaagacgtcagcgtttgcccgcaggaaggagacgagcgcgtcttcctatttgccatccagaagaccaccgatccgtgtggtcttggatgggccgtcgcccaaggcaacctccttgaccgggacctcgtcgcatgtggccatccgctgcctcggggcggtgggggcagaggggccaagcctctcgtcaccaccctcgggcttggacgcagcagcgaggcggtccgcgcgctgctccatgcaagcaagcgcggctttaaggtcgccacggacagagatggggccaccggggcccggcatcttcatctggaggtaggcgtagtggaccgccgccatgaacttcaccaacgcgggtctccctaggaccgcgttgtagggcagactgaggtccgccacatcgaagctcacccgctccgtgcggaagttggcgggtccaccgaaggtgaccggtaggtcgatgtgacctaatggccacgtgtgccccggcgtcacaccgatgatcggttgagacggctggagcaccatccccggggccttgatagcatcaaaggccgcgggggaaaggatgttgagagccgctcctccatctatgaggacacgtcccaacttcacgttgcagatggtgggggaaaccaccatcgcagcctgccctccccgggcaatgcacggtgggtggtcggtctggtcgaaagtgagggcaacctccgaccaccgcgcccgacgcatcgcctcatgggtaggggccatggccagaagctctcgcttcatagccttgaagctccggcgagagacgtgagcacatgctcctccatcgacggtggcaatggtggccccaggttcttggaaacctaggtcatcatcaccatcatcgatgtcaacagcgggggccttctgcttggcctcacttcgccgtttgccggaaggaaccgccggggacttgccctcacggcgttcctgcctcctgtcctcctcccatttcctcgttcgctcggccaggtttttgaccgcacgacagtccgcgagatcgtggagggaggtgttgtggacagagcaccacctgccggcgaggcgctccctgctgggtgtaccagcctcgttctttttgtcgctcgcaggcctcccctttcgagtggcccgcggagcgccctcgacggcgaggacatgaccctcgtcgccggaacggtccggcctcttcttcctcctcctgtcacgccgccctgtctgagcggcggatccgggggcggccgaagctgccactccggaaccggaggagttccaggtccaggcctcctccttacgagccactcggtccgcgagctgaaaaagctctgcggtagtctggggctctttggaggcaatcttttcgagcatgcggttgtgccgcacaccccccctgaacgcgtagatcaccgcgtgtgcagggatgcatggtatagtattgcggacttggcaaaaccgctgaatgtacgagcgaagcgactcatcatcgcctcgctgtactgcatgcaagtccgcttcttcgcctgggcgcggatatgtgccttggaagttcatggtgaactgttggcacaaatcttcccaggagtggaccgacgcgggtggcaggttcgggccgctgccatgcgtaataccctactcgtgtgtcttgcgggcagacgatctttccagatacagagggagagcgagagcttgagatctcaccctaagcccccggccgaactggcaaaggggggcctgcgcggtctcccggtgaggagccacgagctccgtcatctggcgcgccaggtagggggctcagcgtgtgttttctgagctctcagactcttccgtgtgcgccaagtttttcttgttcagcctaatggccgagcaaggaaaagcgcacgacctctctccgagtgtgagcggcgacgacggggagccgaatccacgccgtcgagctcgtactcccccacctcctccgcgccaaagccctaagcagggggaggcgcttgagagggtcgacaaatccgtggcatcaccagtcgcaggtgatgcaggagaacggcgagatggggagcgtcgcctcctcgtctacggcgacggcagcacgcctcagggtgcgcttcaggctgctggcgcgctcctacgacacccgcctgtcgtccctgacccggagtctccagcccaacgatggctggaagacgtggccaacttggtcatgacggcacagcagcgcctgggtgctggtggacggtccgccaccaccaagacctccggcgccgctaccaccggctccgtgtcatcaaggcggagggcgcggcgagcggcggcggctgcacgtcatccagggagagaaattggagtcccgggcctggtaactcgctagcacgagttcaaccgccccccgggcgaggtccctcgaggatgacttgatggtcttctcgagctcctcggggagtcgttcgaggacccaggccatcctgttgaggtgcggagcgaggccttccagattggtggggggcaccgtcgtctggcctctccagaggcctgcttgccgaccggcgcgcttcatgcgggagaccgcatcccaaagcatgtcgggcccaatctcgcccgccaagcgaagggcctcggcctccccggtggaggagtccagcgctcgctgcatttccgcgacggtgtgttcggcagctgcgaggcgggcggctaagtcgctttcgcccgcggccgccccgccgataggcgcccttgcgtccagctccttttcccgcgcctcgaggtcagcagcccgctgctccagtgcggctctctcggcgcggacgcattcgagattgcggcgcgcctgctcctcctgcgccgcctcgcgaagggacaggctgtccgccagccgtttggtcctggcctcagcctcctcgagagctcgctcccgctcagcgagtgcgtcctcgcggaggcggagcgcgcactcctcctcggcgcaggcggcctcatgcgccgccagcgtcgcctctcggagaccagcggcggccttgcggtccgtcaagcccctctccacggcgccggcgtgttcttccagcgccatggcacgggcctcaagggcctcctcgcgccgccgaaacgccgcttcagtctccgttacccgccgctctcgggcagcggcggagtcaaggaccccttgggcggcgtcgagctttttcttcagctccgcctcccagcttgcgtgctgaaggcggagagtgtcttgcgcctcgatcatcgcggtggtagagatgagggcggccgcccgctcctcctccacctcacgggcgatctccgccagcgccgctttccgggcttcaagctccgagacatgacggcggtgagccttacggcccacctccaccatggcgtccaccgagcgccgcccctcctcaacacgcgcccatgcggcctcgagctccgctcgttctgcacgcagggcctccacttgggtgttgaacccatccagcactgcggtgtttgcggcggccagggcctgcagaaggggctcggcgctcagcggggcgacagaagatgaggagaagagccgccttggagaaaaggcgacgtggcttggccccccggaggatgcactgggctcggggatgtcccccgggcccgtttggtcctgggcgtcgcccggtgaggtaggcccaggcgatgcgcccgcggcctcgtcgcaagccgcctcggaggatgtcgcctgagggccgcccgagggagtaggcccaagtgacgcgccagcagcagctgtcgcctcagcctggcgagaccgggcggcctcctcccgagcagcttcttcggcttggcgagcccgggcggcctcctcccgagcagcttcctccgcttggcgaacccgggcggcctcccgggcggcctcttcagcttcccgaaggcgggctgcggcttcacgccggtcagactctcgcctccgctcctctgcggccgctggatcttcggcctcggactggccggatttggggtggcgggaggaatgcgacgggacatcgctgaagcagaagaaaaaaccaaaagacgaacaaaatgagtaagaaaaaacttctctttgggagaaaggtggttgcaatgagagtgagacgaacctgcgagggggtcggttgaatgaccaccttggaggagaaatcaggttcccccggcatggttccgtctcccccgtcttgcggagccgtttcttcttgcgctccccctcgggctgcgacgtcggcgcggccccctccgggcgccgactgttggcacgcgccgccccgccccctcggggaggagatgggggaggtgttcctcccagcttcctcttcccctgggcgtcggcagggcggctgctccccgagcccccggcgcggggcccagaagcacgaccccctcctggggcagattgttcccctcggcggcgctcgcccgcgccgtcgtggcccttaggggctctctcctctgaggccccgacctccatcataatggttagaatggaggcgcggtcgggatcgctgcagagggggaggatctcctgaggaatgcgagatgcctccgcggagctaagattcagcaccctttggaccacgatcttgaagtcctcgggagcccaatcccatctggctccctggtgggtccgcatgtagtcttcaggcccagtgtactcccaggcgttccgggcgcgccgttggagcggcgcaatccggcgacggaggtaatcgccgtacaccatggccccggtgagcccctgggatcgcaggcccgccaggcggtcgaggacggcgtcgtagtcctcccccagatctaccggtgcccgccagctggagacctgcgccgggggctggcttggaagtcggaggcgcgcttcgttggcgaggggggtgtagaaccagtcgctcttccagtcgtcccacttcttgcgaaggccgcaggggatgtagcggttcaacaccggcccccgcggctggaagtagcagccgccaaccaccgacggcggtgacaccgactgcacggtgaagaaccaccggaacagctgaagagaggggcgcaccccgatgaacatctcgcacagatgcgcgaagatggccaatgtcatcaccgcattgggggtgaggtgcgccatctggaggtcatagaactccaggacatccatgaagaaatgaggaaatggcgggaccagcccagccatcgcgaaggggaggaagaagatggaccgccccgggtagtctggtgccgggcgcccctcgcccagcatcactatctcccgaccggtggcggactccggcatgaagcggcgcggcagtccggcgtgcctctcattcacgatgcgggaaggcggtagtacactgccgtcgagcagagcagagccccgtgccatggcggcggaggaagagatgattgagaacgagcgcgtgtggcgaaagtagggcgtagcagagaaagagttagagctcaggtggcgaaggcaagaggaacaatggcgaaaggaaggaagcaaatccttttctcgatgcttttatacccttgccatcgctgggcctgactcctcgtttctcgcgcccactacctcgctccctcgtatctcgctatctcgctccctcgtttcccgtgcccacgcttccactaatcccattcgcccgcttacggcgcattgagtggatatgcggttgtggcaatcgaaatggattgtatcgtgcgcgcgttaattacgctcgccgaccgaagcggcgttaccatatctccgggcgagacgaatctgctcatccagattcgcgcgctgctcaagtggtgtggcagtcttgaatagaccgcccattatggacaaccaaagttaccaataccaatgtgcatggattgagaccgttcggtattttgcccaactacggagaccggtcccacctgtcacagggtggcgtcacacctgaccgcttcccttgggaagggaaattgctctggcataacgccgggggctactgtcggtgatatgggaccgggagtatcatgactagaggcttgaggcagacacaatcgcccacgtggcctggcaccttcggggacgtcgggcccgagggtgaggtgtccgccctcctcctgatttcccccgagggggggtcgggttgcgtttgccccggccccgagggccgaggcaccccgacccccttaaggaagtctgcgccacatatatgggataagtgagcacagctgtgctcacctaacagcatttattgcagtctggtcaagcgtgtcacactgcatgcagcgcagtacggcgcgttcctttatccggtctgtgaccagtcacagaccggtcagatcacgggttaggtggcgactggcggtctgacgcacgccttaccccatcccgtcaaggtgtgagtttctaagcactcgtccccagctggagctagcgtgttacatcccagagatggcacgttaactccgatcgatatataccaggcttcatcctaaccattacaggcaaggtgttacacaaggaagggcaaacatgcatgttgttaaactgacgcgtggtggacaagaatgaccggtctggcactggtcgcgtcagcaacgggcagccacgatcccacgttgcgcctgtcgtcgccgggagtggaggtaggtgtgggctgtcccatcggagtgtcattcggacagcaaccataccaatctccgtccataaagagaagaaaagtccagtttggaaaggggaggggtgcatgtggtatccccttgaagtataaaaggaggaccttgcccatagagagggggttgggtggattcttttccagatttagagcttagaacggggggggggagttggctcacactttgtagctcattcatacacaaatccacaaaaacacaggagtagggtattacgcatggcagcggcccgaacctgtatacatcgccgtgtctcgtgtgtcttgcgggcagacgatctttccagatacagagggagagcgagagcttgagatctcaccctaagcccccggccgaactggcaaaggggggcctgcgcggtctcccggtgaggagccacgagctccgtcagagtgatataccaactgctttgtaaaatatgatgagtgatatagcaaaatagctataaagaagcttgtatattgtgaataaagaaatttccaaagtattgggcatacgccatgcgcacactgctttaacagatgtgcttaagtccctagaagacacacggtttcaccacacctggaaatatatggcatatgtggtgtaaaatccgagtaaataaactcataaaggatttaccaaccgcctagaaaatgaccacaatatataatcagcctaagccataatattggtcaataaaaatgcacacttacgtggcaaaaagcaatgatattgtatccaatcaattgcttaaaaacccaaacagcaccttgacttatataaaaaagtcagcgggacagctatataaagctttactgtttgacaccttttaagatgcattgtaccaactcctaaaaagttgagtaactgcggtataaaaggattttaaggtattgggcacttgatcacgcgcactttggcctaagcaaaaagtgcctaagtccctaaaagaacgtaacaggccacacctgaaaatatgggctgcagacatattaggcctaggccaaaaaatatgccttcgacaccctttaaaggatgacgcatgtaacatgctcccgagtaataaatcttccgggtaatatagaccaagtgtagctcatatgaatagcttctgatctgaatgattatcccttatgggatactccaaaataaatataataattgaatcccgactggcgcaagtattcggttgtaacccttatggggaataataaatagtccagtctttaaacatagaaaatagacccatgatcatgaatccatattgcatgtatccagagcaagtccaaattgaaggtatgatacttgtgtttgaactagtaagcccctgagcacgtagtcacaattgttcattgatggtagctgacgcaattggcatagagacaagacgaccaatacagagataatattgcccagcagaggtggcaaaaatattggtggtagtgaagatagtgataccaatcaaaagtgatgaagttgcacagccgtggaggcgaagaaaccagtcggcagcagtcagatcagccaacaatgaatatgaaggcgctcagcaataaagttgtgtaactatggcagcgaaataatcagtcggtgacagacgaggcaaatcaaaggcgatgacgaaatccaccaatcatgaagatgaagaaaatacttgacgacgacaaacgcaaccgacatgatgaagatgacgatgtcggtgatccagccaacagcagtgtagcaaccaatgataatgacaaagacgctcatcagcatttgcatagtaggtcaaccgtgaaggtgaaataataagtcggcgaaaacataatcatccattagcaacagcagagatgtcagggtcgatgaagcagaggtgctggtgatgatgtcagtgacaataatccatcaaattaatgttataactgttgtagatgcttcacttggaggagagttgatgttgttgcccaactcgtctaaaccgaaatatttgaagttgttgaagtagaatgtctgctccgaagcaaagatgaagataatgactcctggagttgactcgtgggttgatgaattgacataaaatttgtcaaattttgagccttgtatttgtgtagcccccgactctttgattagttgggaaacaactgaacatagagtcgagaactgtagcttcttgtcgtcgaatagtcattgcttgattgaagatatgtgttgaagatgtccaagtagaaatcctgaatattggagagccacttgttgtagtaaaataacatggcattgcatgccgagatgtcgaggttcacaaagacgtcgtggttggtgaagtagtaaaacttgcgaagtagcaacaatagagtttcccggtgccgaagataataaagatgaagtcgctccaccatgatgacaaagttgtattgccgtaatgaagtgaacacaagtcggcggcaacagaagcaaaccggtagtgaagacgcgcagttgtgaagataaaagcaccagtcggcgacagcataaccagtcggcgacggaaaacgatgatgtttatcagtagtggtagctgtctaaaccagacgtagaggtgagggcactagtcagcagcagacgagacgaccggcgatgaagatggtaaggccaatcaacactggcagaatcatgcagccatggaagtgaagaaaccagtcggcagtcatggcaaacgtaggcagcttgtgttgaagatactgatgcctattagtagtgacagcgatgtagccggccgtgaagaagatagcatcagttggcgttataacaggccagccgtgcaggcggtgacaccagtcagcggcggatgcggcggccggtcggtgaagacgtagacgcccaacaacggcggcataaaggccagccgtgcaggcggaaacaccagtcggcggcggcgaaggcaagccggtcggtgaagacgtagacgcccaacaacggcggcataataggccagccgtgcaggcggaaacaccagtcggcggcggtcgaggcgagccggtggtgatgttctgactgatccattcctggagcgtaagagataagcttaaagccatgaatcccttttatgcatatctggatctggatcctgcagaacaaacatataggatgagtagtatctgatataaatataatactcgagaaaaaatcaagtattttaaaatatttataaatatgtatttctcctcttgtcaattttgatttccccgagcagatgactctgtacgtttaaacactctgcccgactagtcataaccaccaagcatcgggagtcggcctaggcgcttcccaaacatgcatatgagtgacatgagtttgtcattaatggaacaaagtttcacggatcagagtttactactcgggtacttttgcaattgttaagagcagaaaataaatttatctcatctctatacttttgatttattccgaataatacttagcaccttgcgttactcggtccatccaacgagcccccgggtgctaggaatcggcccaaaggcaaccatccattggcaaaccaaacggaaagcataggaagatagaactccataactcgataggtacttttgtactcagattatgtcgcaagcaatcaagataaatattatgaaatttgtttaaaaaatatgatataacatcaatagcccccgactcactaatcaacggcgaaccagttgatgtagtgaggcagaggaagagcaaaatatcatataaagaatcaatgatgacttagctttgtcgtattccctcggtgacagcagaagtagccgatgtgggaacgaagcagtccatcaatggtgacaaaaacaccagtcggcgccagtggaaccaagccagtggtgtagataatgaagcccattaacggaggcgaagtccaccaaccgtataggcaaaaacaccagtcggcgccagtggaaccaagccagtggtgtagataatgaagcccattaacggcggcgaagtccaccaaccgtataggcaaaaacaccagtcggcggcggcgaaggccagccggtcggcgaagacgtggacgcccatgaacggtggtgtgaccaaccaaccgtataggcgaggacaccagtcggcggcgacggaggcgggccggcggtgaggtcgtagacgcccaacagcggcggcataataggccagccgtgtaggcggaggcaccactcggcggcgacggaggcgggccggcggtgacgtcgtagacgcccaacagcggcggcataataggccagccatgtaggcggaggcaccactcggcggcgacggaggcgggccggcggtgaagtcgtagacgcccaacagcggcggcataataggccagccatgtaggcggaggcaccactcggcggcgacggaggcaggccggcggtgaagtcgtagacgcccaacaacggcggcataataggccagccgtgtaggcggaggcaccactcggcggcgacggaggcaggccggcggtgaagatgtaaacgcccagcaacggtggtgtgaccaaccaaccatataggcgaagacaccagtcggcggcgacggaggcaggccggcggtgaagatgtagacgcccaacaacggtggtgtgaccaaccaaccgtataggcgaagacaccagtcggcggcgacggaggcaggccggcggtgaagatatagacgcccaacaacggcggcataataggccagccgtgtagacggaggcaccaatcggcggcgacggaggcaggccggcggtgaagatgtagacgcccaacaacggtggtgtgaccaaccaaccatataggcgaagacaccagtcggcggcgacggaggcaggccggcggtgaagtcgttgttgttatcagcaatggcggtggcgaagacaagccggcagagtggactcgcggccgatcgaccggaaagctgagacgcctcgagtccatgaccagcatcaatcgcctcaatagtgccgcgtaattatatgcgaacaacaacaaaaaatagcaagagattaatctgagattaaaaatcaatatgataaataatgataaaaatcagattgagtttccccctgactgatttggatcaagttagagaagaggagcttgaagaagtggtcgacggaaaggaagtgaaaactcccaaagcgaaaacgaagtcggcgactcatgaaattgattccatcgcgctcgttgataggaaactcgacgcaacccctacctggcgcgccaactgtcgaaacatgatttcggcaataataaaagggggtagcgcacgagacctaaaagtggatggatgcggagacaaaggatttagacaggttcaggccctctcaatgagaggtaataccctactcctgtttggggatttgaatccgccgggtgtagtatagatctgacgatcaggttgtgtcatcataccccctagagggcctcctgcccaccttatataggatggggggcaggattacaagatagaaaccttaaccaatacggtatcggtttcctaaatctactttacaatattatcaaaccaggactttaggccgttccgtaatatacaaggaaacgtaacacccaagtcatgatctgttacatattacatagatataagttatcccctatgactagtcggataaccatgccgtatgggtatggggtacccataatatccacagactggtaatcaacgttgatgggaccgctttaccggccgatagccattgttgtcatgttgcaccacaagaaaacaaatgacaaattaaaccctttgttttagagtcgttgtgcttgtgcagttcaatctcactgtgcttatcctgacaatatagttttgttttttacgataaattctcttctactttattaaagtattccatttaattaacatcttaaactatttttcggtttatttttttgtcatttttagtttagttacttaaaaaggttcacttttttctataatagaatagtatttaatttggttttgtttccttgtatataagtactttttaactaagtgagaattttgatgcattgcaacttgtgcctcaacttttttttctctggatttcgtattcagtttctgcatactaaactttcatgaaagatatatcttggaactattgtatagcacaggttatattctcattaatggctctacaaaatgaccaaaaatattttagaatgctaagtgaagcaaggaatagttgaagggagtaaaaatatgtttccctattttttaatttagggtgtgtttgagaaaagagaaatgagaagattaaacaactttcttatagaaatgtaaaaaaaaaacacacatgtttagtactcggatgtttagttcgtgaagcatccgagtgaaagatggatttcttctccctttatcctcctaacgaacgcatccacactactgtataatcatctgaattagtctttttttaattttctcctttcatctgaacagcatgataacaataattaatggagataccgtagttatatatatggaaatttaggaaataatttagcagtgatcgactgcatgaataaatactctgaaacgacatacttatatctgcaagttgcggaaaataattaaattaagctagctactctggataagtcctgcacgaaattcattcagcagaacagtcaataccgtttgtttcctcaattcttatactagtgtgaaaccatgccgctgaaagaccaggatggttgcataaggaagtcctggccatattgaaagaagagcaatgcattatgcatatatgtctgaaataatgaaaaagataggttgaaaacagtaagttgattgttagtgcatatttatatatatattcaggatttttaaactaattaatgaaaaaaaaatgaggagtaccaaagaagatattctcctatgcatatccatccccttgggttcctacctagtacggccggacaggcaacattgtaacatgcatcaagtacattgcatcacacccccaataaagcatccacatcaccatccagcaacttgcatgaaacaaaaaaaattaattaataaaaaaatctactagcacctcccaaccacctgtaatatggtgctttgatagggaccaaaataacaaacaaaaaaaagaattccaaaaagacatggtcgatcacttttcataaaaaaaagcacagatatactaccattaaattattgtaattaactaggctcaagatagatagacgtcgtctctactactcctactagaaaacatatctttgtccaagcaaattaacaaaatcaaatatagcaagaacacgtttaattttgtacacatgctgcgtttgggttggtccaaataaaatacaaagaccagtgtctatatatacagagcacacgcccacagcaactatcactcttcatcatcatcttctttggcttctccctcttcactgccctaattacaacccatttgcttatctctctcctctctctctctctctcgctgcagccatagcttagctagagctagagctttcttggtgccgagatgggggtggtcagcttctcctcgacttcctccggcgcgtccacggccaccaccgagtccggcggcgccgtgcggatgtcgccggagccggtggtggcggtggcggcggcggctcaacagctaccggtggtgaagggagttgactcggcggatgaggtggtgacgtcgaggccggcggcggcggcggcgcagcagtcgtcgcggtacaagggggtggtgccgcagccgaacgggaggtggggggcgcagatctacgagcggcacgcgcgggtgtggctcgggacgttccccgacgaggaggcggcggcgcgggcctacgacgtggcggcgctccggtaccgggggcgcgacgcggccaccaacttccccggggccgcggcgtcggccgccgagctcgcgttcctcgccgcgcactccaaggccgagatcgtcgacatgctccggaagcacacctacgccgacgagctccgccaggggctccgccgcggccgcggcatgggcgcccgcgcccagcccacgccgtcgtgggcgcgcgagccgctgttcgagaaggccgtgacgcccagcgacgtcggcaagctcaaccgcctcgtggtgcccaagcagcacgccgagaagcacttcccgctccgccgcgcggcgagctccgactccgcctccgccgccgccaccggcaagggcgtgctcctcaacttcgaggacggcgaggggaaggtgtggcgattccggtactcgtactggaacagcagccagagctacgtgctgaccaaggggtggagccgattcgtgagggagaagggcctccgcgccggcgacaccatagtcttctcccgctcggcgtacggccccgacaagctgctcttcatcgactgcaagaagaacaacgcggcggcggcgaccaccacctgcgccggcgacgagaggccaaccacaagcggcgccgaaccacgcgtcgtgaggctcttcggcgtcgacatcgccggcggcgattgccggaagcgggagagggcggtggagatggggcaagaggtcttcctactgaagaggcaatgcgtggttcatcagcgtactcctgccctaggtgccctgctgttatagcatcaaatcaaattcatatatagatcaaatcaaatcttcttctcttccatcttttttgttgttcatcgtctgttgtttcatcttcgatttagagctgttctatcttcgactttctttttttgttttttgtctttattttgcatagaagtttgtcaggtcagagattgcaaatgatcgatcaagatcgagctgtatatgtacagccttattaggaaattaagtctagagatcattcaagtatgtacaattatctaatagtacatagtaataagttctgtttctttccaaagttgtcttcttctgttcatctgatgtgaattgaattaattagattccacagaattttattcttcgcaagataattggttatgctgcacttattattaatcgtactatttgctgatgctatgcgctgagtgcgtgtaacaatattaataacatgtgtaatctatcatcagaagatatcatacatatatatggaacactaatttggggattcaggacgacttgcacatttctttttatataatattcagaacactcgcgcgcgcgcgcgcgcgcacacacacacagatatatatatatatatatatatctatatctagctagaaattatttgagttattaacctgatgatctttttctggtacttcctctcttatatatctcgaaactgtgctaaatttaattttagcacacttgctatttgctatttcttggttgagcattcagattgttcgaattgatctccatttgctatatatcgatttaataactagtagttaccacactctggtagtttcaaacttttgttttgttaattagacgagtaattcccatatatctgtactcaaatggagcaaagtgatctatctcttgatggagttttctacttcgttttgttgtattctatgtcactgatctttaatttgcatgtggcccatattttcttaattagctttttgtcgtaaacaaattccattgtggaatagggaaatcatatgttacttatcatgcacctacagtgtttcccccccaaaatctataactacagtgctagctacctggggttactatctataaaaaaggttacttttgctttaaattgtttctgtttatattgttcaaagttttcttttataatctttggttatttggcaatgtgatcataactgatactttcttcaccagtataaatcaagtgtgccttcacgacaactgtaaaatgcgttgtgtttcaagggaaaaagcttctcgccgaagaaatttatttttatgttcttaggaagtatattacgatcgaggttgagtcatctcctagtatgcgttagtccagatctttattaatgcaagttatattttggaaaataatcttacgaaactaggcctatgtttagatcctcctcctcaatgcaaagcactggctcgtcgtaaaactaactgttttggatggtagttaacctattcgtcatgcttttaggacagtctaaatagaggcctggtctcataggaattatttttcgtatattatagtgtataattatgtttcttacccttctatacggtagaaatggaagagaataaattaatccttcaaaaattttatgcaatgaaaatatctttgtagatgtacgtcatcatattttcccccaaatacatgttatataatattttgataatataataagttaatatgttgtaaaaggtataatactaactaaagtatgagaaaaaaaatgatggttttatattaggtctgaagaaattattttatttttcattgtagaaaatcttttcgcagtcaaaagcgatcatagaacaagcatacttaaaaaaaagatggatattgtaatatatatcataagtgctaacataacaacaaaatgttgttatttattttagataatggaatagaatcttggcatttgctcaacgagctacatacaattattacaccaattcaaccaaacacaaacacacctcaacaagtcatatgttattattatttagttacatatgtatggtactatcatgttaggggccttctttctacatatttcgtaataatgcctagctttatgaaaattcatgtttaagctttactttccttcttatcgattaagtttgatgagctcaaagaccaaagaaattttacaattgaaaagtactaatgtttcatgtgcgcacatatttctcccgatcatcactatatatatatgtacctcaaatccaggtaacaatataactcaaaaagacaatctaggtatattgaagatatctatactatccaattaaatacttatctgtgcaattctaaaagaaagcaatggtggtagcaatgaatctaccactcactaagtaatattgtatacacaccgtcccaaaataagttcagttatatatataaatatggatttactagcatgtgtatagtttatatttatatgtgacaaagcacgggtataaatgtagctagttgttccaaatggtatgttctcatcaagggtattctaaatttcaaacagaactagtgaaattggcccgagacattactacaagatcacacacacaatgggaagtcgaaatcatctcactattacttgtaagaaagattattttgtcatgaaagaaattaaatagtacaactaaattaaatgggtgt

SEQ ID NO: 8001 - DNA, 17820 bp, Oryza sativa
agtcccgattgagcggccgaagtcactccttggattaggcttggccagccaacccactcatagggcggttggtccaccacctcacttgggcttgtcttggtgaaattgggttaatggccaaggcattggacgtggtcggccggcctagtttaacttggtggctgacccttccaaggggtccaaaggccctccggctaggcttgtcttggtgaaattaggttaatggccaaggcattggacgtggtcggctggcctagtttaacttggtggctgacccttccaaggggtccaaaggccctccggctaaggtggtgaccagcctgattgctggcccttgttctaggtcggtcgaccaccctcggctctataggatgacggctctataggatgacttgtttttctggtcgtcgtatctgcttcgtccacactccaagtcacacgtatgtactaagattacacacatatctattcacgttccttattcgatctttctagttttgacttgtttaatttttttttcatacacacacacctcccatgcacatcaatatagaaatctcaacttcatgtgcaccatgattaatttggcatattattcatgaactgtcttaaccctcataaacctcaacattttggcatattttacatcacaactttcccccaacttttaatcatttacttctattttttgaaacatatatgatttcaagtagtaataatctcaagttatatgtaagagcatatttccaaagtttaatctattttttgaaacatatatgatttcaagtagtgataatctcaagttgtatgtaagagcatatttccaaagtttaaccgttcaaggctcttatcctattcaccctaggagggctaggacataggggtgtatatccagtataggatcgggtctttcccacccaaaaagtagctaatgaaatgagagactcccctacttatatattacatcatttgtccttccataatctatgtgagactatttaacgtatcctaacagataagtataaggtctttggcagcgtcgtgagacaaatacatgtggtgccgacatagggaaattaagctggctagatagctagctagggatgcaggtgacacgtcgacggcgacggctagctgatgcatacattggtacggttgatcagctgattaagtgtcccttaataatttaatgtttcccgatatgatcaatctctctaaatatatcgctaattatacttgtttttttcttcttcttctggcaggaattcaggctcgttcttaatttgattggttcatgaacccctgcaccaacatagcatgtctcaattaacgtacgtgtgtaccaggctaccggtagcttaattagccagtgatggaatttgattattaatttggctttaaattagttccggacaattccctgatccatctatctatcttgtgtgactatctacttccaattaaggcccccggtcggcagatggcaagagtaattagcaaagttccacagtacagatgctccctaggcctatatatagtttaattttgcgctcgtactagctagatagatatcgaagatatatacctttcagctcactactgtttaacgttgttcggcaaagaggagtactcaccaaagtaggcccaaaccgaccaggacttaaccaacagctttatattcaattgagaatttattaatttcatcagcatgcagctgctactggtccaaatagagcagctagcatgaatattgtgtactacagcccggacctctctcgatcgatcgaatatgcaagctagatgccaagatctatcgatcctagctacaccttagctgtttccatggagatgcaacgcttgaatggcaaatggatttttgaaagagggtgactagctataacttgtctctgatcgatctctctctctcgctaatttgaagaaatggtaacagagagttactgttgatatgattcactgaaaggaggatgcttacaagaaaacatcgagtaactaacaaggtggtgtaacctccgcatgttagaaggtttcaacatggcgaaaaattatggtgtgtttcacttctttcatatatatttttctaggtggtttaacgacggacaatttttacgatgtggttttactaaaactagaatacctacatgtataattgacgagaaggggtaccgtgttttcttcttaatctttaactagataggagctaaaggtttagatgatattatttgattgttacgatttatacttttaacttttttagggggggtgtatatataaacatgtaaggaaatgtaatggcaaccatacataaagacaatcgaaagaaagataaagtgattaactagagggaaatatttatttcaagtagatctacatatgaaaaatcagagagttaaaaaattatgtcagcattaggtttcatgagagaggtatcgtaaacccttctttgctttttttttttcgggtgactggtggggagatgagggtccttagaagaggtcattgttagataggttcccacggagttcgtctatttctacacttattttaatactcatgctatatatattgttagatacttgacaaatatggaaggtacacctgataactagggatgttaggatacgtaaaaatgctgtaatactagataaaatttgaattcaaactcaactagcttttaattaattttgaggttttttgacatatatagtatgtattccaatcttgtctcacctataaaacactaataatacaaataaaagtttacacacaagctatatatttttcttctttgtttaattttttatggcttatccggcgaatctacgtagtgtttatcgggatcacatgatcccaagtaaataacttaatgctaactaatttatatcatattaattagtactatattagtagttaataattagagacttcctccattccaaattgatctacatatagtttttttttaggttatttctaaatgatctacatatttgtgtttatttattaaatctatttgttatttgtgcattggagtaaatggacattgaggcatgcatccatgcgcacaagtatttataacccacatgcaatatcttgatttgctattggctaggaaatagtggggatggtgcatgcttcgagtttgttgctagagtaaatatagtatgagagaattattagtttttttttgtcttggtgtacctatgaaatatgcagatcaatttggaatggagagagtaattgatatctatagaatcctcgtaattttttctaggttcgtcactgggcttaggctgtgtttggaggagggggttgggaacccctcctccctggcacgcaaaacgaagttcgttttattacattattaattaaggattaactaattttttttttaaaaaaatagattaatatggttttttaaacaactttcatattagaaagtttttttttataaatcataccgtttagcagtttaaaaagcgtgcgcgcgaaaaacgagagatgtgggttggaaaattaggggggaagaacacaaccttatattagcagtaattcgatcaaataatatgatctatttcctgctagcccggaaactcaggaaatgggcacgtatagtaaagcaagtcgtcgtttggatcggccagtccgatgaggctataaatcatactgaggcggtcaattattaatcagggttctggaatgtaactgatgagatactatgtgccaacggcagactggcagagacagtttatgaccgtaattaagcagccgtgaccacatgtacatatatgcatgttagtatgtgggttatagtagtacttgcagttggtgaacttcatctataatatatggagtgtagtatactagtatatatattatcctatattaggatgcacaacgcgtgtagagaatcttaaactaagtcaatttataggcatttcgatttggatcattagtacacaaaaaaagataaaagattcaacatatatccaaaagcgaagataacttttttcacgctgaaaagaaaaaaaaaatcaataaacaaagaatattgtagttttttttttgccaatagcaattatttgaaaggtaacagtaattattttttaggggttgaggggatcgaatgaatggttgtgaggcacgctacttacactactagctagggctgcattcgttcggagaacatggggaggttggttgtttcgttttccacgcgcacgcttcccaaactactaaacggtgtgttttttacaaaaaatttctatattaaagttgctttaaaaaatcatattaatacattttgaagtttaacatagttaatactcaattaatcatgcgctaatggctcacctcattttgcgtattttcccaatcttttcaatcccctctccctcaaacacagcctagatatatttttacgggggtgagaaggggagcgagtagacggctatgagttggttaaaaaactcatggccgtcatcttagtctcccctcctcaccccagtaaaaatattagaaaatgctttcatgcagttatttgtattaaatttataaagtatatatagagtagtgtcggagagtgaacttctctagcagggaaccatgaggccctcctttgtgagttcggccgggggcagcgggtgagattcgagagcttggtgagcgatgctgtgtgatcttgagggggttcaatcccccaaagacgatgggacaaaaggggtttatacaggtttgggccgctaggaagtgtaataccctactcctgtgcttggttgattgagtgtagaacaccagtgcttgaggttgcaagacccaagcgcgagttcactcggaagttcccccctccaccactaggcatggacctccttttatacctcaaggggttaccacatgggtccaacaacctaacctaactccggtggagaagtattataatctttgcattaaatgcatgtctggtctcttgacttgggaagccaagcgcacgtcgtcttaatgatggggcctgtcaaatcttgccgcctgacacggggggtgcccttgtcagtcaccatttaatgggtaaagacttctgggctcctattacaccgggaaacgggagcattgctttgaccagagcgggaggaccgactccgactggaataagaggatgagaacctctcaccatcattatttgatgggacatgtcgggctgcacgtcgcctgacacacgcgatggtgcgcctgacatcctgggtcccatcagtcattcaaccggtcacagaccggttgagtgcactgcacaccgcattaaatgcggcgtggcgcgaccgctcgggtcgccacaaatgcgggtaggtgggcaccttgaggcagacacctaacccaccatacgtggtgacctagagagggggtcggggctgcccgacccctagtgacgggagggggcggccgccgcccgacctcgggcccgatcccccctcgggggagggccacatggcgcctggggcagcctcctccatccattctatgggaaggagtggccgccgccctaccttgggctcgactcccctcgggggagggccacgtggcatcggggggcagcctcctccgtttaaccttttgggaaggagtggccgccaccccacctcaggcctgactcccctcgggggagggccacgtggcatcgggggacagcctcctccgactagtctttgggaagaattggccgccaccctacctcgggtctgactcccctcgggggagggccacgtggcatcggggggcagcctactccctctaaacctgataccccggacccatatcaccgacagtagtaattagaaaaggcgatgatataatatgcgtaataagaactggatcaatgtcgtgctaaacgacaagaaagtaaattaaaggaatcagtaattctttcagatcgacaagctgctagcagggatcgatcatcgagcaagctgtcagtcagggtggcaatcaatcttcaaccatcaacccggccatcatcaactgactttcagtacattcccgggctgcaactttttgtgggtcgatccctttgatgaatatccagcaggagtaattaattagctcctcaacaaagaataatattaacctcacttaattagtgtgtctccgtttcatctgtccatcacatcatatcggcacagctcgatcacacattttattagaaatgaacatatcaactcgaatgggtccagcctgcctgccttttctgaatgatctctcatccctattcacaatgaacaggctagcatgcatatatgcagcttgcagcaatgcaagtagcaagagtgcgccagcagaaaacttagatgcgatgcaatgcatccatccatccatccatatgtatgcactgcatctggcaacaatggcgatactgcccgggaatgaatcagtgtgtgtgggggggggggggggggcagagagagttgctgctgcatgcagcaagttggccaatggcgtgcgatgcaaatgcatggctcagaatgatcgatagccatacagtatatatcttctctactgttgcctactgttgcagctggcctggctacccctgcctgcctcttgctaattactgatggacagattgatcatagtacattatatatgctaccgcctccatcccaaaataaatacagccatagatatatattcagcatttttgagcgtccgtcttatttaaaaattttatgaaaaaaattaaaaatattagtcacacataaagtactattcatgcattatcatctaataataataataatactaatcataattatttttcaaataagacgaacgatgaaacattgagcatgaaccgtgttaaaactgtatttattttgggacgaaaggagtactcctaaatgataccatcaatattggcagctgaattgcacctggtattgggggtcagtacaccagtactctccagctgctccaattttgactgttttcagggacctaagcagaaaagaacctggtataatatcccacttgcagacgtaggtaggtccaagcccatatggccatattgatctttgtccagacattttccaaactttgcagtgatttctctctctctctctctctctctctctctctcttttctttccaaacagttgcatcagatcagtgcctttgtttcactgtaccttttactgcgttgtgtacgaggcaccttgctgctgtcctctggtactgtgcatgttccttgtctgcttgctgtggacctgatcttcatttgggaggagaccgacttcttcctcttcctttgtttgcatgagagacgctctgaatcctcagacctgcatgctgcacctgctttatgtaggagtgttattactggagtatttctctatgcccacaagtaggcacacaaaatgttaattctccatgaaaacctggtaaaatggaccagtacctcttgaccaattgggtaattaactaaccccacgagctagctatccctacaaactaaaagcctgcactttgacagttgacacattgatctttgtatgtacaaagttgaaaatttaaagacccttaattacatggaaatgctgacacatttaggtgggaaattacaccaatgtctaatcttactccaagattcatgcttcatcttcgacgagctttagcaaactttcacgaaccctaaactttgacagaatacctattggttagaatcttgggttaagaatacaatcgagaagagtgggggtcaaggacgaggaaatgggaggtgtgggtcggtcggaaaatggtatcattattaggtgggaaatgaaagagggatgaaaacggtcggaaatggtcgaaaacggtatcattattttattgtttttttgaaaacgaatggaaacggtcggaaaattttcatatttatgaattcatctatttagtgtcaactttaatgccacgctgacagaaatttaaaaaaaactaaattttgaaaacggtaaccatcggtaaaaagatattattattatattagttttgcggaaacggtatcggtacggtcggaaaatttccataccgttttcactatgtgaaggctaccagctgccatggtagagtagtgaggcggtgatggtattgttcgagccacaagagagaaagatgctgatgggttagtgttggaggcaagacttgtaatacggagtggtgtggagatgggtctctcttcagtcaggggcggaggtaggcttagggcagttaggacttgagccctaaacttatctccaaaatcttgtttaatttttgttaaatcgccatgcaaatttaaaaaaaaaaaccaacactcgattagttgagctctttctttcctcagcctttcataatttctagccccaccactgtttaggaaaggagtcggagccgaggaagaaggtggggtgcgcggcacctcacatctacaatcaaagagaggagagcgatatgatgttactgtatcatgatgtttgctgatgcacacatatatgttcatatgtaccctgcccaatcaatccacccgaaaatggaaagtgacacatctactgcatgccaaaaacgatatgatgcgatatatatatatagtgtagccgccgttaattggctccatgcatgcatggtagaaagttctagaatataattataatctactactcatgctaagctatattgtgttcaagactttgacttgaacacacgcgcgcgcacatgggaattttgacaggagaaaattagaccaaaagcatctcccttctaggtgttgatccaatcatcaagtcgagaaaaaggcaacacaagcaagatattgctaataattcattagtactgatcatatgcatgcatctgcagaaagttggtgtcatcatcttaattaattctccttgctaaatgtattctatttcaaatccattttgtttgctttacattaatatagccctagctatcacggtcaaactaaacaataatatgcatacgatacgagtacatgtttacatgatggtacaaaaccagtgtgtagatatattcttaaagtttatccatggatgcgacaaaagcagaatggacccgggatacagaaaacatgatgcgttctagccggttccaatgggcaaattaaaggtactatagtactagtactatgcatgcatttgtatttttgttctgaatgctcatggtggcttggaccacggcctcactagctagctaggttaaatactttttgatagtattccgcaacagaattgccaagcattaaacacgatgtgaaattttgataatactatattctctatgttatactatatatttatatcagaacggtgacaaggaattcataaaacatatgcattgaacatgtaccatggtagagcgagctcctagatagattggcccctttacaatattgtagtcgagtcattgatcaaacaaaatgttttattcttcttccttttcctactataccatcatgcgacaaaagttccttttataaaagttgtaagtcgatgttaagcttaacatcgatgtttgcccttcgtcttctctctactgtatcaacaaataatttgtcttatcggcaagcctgagggagctcatactgatgactagaataatatttggtttaaaaaaatgtgatcgtcaataattttaaaatttgtagtctaaattgtaaaggaataatatacagagagctggcatgaaaaacaccatttatcttaaacttatttggttgtgctgaacatgttgtatcacaaaatactctatctgttgaaaaaataaaaataaaactggatatgacatatcttaatataactaatctggacatgtttattttttttattcttgaaacgaaggaagtagttatcgaaagttttaaaagttggaccgaatcttatactaaacacgagcatttatgaattatgataggagacagtattccacaaggttcatcgtgaaagcaaaatcttccttgtaagccgaaaagaacaaggaagaaaaatcaaggtgtccgactacgtacaatacggtcgaggaacatgttgaggtagctagctagcttagctcgggagtggagtggatttaatttatttctcgcgacgttttctcatcactcctcgcggcatagcacatgtaggtccgtctagatctcctggtaaaattttaaaccctgtcacatcaaatatttggacgtatacatagagtattaaatatagacgaaaaaataactaactacacatattacgtgtaaattacgagacgaatcttttaagcctaattgcgttataatttgataatatggtgctacagtaaacatttgctaatgacagattaattaggcttaataaattcatctcgcgatttacagaaggattctgtaatttgttttattattaaactatgtttaatactttaaatgtgtatctatatatccgatgtgacacaccaaaactttacgcattgaatctgaacccagcctaaatacagccgtagtacatgaggatgagagagagagacgacgatcgatcgacttggtgcacatgcacgaaaacgagaacgagagagaaaactgatcgactcgaaaacctgcagtccgtgtttaaatttccccggcccctgctgtgttgcgcaggcaatagggcaagttgtgcgacgatcgacgacgatagatggcgaaatggaaaaaccattcatttccactttaatcctttgtttctgcatcagtggcagagagggggtgggggatgcagctagtagtactgtagtatgctcccatcggatggcctattcacctttaaaaaaaaggcaaaatttgaattttcaaacttaattttgatattttcaacgtagtttcttttttagcattggcttctaagtcaccgagaacacatatataaaaattttaactacaaattcatttttattctctaataagccgttttggcttattacgaaaaaaaccaaccgataaggcccgtactcgccctgtctcaatatataacaatctgatttatgacatatcctagaaatacgaatatggataaatacatatccaaatctatagatatcaaacccgatcataggtttttatatatcggaacgaggaagtaaagtagagcagaagacgacaaggtcatccagcagcagtggcagcaataccagtggcagcatcaattcataggccacagtagcgatccttttctggatccctccctgcagccactggacggctggaccagctagcttagctagcggcagctgatgctctcgtacgctgatggatgcagcagcatgcactgcacacacacaaaccacccgggccgcggtttctagcttcccccccggtgtgtggagatgagatgatctctctctctctctctcggccacagccacacgggccgtacgttgcgcgccgtggtttttggatgcccaagttgctcatccgggatggagaaggacgcatgaaccgtaaggttgtctcgctatgatgttacaggacggacgaaaatttttcggtccagtactcgaggagggttttattgaggggaaacagctcgatttccggggttcaccggagggaccgggtaaaaggatgctacccatattttaattggggtccttgtcgtatgcttatatatatatatatatatgtatatatatatatatatatatatatgtatatatatatatatatattaatgatttgtgcagcgttctggggtaggctttttcttattgcttggctacttgtgtacgggtgttaaggaaaatcacatactaatagtagctatcggctttaatttagacctgactactctcttattatctggaagaactattattaccttctcccttattatgtatttgggctctatttactcgctactgaagcctatggacctccatgtcggtcgtcttttttatttcagccccactcgtcccactagcgcgctcctactagccgctcgttgcattcttatctcctttaacccctgaaattctcgtacgtttctgatggttttcgcttaattagatattatcaccatgatgtcgattatatctacatgttgcaccctggtaagtctaaaatccaccctctcgatcaccatatatactttgttcgacgcatccacatgttgaatttctcacacttcaatgtcttaaaatgaacccctaggcatcgtgtcttcctggtcttcggtggtttcagacgccagttaattaactgctcggcaccatcagtcctgttgccaaccgcaggttcacaaccatccatacgtaatcccattctaatccctatttgttcatcttaaatatatgctacttttttcactcccatcctaatccctattcctgaactatttctataccattatgattaattgctgagtttaagagcctactaatttcctttcattccatatcataccatattttagtttgtcctaaggtaaaactggattttgaagaaactaatttgatgattttttaaaaaaataattgaatttatttcggccatgacttctgataagctacatctaattattatagaatttgcaggagtaatcattgcgaattacaaaattacaacttcactagaagcaagaaaactactaagaaaaaccacccaaaagacagatatatccatatatgattggtcaaagtatgcataaccattgtttgcaacaaacggcttacaagttgtatgtggtccttatcttccttgaactagaaatacaacatctccgaaaccagcagtcgatcgaattccgcctccatcaccgttagcgaatgatgtttaaccaaaggggaagaaaatgttggggactagctgagcggtaaatcagtcattagttcatatcttagcaccaccaaaggaacatgatcagacggggataccgcagcaaggatattgcgctctaatttagggcctgtttggatgcattacatcggttgttgggacactaattgtaagtattaaccgtagactaatgataaaacccattttataaccctggactaattcacgagatgaatctattaagcctaattaattcatgattagcctatgtgatgctacagtaagcatgtgctaattatggattaactaggcttaaaaaaattatctcacgaattagctctcatttatacaattagttttgtgggtagtctatgtttagtactccaaattagtgtccaaatatccgatgtgacatggacgtactacattttattctctagatccaaacaccaccttagacatgaatttgtcctttcacttggaagacccgctaccttcttccttattatgtatctgggatctatttattataaaagttagtcgatatagtagaatgacgtctaaccttctcgatcacttcagtcattgattacccaagacacgctagatgacaatatagcagcacacgatatttgttaacgagattcaggccaaacctacatcctcgaggttctgatgatgagcgctcctcctcaatggatatagcacctaggctctacaagtacatggcctcgtcgttatcatctccctacgtgtctacgctaaattgtagtcgttacgtttacattgtggtgtctccctccctatttaaagaattgtcgggttacagagtccgattctaattccaccccttaccacctattacaactctaaatccaattgtaatcaaataggactaatatattcgacacctattcactattcgctctctagtgaagcctacaaacgtccatagatgtagtcttcctcatttcagccccgctccggcccctctgttcaccccactagttcatcccatcggcctctcattgaatccttatctcccttaggtccccgagaaatctccgtgccttttcatttttttaccttatggtttccgtaattttttaattgatcataaatcttactagggaaactaatttattaatttgatcattttcagataaaattcagtccatggttaactaattaattagtaaatccggaaaacaaattaatccagccggtgcgtgtacgtctgtccaaaggtatactatatggaaccaaccgggcatgcatggtggatcggcacgcacatacagtatgtctcaagtactgtacatgacctgtgacgactctgtgagtatttttgtttgtaattaaataaagttgctggatgagccggaacaaggggatggaggccggattggggcatgcatgtacatggtcggcagcagaaaataccaggtgcagcatcatacgtacatatcgatggacagcatcatcatgcggcgggcaaagcatcgcatagccagctgcactagcactacgttccagcatcatccatctgctccccagccccaacacgacaaataaaagccggagagagagagagcaggtataatagataaacagttataaatatattttaaagagataaaagaaaagagagaaaagtaacgggctataaatttgtagccagctacagcatggccttcaagatataatgtatgtatgatagataggaccatatattaatagtatagtaagcaactattatataaattgactattacatcgactataaatgattttagagttagtaggggcctgcactgttaaacttgctcagagagagagagagagagagagagagagagagagagagagcgcgcggcgcctttggttttggttttggtttgctgcagaggggggctgcatttggcctcttctcgctttgcatttttgtggcccagccaagccgcctgtcacctctcccgcccacttgcccatgttgcataccggccgcttccacatttcttacatgcccacgcacctattcatgcatacagccggcccccaccacctgcccaattggacattaatttgcttttcattttgtagatcgatatcctcaaaaagaaaaagaaaaaaagggatggagagggccggagatatatttcttgtaatgattattgtttgccaggtttaatcctctgccatatctagcttgaattttttttccaaatgggctctgaattagcggtcgtgcgagttggaacttggaaccaacgaccacgcgacacggtactggttaggagacaatcgcttgactatagtggttcgatttttcttaagttaatgttttgtgtttttagtcatcgagttaattgtttgaaattaaaagagattgttaatttttcttagagaaaaacacccataaacacaaaaagattgttgttttcccccctatatgttgttattttattaccattaattaattttatatttcttttatgtgctgccactatcagactacagagcttgagggtgagaaaacattagaaacatattatggagtattcagttttccaacaaaaacataattactgccgatcgataacccatagttgtagccttgtaggcgtacacacctagcaaccaccgcctctggctgcaggctgcaactcaatgcatgggaaattaatttttagttccccaaaaaagagatttcttaattttgaattttatgaagttttatttctgagaaatttcgatgttccaaatgagttctaaattagcggtcctgtgagtagaaatcaacctaagtagaaacactggagcggtactaagttagcgacagtttgcatgttcactgtaataatagtgttcccatgttttacgtctttttagtagcaagttgatcatttgaaaaagaaacggctgtttttctccatctctaattttatcctggtcttaataatttttctagtgcactataaaaactactggtagtaattattaagatcgtttaccacttagtttaagataatgcttctgattctctgcgatggctcctatggagatagaccatggaaacagtcttacagctgcatctatcttatcaagacatgagtatacacgtgttgtggacgtttgtgtttgtattgtgtttgttctctgattagaaaaaaaattatactatactatactatagaccttgataaaaggaattagtacaatcaataaattgtggttaagtattttattagtggttatgtaaattaaaaacaacaattaatctcttgatatgttggagaacacatgcatatcaatttatagtagtcttctcctgagaagtttcctattggacgctagcttatccatcagaatataattatgcctacttgcagcctaaatgcttgacacacccatgattcatttctctttctaggaagaaagtttctctttctaagaaccttcttccccctcacacctaattatagacgaatgcccttcgctttcttcacttgtcacaattctgggcacgctttttttagcttttcttattgctagaaactaattttatctgttcctttcttcctccattttgaacatacatatatcacaaaaattccgcccaaaaaataaatacatgttgaacataaatatatacgtctcctaaatttcacgttgtttagagctatgtttaattaattagatgcatccagttagtattatttttcttctagctttttaaattttttttttgtttgctgtcgcggccgccataggattttgcaccttggtccaacagtttttgatttttaataataaattaatgggtgaccagatactctgatcaaaaagattaaatagggatgacgcacacgccaatccgctcaagtgacgacacagtccttgacttccttgaagcacgtgcacgtcaaaccggttagtattatagactaattctttctgtttatgtcactgctaattttattttatctttaattagcacagcttaagaaatcaaattaattataccataacttagggcgtcgatgttttttataattggactgtgtcgaaacatgatttcggcaataataaaagggggtagcgcacgagacctaaaagtggatggatgcggagacaaaggatttagacaggttcaggccctctcaatgagaggtaataccctactcctgtttggggatttgaatccgccgggtgtagtatagatctgacgatcaggttgtgtcatcataccccctagagggcctcctgcccaccttatataggatggggggcaggattacaagatagaaaccttaaccaatacggtatcggtttcctaaatctactttacaatattatcaaaccaggactttaggccgttccgtaatatacaaggaaacgtaacacccaagtcatgatctgttacatattacatagatataagttatcccctatgactagtcggataaccatgccgtatgggtatggggtacccataatatccacagtagcccctgagaccttcgcagtcgaaaagataatcttctctcgaaccagattactccaaagccgagtgcttcaatcatctttgtcatggtctcccgagtacttttaccaaatctgaagactgtggagggctggaaaataaagtcaggtgcaccgactagatgcacctaataggtgtagcccccgacaatgtggttaattgaacaaaccaaacatatagtcaaggaataaataatccaaccaaccgagtggttttgataatcgtaatcaaccaagtgacttgatatcaatatatagcatatgcggtgtgaatcctccaaataacatgatccgagtgtgtcggtgatatgggaccgggagtatcatgactagaggcttgaggcagacacaatcgcccacgtggcctggcaccttcggggacgtcgggcccgagggtgaggtgtccgccctcctcctgatttcccccgagggggggtcgggttgcgtttgcc
